United States Patent Application Publication US 2020/0163878 A1 - sequence listing, part 56

SEQ ID NO: 212786 - RNA, 1410 nt, Artificial Sequence
  derived and/or modified CDS sequence (opt5) from neuraminidase__InfluenzaA__AEH59356
augaaccccaaucagaagaucauuaccaucggcagcgugugcaugacaauugggauggccaaccugauccuccaaauuggaaauaucaucuccauuuggaucucucacagcauucagcugggcaaccagaaucagaucgagacguguaaccaauccgucauuaccuacgaaaauaacacauggguuaaucagaccuaugugaacaucucuaauacaaacuucgcugccgggcagagcguggucuccgugaaacuugcgggaaauucuagccugugcccuguuuccggcugggcuauuuacagcaaggacaacucuaucagaaucggguccaaaggagauguguuugucauucgggagccguucaucagcuguucuccccucgaaugccgcaccuuuuuccugacacagggcacccuucugaaugacaagcauuccaacggcacgauuaaagauagaagcccuuaucggacccucaugucuugucccaucggggaggugccuucccccuacaacagccgcuuugaauccguugccuggucugccagcgcuugccacgacggaauuaauuggcugacaaucggcaucuccgggccugauaacggagccguggcuguccugaaguauaauggcauuaucaccgacacaauuaagagcuggagaaacaauauccuccggacccaagagucugagugugccugcgugaacggguccuguuucacgauuaugacagauggaccgagcgacggccaggcgucuuacaaaaucuuucgcaucgaaaagggcaaaauugucaagagcguggagaugaaugcccccaacuauuacuacgaagagugcuccuguuauccugauucuagcgagauuaccugcguuugcagagacaauuggcauggguccaaccggcccugggugagcuucaaucagaaccuggaauaccagaucggauauaucuguucuggcauuuuuggggauaauccucgccccaacgacaaaacaggauccugcggcccggugagcucuaauggggcuaacggagucaagggcuucuccuuuaaguacggcaacgggguguggaucggaagaaccaaaagcauuuccucucggaagggcuucgagaugaucugggauccuaauggguggaccggaacagacaacaauuuuagcaucaaacaagacauuguuggcaucaacgaaugguccggguauucuggcagcuucgugcagcaccccgagcuuacgggacuggauuguauucgcccuugcuucugggucgaacucaucagaggccggcccaaggagaauaccguguggacauccgggagcucuauuuccuuuuguggaguuaacagcgacaccgugggcuggucuuggcccgauggggccgagcugccuuucacaaucgacaaauga

SEQ ID NO: 212787 - RNA, 1410 nt, Artificial Sequence; identical to SEQ ID NO: 212781
  derived and/or modified CDS sequence (opt5) from neuraminidase__InfluenzaA__AEH59360

SEQ ID NO: 212788 - RNA, 1410 nt, Artificial Sequence
  derived and/or modified CDS sequence (opt5) from neuraminidase__InfluenzaA__AEH59364
augaaccccaaucagaagaucauuaccaucggcagcgugugcaugacaauugggauggccaaccugauccuccaaauuggaaauaucaucuccauuuggaucucucacagcauucagcugggcaaccagaaucagaucgagacguguaaccaauccgucauuaccuacgaaaauaacacauggguuaaucagaccuaugugaacaucucuaauacaaacuucgcugccgggcagagcguggucuccgugaaacuugcgggaaauucuagccugugcccuguuuccggcugggcuauuuacagcaaggacaacucuaucagaaucggguccaaaggagauguguuugucauucgggagccguucaucagcuguucuccccucgaaugccgcaccuuuuuccugacacagggcgcccuucugaaugacaagcauuccaacggcaccauuaaagauagaagcccuuaucggacgcucaugucuugucccaucggggaggugccuucccccuacaacagccgcuuugaauccguugccuggucugcuagcgccugccacgacggaauuaauuggcugaccaucggcaucuccgggccugauaacggagcuguggccguccugaaguauaauggcauuaucacagacaccauuaagagcuggagaaacaauauccuccggacacaagagucugagugugcgugcgugaacggguccuguuucaccgugaugacggauggaccgaaugacggccaggccagcuacaaaauuuuucgcaucgaaaagggcaaaaucgucaagucuguugagaugaacgcucccaauuaucauuacgaagagugcagcuguuacccugauuccucugagauuacaugcgugugcagagacaacuggcacggggccaaucggcccugggugagcuucaaccagaaucuggaauaucagaucggauacauuuguuccggcaucuuuggggauaacccucgccccaaugacaaaaccggaagcugcggcccggucucuuccaacggggcuaacggagugaagggcuucagcuuuaaguauggcaaugggguuuggauuggaagaacaaaaucuaucuccagccggaacggcuucgagaugauuugggauccuaauggguggaccggaaccgacaacaauuuuuccaucaagcaagacaucgugggcauuaacgaauggucuggguacagcggcuccuucguccagcaucccgagcuuacaggacuggauuguauccgcccuugcuucuggguggaacucauuagaggccggcccaaagagaauacgaucuggaccucugggagcuccauuagcuuuuguggaguuaacucugacacagugggcugguccuggcccgauggggccgagcugccuuucaccaucgacaaguga

SEQ ID NO: 212789 - RNA, 1410 nt, Artificial Sequence
  derived and/or modified CDS sequence (opt5) from neuraminidase__InfluenzaA__AEH59366
augaaccccaaucagaagaucauuaccaucggcagcgugugcaugacaauugggauggccaaccugauccuccaaauuggaaauaucaucuccauuuggaucucucacagcauucagcugggcaaccagaaucagaucgagacguguaaccaauccgucauuaccuacgaaaauaacacauggguuaaucagaccuaugugaacaucucuaauacaaacuucgcugccgggcagagcguggucuccgugaaacuugcgggaaauucuagccugugcccuguuuccggcugggcuauuuacagcaaggacaacucuaucagaaucggguccaaaggagauguguuugucauucgggagccguucaucagcuguucuccccucgaaugccgcaccuuuuuccugacacagggcgcccuucugaaugacaagcauuccaacggcaccauuaaagauagaagcccuuaucggacgcucaugucuugucccaucgggggagugccuucccccuacaacagccgcuuugaguccguugccuggucugcuagcgccugccacgacggcauuaauuggcugaccaucgggaucuccggaccugauaacggcgcuguggccguccugaaguauaaugggauuaucacagacaccauuaagagcuggagaaacaauauccuccggacacaagaaucugagugugcgugcgugaacggauccuguuucaccauuaugacggauggcccgagcgacggccaggccucuuacaaaaucuuucgcaucgagaaggggaaaauugucaagagcguggaaaugaaugcucccaacuaucauuacgaggaaugcuccuguuacccugauucuagcgagaucacaugcguuugcagagacaauuggcacggauccaaccggcccugggugagcuucaaucagaaccuggaguaucagauuggcuacaucuguucugggauuuuuggagauaauccucgccccaacgacaaaaccggcuccugcgggccggugagcucuaauggagccaacggcgucaagggcuucuccuuuaaguaugggaacggaguguggaucggcagaacaaaaagcauuuccucucggaagggguucgaaaugaucugggauccuaauggauggaccggcaccgacaacaauuuuagcaucaaacaagacauuguugggaucaacgagugguccggcuacucuggcagcuucgugcagcaucccgaacuuacaggacuggauuguauucgcccuugcuucugggucgagcucaucagagggcggcccaaggaaaauacgauuuggaccuccggaagcucuaucuccuuuuguggcgugaacagcgacacaguuggguggucuuggcccgauggagcugagcugccuuucaccaucgacaaauga

SEQ ID NO: 212790 - RNA, 1410 nt, Artificial Sequence; identical to SEQ ID NO: 212781
  derived and/or modified CDS sequence (opt5) from neuraminidase__InfluenzaA__AEH59368

SEQ ID NO: 212791 - RNA, 1410 nt, Artificial Sequence; identical to SEQ ID NO: 212329
  derived and/or modified CDS sequence (opt5) from neuraminidase__InfluenzaA__AEH59370

SEQ ID NO: 212792 - RNA, 1410 nt, Artificial Sequence; identical to SEQ ID NO: 212788
  derived and/or modified CDS sequence (opt5) from neuraminidase__InfluenzaA__AEH59372

SEQ ID NO: 212793 - RNA, 1410 nt, Artificial Sequence; identical to SEQ ID NO: 212788
  derived and/or modified CDS sequence (opt5) from neuraminidase__InfluenzaA__AEH59376

SEQ ID NO: 212794 - RNA, 1410 nt, Artificial Sequence; identical to SEQ ID NO: 212329
  derived and/or modified CDS sequence (opt5) from neuraminidase__InfluenzaA__AEH59378

SEQ ID NO: 212795 - RNA, 1410 nt, Artificial Sequence; identical to SEQ ID NO: 212788
  derived and/or modified CDS sequence (opt5) from neuraminidase__InfluenzaA__AEH59382

SEQ ID NO: 212796 - RNA, 1410 nt, Artificial Sequence
  derived and/or modified CDS sequence (opt5) from neuraminidase__InfluenzaA__AEH59384
augaaccccaaucagaagaucauuaccaucggcagcgugugcaugacaauugggauggccaaccugauccuccaaauuggaaauaucaucuccauuuggaucucucacagcauucagcugggcaaccagucccagaucgagacguguaaucaaucugucauuaccuacgaaaacaauacauggguuaaccagaccuaugugaauaucagcaacacaaauuucgcugccgggcaguccguggucucugugaaacuugcgggaaacagcucccugugcccuguuagcggcugggcuauuuacucuaaggacaauuccaucagaaucgggagcaaaggagauguguuugucauucgggagccguucaucucuuguagcccccucgaaugccgcaccuuuuuccugacacagggcgcccuucugaacgacaagcauuccaauggcaccauuaaagauagaucuccuuaucggacgcucauguccugucccaucggggaggugccuagccccuacaacucccgcuuugaaucuguugccuggagcgcuuccgccugccacgacggaauuaacuggcugaccaucggcaucagcgggccugauaauggagcuguggccguccugaaguauaacggcauuaucacagacaccauuaagucuuggagaaauaacauccuccggacacaagaguccgagugugcgugcgugaaugggagcuguuucaccauuaugacggauggaccgucugacggccaggccagcuacaaaaucuuucgcaucgaaaagggcagaauugugaaauccgucgagaugaacgcucccaauuaucauuacgaagagugcucuuguuacccugauagcuccgagaucacaugcguuugccgggacaacuggcacgggagcaaucgccccugggugucuuucaaccagaaucuggaauaucagauuggauacaucuguuccggcauuuuuggggauaacccuagacccaaugacaagaccggaagcugcggcccggugucuuccaacggggccaauggagucaaaggcuucagcuuuaaguauggcaacgggguguggaucggacggacaaaguccauuucuagccgcaaaggcuucgagaugaucugggauccuaacggguggaccggaaccgacaauaacuuuuccaucaagcaagacauuguuggcaucaaugaauggucuggguacagcggcuccuucgugcagcaucccgagcuuacaggacuggauuguauuagaccuugcuucugggucgaacucauccggggccgccccaaagagaacacgauuuggaccagcgggucuuccaucagcuuuuguggaguuaauucugacacagugggcugguccuggcccgauggggcugagcugccuuucaccaucgacaaguga

SEQ ID NO: 212797 - RNA, 1410 nt, Artificial Sequence
  derived and/or modified CDS sequence (opt5) from neuraminidase__InfluenzaA__AEH59386
augaaccccaaucagaagaucauuaccaucggcagcgugugcaugacaauugggauggccaaccugauccuccaaauuggaaauaucaucuccauuuggaucucucacagcauucagaucggcaaccagaaucagauugagacguguaaccaauccgucaucaccuacgaaaauaacacauggguuaaucagaccuaugugaacauuucuaauacaaacuucgcugccgggcagagcguggucuccgugaaacuggcgggaaauucuagccuuugcccuguuuccggcugggcuaucuacagcaaggacaacucuaucagaauuggguccaaaggagauguguuugucauccgggagccguucauuagcuguucuccccuggaaugccgcaccuuuuuccucacacagggcgcccugcuuaaugacaagcauuccaacggcaccaucaaagauagaagcccuuaucggacgcugaugucuugucccauuggggaggugccuucccccuacaacagccgcuuugaauccguugccuggucugcuagcgccugccacgacggaaucaauuggcucaccaucggcauuuccgggccugauaacggagcuguggccguccugaaguauaauggcaucauuacagacaccaucaagagcuggagaaacaauauucugcggacacaagagucugagugugcgugcgugaacggguccuguuucaccaucaugacggauggaccgagcgacggccaggccucuuacaaaaucuuucgcauugaaaagggcaaaaucgucaagagcguggagaugaaugcucccaacuaucauuacgaagagugcuccuguuacccugauucuagcgagauuacaugcguuugcagagacaauuggcacggguccaaccggcccugggugagcuucaaucagaaccucgaauaucagaucggauacauuuguucuggcaucuuuggggauaauccucgccccaacgacaaaaccggauccugcggcccggugagcucuaauggggccaacggagucaagggcuucuccuuuaaguauggcaacgggguguggauuggaagaacaaaaagcaucuccucucggaagggcuucgagaugaucugggauccuaauggguggaccggaaccgacaacaauuuuagcauuaaacaagacaucguuggcauuaacgaaugguccggguacucuggcagcuucgugcagcaucccgagcugacaggacuugauuguauccgcccuugcuucugggucgaacugauuagaggccggcccaaggagaauacgaucuggaccuccgggagcucuaucuccuuuuguggagugaacagcgacacaguuggcuggucuuggcccgauggggcugagcucccuuucaccauugacaaauga

SEQ ID NO: 212798 - RNA, 1410 nt, Artificial Sequence; identical to SEQ ID NO: 212788
  derived and/or modified CDS sequence (opt5) from neuraminidase__InfluenzaA__AEH59388

SEQ ID NO: 212799 - RNA, 1410 nt, Artificial Sequence
  derived and/or modified CDS sequence (opt5) from neuraminidase__InfluenzaA__AEH59390
augaaccccaaucagaagaucauuaccaucggcagcgugugcaugacaauugggauggccaaccugauccuccaaauuggaaauaucaucuccauuuggaucucucacagcauucagcugggcaaccagucccagaucgagacguguaaucaaucugucauuaccuacgaaaacaauacauggguuaaccagaccuaugugaauaucagcaacacaaauuucgcugccgggcaguccguggucucugugaaacuugcgggaaacagcucccugugcccuguuagcggcugggcuauuuacucuaaggacaauuccaucagaaucgggagcaaaggagauguguuugucauucgggagccguucaucucuuguagcccccucgaaugccgcaccuuuuuccugacacagggcgcccuucugaacgacaagcauuccaauggcaccauuaaagauagaucuccuuaucggacgcucauguccugucccaucggggaggugccuagccccuacaacucccgcuuugaaucuguugccuggagcgcuuccgccugccacgacggaauuaacuggcugaccaucggcaucagcgggccugauaauggagcuguggccguccugaaguauaacggcauuaucacagacaccauuaagucuuggagaaauaacauccuccggacacaagaguccgagugugcgugcgugaaugggagcuguuucaccauuaugacggauggaccgucugacggccaggccagcuacaaaaucuuucgcaucgaaaagggcaaaauugugaaguccgucgagaugaacgcucccaauuaucauuacgaagagugcucuuguuacccugauagcuccgagaucacaugcguuugcagagacaacuggcacgggagcaaucggcccugggugucuuucaaccagaaucuggaauaucagauuggauacaucuguuccggcauuuuuggggauaacccucgccccaaugacaaaaccggaagcugcggcccggugucuuccaacggggccaauggagucaagggcuucagcuuuaaguauggcaacgggguguggaucggaagaacaaaauccauuucuagccggaagggcuucgagaugaucugggauccuaacggguggaccggaaccgacaauaacuuuuccaucaaacaagacauuguuggccuuaaugaauggucuggguacagcggcuccuucgugcagcaucccgagcugacaggacucgauuguauccgcccuugcuucugggucgaacugauuagaggccuucccaaggagaacacgaucuggaccagcgggucuuccauuagcuuuuguggaguuaauucugacacagugggcugguccuggcccgauggggcugagcugccuuucaccaucgacaaauga

SEQ ID NO: 212800 - RNA, 1410 nt, Artificial Sequence; identical to SEQ ID NO: 212788
  derived and/or modified CDS sequence (opt5) from neuraminidase__InfluenzaA__AEH59392

SEQ ID NO: 212801 - RNA, 1410 nt, Artificial Sequence; identical to SEQ ID NO: 212788
  derived and/or modified CDS sequence (opt5) from neuraminidase__InfluenzaA__AEH59396

SEQ ID NO: 212802 - RNA, 1410 nt, Artificial Sequence
  derived and/or modified CDS sequence (opt5) from neuraminidase__InfluenzaA__AEH59398
augaaccccaaucagaagaucauuaccaucggcagcgugugcaugacaauuggggucgccaaccugauccuccaaauuggaaauaucaucuccauuuggaucucucacagcauucagcugggcaaccagaaucagaucgagacguguaaccaauccguuauuaccuacgaaaauaacacaugggugaaucagaccuaugugaacaucucuaauacaaacuucgcugccgggcagagcgucguguccguuaaacuugcgggaaauucuagccugugcccuguguccggcugggcuauuuacagcaaggacaacucuaucagaaucggguccaaaggagaugucuuugugauucgggagccguucaucagcuguucuccccucgaaugccgcaccuuuuuccugacacagggcgcccuucugaaugacaagcauuccaacggcaccauuaaagauagaagcccuuaucggacgcucaugucuugucccaucggggagguuccuucccccuacaacagccgcuuugaauccguggccuggucugcuagcgccugccacgacggaauuaauuggcugaccaucggcaucuccgggccugauaacggagcugucgccgugcugaaguauaauggcauuaucacagacaccauuaagagcuggagaaacuacauccuccggacacaagagucugagugugcgugcgugaauggguccuguuucaccauuaugacggauggaccgagcgacggccaggccucuuauaaaaucuuucgcaucgaaaagggcaaagucguuaagagcguggagaugaacgcucccaauuaccauuacgaagagugcuccuguuauccugauucuagcgagauuacaugcgugugcagagacaacuggcacggguccaaucggcccugggucagcuucaaccagaaucuggaauaccagaucggauauauuuguucuggcaucuuuggggauaacccucgccccaaugacaaaaccggauccugcggcccggugagcucuaacggggccaauggaguuaagggcuucuccuuuaaguacggcaacgggguguggauuggaagaacaaaaagcaucuccucucggaagggcuucgagaugauuugggauccuaacggguggaccggaaccgacaauaacuuuagcaucaaacaagacaucauuggcaucaaugaaugguccggguauucuggcagcuucguccagcaucccgagcuuacaggacuggauuguauucgcccuugcuucuggguggaacucaucagaggccggcccaaggagaacacgauuuggaccuccgggagcucuaucuccuuuuguggaguuaauagcgacacagugggcuggucuuggcccgauggggcugagcugccuuucaccaucgacaaauga

SEQ ID NO: 212803 - RNA, 1410 nt, Artificial Sequence
  derived and/or modified CDS sequence (opt5) from neuraminidase__InfluenzaA__AEH59400
augaaccccaaucagaagaucauuaccaucggcagcgugugcaugacaauugggauggccaaccugauccuccaaauuggaaauaucaucuccauuuggaucucucacagcauucagcugggcaaccagucccagaucgagacguguaaucaaucugucauuaccuacgaaaacaauacauggguuaaccagaccuaugugaauaucagcaacacaaauuucgcugccgggcaguccguggucucugugaaacuugcgggaaacagcucccugugcccuguuagcggcugggcuauuuacucuaaggacaauuccaucagaaucgggagcaaaggagauguguuugucauucgggagccguucaucucuuguagcccccucgaaugccgcaccuuuuuccugacacagggcgcccuucugaacgacaagcauuccaauggcaccauuaaagauagaucuccuuaucggacgcucauguccugucccaucggggaggugccuagccccuacaacucccgcuuugaaucuguugccuggagcgcuuccgccugccacgacggaauuaacuggcugaccaucggcaucagcgggccugauaauggagcuguggccguccugaaguauaacggcauuaucacagacaccauuaagucuuggagaaauaacauccuccggacacaagaguccgagugugcgugcgugaaugggagcuguuucaccgugaugacggauggaccgaacgacggccaggccucuuacaaaauuuuucgcaucgaaaagggcaaaaucgucaagagcguugagaugaaugcucccaacuaucauuacgaagagugcuccuguuacccugauucuagcgagauuacaugcgugugcagagacaauuggcacggggccaaccggcccuggguguccuucaaucagaaccuggaauaucagaucggauacauuuguagcggcaucuuuggggauaauccucgccccaacgacaaaaccggaucuugcggcccggucuccagcaauggggcuaacggagugaagggcuucucuuuuaaguauggcaacgggguuuggauuggaagaacaaaauccaucagcucccggaauggcuucgagaugauuugggauccuaacggguggaccggaaccgacaauaacuuuucuaucaagcaagacaucgugggcauuaaugaauggagcggguacuccggcucuuucguccagcaucccgagcuuacaggacuggauuguauccgcccuugcuucuggguggaacucauuagaggccggcccaaagagaacacgaucuggaccagcggguccagcauuucuuuuuguggaguuaauuccgacacagugggcuggagcuggcccgauggggccgagcugccuuucaccaucgacaaguga

SEQ ID NO: 212804 - RNA, 1410 nt, Artificial Sequence
  derived and/or modified CDS sequence (opt5) from neuraminidase__InfluenzaA__AEH59402
augaaccccaaucagaagaucauuaccaucggcagcgugugcaugacaauugggauggccaaccugauccuccaaauuggaaauaucaucuccauuuggaucucucacagcauucagcugggcaaccagaaucagaucgagacguguaaccaauccgucauuaccuacgaaaauaacacauggguuaaucagaccuaugugaacaucucuaauacaaacuucgcugccgggcagagcguggucuccgugaaacuugcgggaaauucuagccugugcccuguuuccggcugggcuauuuacagcaaggacaacucuaucagaaucggguccaaaggagauguguuugucauucgggagccguucaucagcuguucuccccucgaaugccgcaccuuuuuccugacacagggcgcccuucugaaugacaagcauuccaacggcaccauuaaagauagaagcccuuaucggacgcucaugucuugucccaucggggaggugccuucccccuacaacagccgcuuugaauccguugccuggucugcuagcgccugccacgacggaauuaauuggcugaccaucggcaucuccgggccugauaacggagcuguggccguccugaaguauaauggcauuaucacagacaccauuaagagcuggagaaacaauauccuccggacacaagagucugagugugcgugcgugaacggguccuguuucaccgugaugacggauggaccgaaugacggccaggccagcuacaaaauuuuucgcaucgaaaagggcaaaaucgucaagucuguugagaugaacgcucccaauuaucauuacgaagagugcagcuguuacccugauuccucugagauuacaugcgugugcagagacaacuggcacggggccaaucggcccugggugagcuucaaccagaaucuggaauaucagaucggauacauuuguuccggcaucuuuggggauaacccucgccccaaugacaaaaccggaagcugcggcccggucucuuccaacggggcuaacggagugaagggcuucagcuuuaaguauggcaaugggguuuggauuggaagaacaaaaucuaucuccagccggaacggcuucgagaugauuugggauccuaauggguggaccgaaaccgacaacaauuuuuccaucaagcaagacaucgugggaauuaacgaguggucuggcuacagcggguccuucguccagcaucccgaacuuacaggccuggauuguauccgcccuugcuucuggguggagcucauuagaggacggcccaaagagaauacgaucuggaccucuggcagcuccauuagcuuuugugggguuaacucugacacagugggaugguccuggcccgauggcgccgaacugccuuucaccaucgacaaguga

SEQ ID NO: 212805 - RNA, 1410 nt, Artificial Sequence
  derived and/or modified CDS sequence (opt5) from neuraminidase__InfluenzaA__AEH59404
augaaccccaaucagaagaucauuaccaucggcagcgccugcaugacaauugggauggcuaaccugauccuccaaauuggaaauaucaucuccauuuggaucucucacagcauucagcugggcaaccagucccagaucgagacguguaaucaaucugugauuaccuacgaaaacaauacaugggucaaccagaccuauguuaauaucagcaacacaaauuucgccgcggggcagccugugguguccgucaaacuugcuggaaacucuagccugugcccgguguccggcugggccauuuacagcaaggacaauucuaucagaaucggguccaaaggagauguuuuugugauucgggagcccuucaucagcuguucuccucucgaaugccgcaccuuuuuccugacacagggcgcccuucugaacgacaagcauuccaauggcaccauuaaagauagaagccccuaucggacgcucaugucuuguccuaucggggagguccccuccccuuacaacagccgcuuugaauccguggcuuggucugccagcgcuugccacgacggaauuaacuggcugaccaucggcaucuccgggccggauaauggagccguugcggugcugaaguauaacggcauuaucacagacaccauuaagagcuggagaaauaacauccuccggacacaagagucugagugugccugcgucaauggguccuguuucaccauuaugacggauggacccagcgacggccaggcuucuuacaaaaucuuucgcaucgaaaagggcaaaauugucaagagcguggagaugaacgccccuaauuaucauuacgaagagugcuccuguuaccccgauucuagcgagaucacaugcgugugcagagacaacuggcacggguccaaucggccuuggguuagcuucaaccagaaucuggaauaucagauuggauacaucuguucuggcauuuuuggggauaacccccgcccgaaugacaaaaccggauccugcggcccugugagcucuaacggggcuaauggagugaagggcuucuccuuuaaguauggcaacggggucuggaucggaagaacaaaaagcauuuccucucggaagggcuucgagaugaucugggaucccaacggguggaccggaaccgacaauaacuuuagcaucaaacaagacauugugggcaucaaugaaugguccggguacucuggcagcuucguucagcauccugagcuuacaggacuggauuguauucgccccugcuucuggguggaacucaucagaggccggcccaaggagaacacgauuuggaccuccgggagcucuaucuccuuuuguggagucaauagcgacacagugggcuggucuuggccugauggggccgagcugccguucaccaucgacaaauga

SEQ ID NO: 212806 - RNA, 1410 nt, Artificial Sequence
  derived and/or modified CDS sequence (opt5) from neuraminidase__InfluenzaA__AEH59406
augaaccccaaucagaagaucauuaccaucggcagcgugugcaugacaauugggauggccaaccugauccuccaaauuggaaauaucaucuccauuuggaucucucacagcauucagcugggcaaccagucccagaucgagacguguaaucaaucugucauuaccuacgaaaacaauacauggguuaaccagaccuaugugaauaucagcaacacaaauuucgcugccgggcaguccguggucucugugaaacuugcgggaaacagcucccugugcccuguuagcggcugggcuauuuacucuaaggacaauuccaucagaaucgggagcaaaggagauguguuugucauucgggagccguucaucucuuguagcccccucgaaugccgcaccuuuuuccugacacagggcgcccuucugaacgacaagcauuccaauggcaccauuaaagauagaucuccuuaucggacgcucauguccugucccaucggggaggugccuagccccuacaacucccgcuuugaaucuguugccuggagcgcuuccgccugccacgacggaauuaacuggcugaccaucggcaucagcgggccugauaauggagcuguggccguccugaaguauaacggcauuaucacagacaccauuaagucuuggagaaauaacauccuccggacacaagaguccgagugugcgugcgugaaugggagcuguuucaccauuaugacggauggaccgucugacggccaggccagcuacaaaaucuuucgcaucgaaaagggcaaaauugugaaguccgucgagaugaacgcucccacauaucauuacgaagagugcucuuguuacccugauagcuccgagauuaccugcguuugcagagacaauuggcacgggagcaaccggcccugggugucuuucaaucagaaccuggaauaucagaucggauacaucuguuccggcauuuuuggggauaauccucgccccaacgacaaaacaggaagcugcggcccggugucuuucaauggggccaacggagucaagggcuuuuccuucaaguauggcaaugggguguggaucggaagaaccaaaagcauuuccucucggaagggcuuugagaugaucugggauccuaacggguggaccggaacagacaacaauuucagcaucaaacaagacauuguuggcaucgaugaaugguccggguacucuggcagcuucgugcagcaucccgagcuuacgggacuggacuguauucgcccuugcuuuugggucgaacucaucagaggccggcccaaggagaacaccauuuggacauccgggagcucuaucuccuucuguggagugaauagcgauaccguuggcuggucuuggcccgacggggcugagcugccuuuuacaaucgauaaauga

SEQ ID NO: 212807 - RNA, 1410 nt, Artificial Sequence; identical to SEQ ID NO: 212329
  derived and/or modified CDS sequence (opt5) from neuraminidase__InfluenzaA__AEH59408

SEQ ID NO: 212808 - RNA, 1410 nt, Artificial Sequence
  derived and/or modified CDS sequence (opt5) from neuraminidase__InfluenzaA__AEH59412
augaaccccaaucagaagaucauuaccaucggcagcgugugcaugacaauugggauggccaaccugauccuccaaauuggaaauaucaucuccauuuggaucucucacagcauucagcugggcaaccagucccagaucgagacguguaaucaaucugucauuaccuacgaaaacaauacauggguuaaccagaccuaugugaauaucagcaacacaaauuucgcugccgggcaguccguggucucugugaaacuugcgggaaacagcucccugugcccuguuagcggcugggcuauuuacucuaaggacaauuccaucagaaucgggagcaaaggagauguguuugucauucgggagccguucaucucuuguagcccccucgaaugccgcaccuuuuuccugacacagggcgcccuucugaacgacaagcauuccaauggcaccauuaaagauagaucuccuuaucggacgcucauguccugucccaucggggaggugccuagccccuacaacucccgcuuugaaucuguugccuggagcgcuuccgccugccacgacggaauuaacuggcugaccaucggcaucagcgggccugauaauggagcuguggccguccugaaguauaacggcauuaucacagacaccauuagaucuuggcggaauaacauccuccgcacacaagaguccgagugugcgugcgugaaugggagcuguuucaccauuaugacggauggaccgucugacggccaggccagcuacaagaucuuuagaaucgaaaaaggcaagauuaucaaauccguggagaugaacgcucccaauuaucauuacgaagagugcucuuguuacccugauagcuccgagauuacaugcgucugccgggacaacuggcacgggagcaaucgccccuggguuucuuucaaccagaaucuggaauaucagaucggauacauuuguuccggcaucuuuggggauaacccuagacccaaugacaagaccggaagcugcggcccggugcuuucuaacggggccaauggagugaaaggcuucuccuuuaaguauggcaacggggucuggauuggacggacaaagagcaucuccucucgcaaaggcuucgagaugaucugggauccuaacggguggaccggaaccgacaauaacuuuagcauuaagcaagacaucgugggcauuaaugaaugguccggguacucuggcagcuucguucagcaucccgagcugacaggacucgauuguaucagaccuugcuucuggguggaacugauucggggccgccccaaagagaacacgaucuggaccuccgggagcucuaucuccuuuuguggagucaauagcgacacagugggcuggucuuggcccgauggggcugagcuuccuuucaccauugacaaguga

SEQ ID NO: 212809 - RNA, 1410 nt, Artificial Sequence; identical to SEQ ID NO: 212781
  derived and/or modified CDS sequence (opt5) from neuraminidase__InfluenzaA__AEH59416

SEQ ID NO: 212810 - RNA, 1410 nt, Artificial Sequence; identical to SEQ ID NO: 208810
  derived and/or modified CDS sequence (opt5) from neuraminidase__InfluenzaA__AEH59584

SEQ ID NO: 212811 - RNA, 1410 nt, Artificial Sequence; identical to SEQ ID NO: 208810
  derived and/or modified CDS sequence (opt5) from neuraminidase__InfluenzaA__AEH59586

SEQ ID NO: 212812 - RNA, 1410 nt, Artificial Sequence; identical to SEQ ID NO: 208810
  derived and/or modified CDS sequence (opt5) from neuraminidase__InfluenzaA__AEH59588

SEQ ID NO: 212813 - RNA, 1410 nt, Artificial Sequence; identical to SEQ ID NO: 208810
  derived and/or modified CDS sequence (opt5) from neuraminidase__InfluenzaA__AEH59592

SEQ ID NO: 212814 - RNA, 1410 nt, Artificial Sequence; identical to SEQ ID NO: 208810
  derived and/or modified CDS sequence (opt5) from neuraminidase__InfluenzaA__AEH59594

SEQ ID NO: 212815 - RNA, 1410 nt, Artificial Sequence; identical to SEQ ID NO: 208810
  derived and/or modified CDS sequence (opt5) from neuraminidase__InfluenzaA__AEH59596

SEQ ID NO: 212816 - RNA, 1410 nt, Artificial Sequence; identical to SEQ ID NO: 208810
  derived and/or modified CDS sequence (opt5) from neuraminidase__InfluenzaA__AEH59598

SEQ ID NO: 212817 - RNA, 1410 nt, Artificial Sequence; identical to SEQ ID NO: 208810
  derived and/or modified CDS sequence (opt5) from neuraminidase__InfluenzaA__AEH59600

SEQ ID NO: 212818 - RNA, 1410 nt, Artificial Sequence
  derived and/or modified CDS sequence (opt5) from neuraminidase__InfluenzaA__AEH59602
augaaccccaaucagaagaucauuaccaucggcagcgugugcaugacaauugggauggccaaccugauccuccaaauuggaaauaucaucuccauuuggaucucucacagcauucagcugggcucccagaaccagaucgagacguguaaucaaucugucauuaccuacgaaaacaauacauggguuaaccagaccuaugugaauaucagcaacacaaauuucgcugccgggcaguccguggucucugugaaacuugcgggaaacagcucccugugcccuguuagcggcugggcuauuuacucuaaggacaauuccaucagaaucgggagcaaaggagauguguuugucauucgggagccguucaucucuuguagcccccucgaaugccgcaccuuuuuccugacacagggcgcccuucugaacgacaagcauuccaauggcaccauuaaagauagaucuccuuaucggacgcucauguccugucccaucggggaggugccuagccccuacaacucccgcuuugaaucuguugccuggagcgcuuccgccugccacgacggaauuaacuggcugaccaucggcaucagcgggccugauaauggagcuguggccguccugaaguauaacggcauuaucacagacaccauuaagucuuggagaaauaacauccuccggacacaagaguccgagugugcgugcgugaaugggagcuguuucaccgugaugacggauggaccgucugacggccaggccagcuacaaaauuuuucgcaucgaaaagggcaaaaucgucaaguccguugagaugaacgcucccaauuaucauuacgaagagugcucuuguuacccugauagcuccgagauuacaugcgugugcagagacaacuggcacgggagcaaucggcccugggugucuuucaaccagaaucuggaauaucagaucggauacauuuguuccggcaucuuuggggauaacccucgccccaaugacaaaaccggaagcugcggcccggucucuuccaacggggccaauggagugaagggcuucagcuuuaaguauggcaacgggguuuggauuggaagaacaaaauccaucucuagccggaacggcuucgagaugauuugggauccuaauggguggaccggaaccgacaacaauuuuuccaucaagcaagacaucgugggcauuaacgaauggucuggguacagcggcuccuucguccagcaucccgagcuuacaggacuggauuguauccgcccuugcuucuggguggaacucauuagaggccggcccaaagagaauacgaucuggaccagcgggucuuccauuagcuuuuguggaguuaacucugacacagugggcugguccuggcccgauggggcugagcugccuuucaccaucgacaaguga

SEQ ID NO: 212819 - RNA, 1410 nt, Artificial Sequence; identical to SEQ ID NO: 208810
  derived and/or modified CDS sequence (opt5) from neuraminidase__InfluenzaA__AEH59606

SEQ ID NO: 212820 - RNA, 1410 nt, Artificial Sequence; identical to SEQ ID NO: 208810
  derived and/or modified CDS sequence (opt5) from neuraminidase__InfluenzaA__AEH59616

SEQ ID NO: 212821 - RNA, 1410 nt, Artificial Sequence; identical to SEQ ID NO: 208810
  derived and/or modified CDS sequence (opt5) from neuraminidase__InfluenzaA__AEH59626

SEQ ID NO: 212822 - RNA, 1413 nt, Artificial Sequence; identical to SEQ ID NO: 209533
  derived and/or modified CDS sequence (opt5) from neuraminidase__InfluenzaA__AEH77262

SEQ ID NO: 212823 - RNA, 1410 nt, Artificial Sequence
  derived and/or modified CDS sequence (opt5) from neuraminidase__InfluenzaA__AEH77273
augaaccccaaucagaagaucauuaccaucggcagcgugugcaugacaauugggauggccaaccugauccuccaaauuggaaauaucacguccaucuggauuucucacagcauccagcugggcaaccagaaucagauugagaccuguaaccaauccgucaucacauacgaaaauaacaccuggguuaaucagacauaugugaacauuucuaauaccaacuucgcugccgggcagagcguggucuccgugaaacuugcgggaaauucuagccugugcccuguuuccggcugggcuaucuacagcaaggacaacucuauuagaaucggguccaaaggagauguguuugucauccgggagccguucauuagcuguucuccccucgaaugccgcacauuuuuccugacccagggcgcccuucugaaugacaagcauuccaacggcacgaucaaagauagaagcccuuaucggacccucaugucuugucccauuggggaggugccuucccccuacaacagccgcuuugaauccguugccuggucugcuagcgccugccacgacggaaucaauuggcugacaauuggcaucuccgggccugauaacggagcuguggccguccugaaguauaauggcaucauuaccgacacaaucaagagcuggagaaacaauauucuccggacccaagagucugagugugcgugcgugaacggguccuguuucacggugaugacagauggaccgagcgacggccaggccucuuacaaaaucuuucgcauugaaaagggcaaaaucgucaagagcguugagaugaaugcucccaacuaucauuacgaagagugcuccuguuacccugauucuagcgagauuaccugcgugugcagagacaauuggcacggguccaaccggcccugggugagcuucaaucagaaccuggaauaucagaucggauacaucuguucuggcauuuuuggggauaauccucgccccaacgacaaaacaggauccugcggcccggucagcucuaauggggccaacggagugaagggcuucuccuuuaaguauggcaacgggguuuggaucggaagaaccaaaagcauuuccucucggaauggcuucgagaugaucugggauccuaacggguggaccggaacagacaauaacuuuagcauuaagcaagacaucgugggcaucaaugaaugguccggguacucuggcagcuucguccagcaucccgagcuuacgggacuggauuguauucgcccuugcuucuggguggaacucaucagaggccggcccaaagagaacaccauuuggacauccgggagcucuaucuccuuuuguggaguuaauagcgacaccgugggcuggucuuggcccgauggggcugagcugccuuucacaauugacaaguga

SEQ ID NO: 212824 - RNA, 1410 nt, Artificial Sequence
  derived and/or modified CDS sequence (opt5) from neuraminidase__InfluenzaA__AEH77282
augaaccccaaucagaagaucauuaccaucggcagcgugucccugacaauugccacgaucugcuuccucaugcaaauugcuauccuggucaccacaguuacccuucacuuuaaacagcaugaguguaacucuccuccgaauaaccaggugaugcugugcgaacccacaaucauugagagaaauaucaccgaaauuguguaccucacaaacaccacgaucgagaaggaaauuuguccuaaacuggccgaguaucggaauuggagcaagccccagugcaacaucaccggguucgcgccuuuuuccaaagacaauucuauucgccuuagcgcuggaggcgauaucugggucacaagagagcccuacguguccugugacccugauaagugcuaucaauucgcccuggggcagggaaccacacucaacaauggccacucuaacgacaccguucaugaucggacgccguaccgcacacugcugaugaaugaacucggggugcccuuucaccugggaaccagacaggucuguaucgccuggagcuccagcucuugccaugacggcaaggcuuggcuucacguguguguuacaggcgaugacaaaaacgccaccgcuuccuucauuuauaaugggcggcugguggauagcaucggaucuugguccaagaaaauucuccgcacccaggagagcgaaugcgucuguaucaacggcacaugcacgguggugaugaccgacgggucugccuccggaaaggcggauacaaaaauucuguuugucgaggagggcaagaucguucacaucagcacccuuuccgggucugcccaacauguggaagagugcagcuguuacccuagauaucccggagugcggugcgucugucgcgacaacuggaagggcuccaauagaccuauuguggauaucaacguuaaagacuacagcauugugucuuccuacgucugcagcggccuggugggggacacaccccggaagaaugauucuagcuccucuagccacugucucgacccgaacaaugaagagggaggccaugggguuaaaggaugggcuuucgaugacggcaacgauguguggauggggcgcaccaucuccgaaaagcugagaagcggauaugagacguuuaaagucauugagggcuggucuaagccuaauuccaaacugcagaucaaccgccaggugaucgucgaacggggcaauagaagcggguacucuggaauuuucuccguggagggcaagagcugcaucaaccgguguuuuuauguugaacucauuagagggcgcaaggaggaaacagaggugugguggaccuccaauucuaucgucguguucugcggaaccagcggcacauacgggaccggcuccuggcccgacggagccgauauuaaccugaugccuaucuga

SEQ ID NO: 212825 - RNA, 1410 nt, Artificial Sequence; identical to SEQ ID NO: 208810
  derived and/or modified CDS sequence (opt5) from neuraminidase__InfluenzaA__AEI29218

SEQ ID NO: 212826 - RNA, 1410 nt, Artificial Sequence; identical to SEQ ID NO: 210177
  derived and/or modified CDS sequence (opt5) from neuraminidase__InfluenzaA__AEI29228

SEQ ID NO: 212827 - RNA, 1410 nt, Artificial Sequence; identical to SEQ ID NO: 206209
  derived and/or modified CDS sequence (opt5) from neuraminidase__InfluenzaA__AEI54350

SEQ ID NO: 212828 - RNA, 1410 nt, Artificial Sequence; identical to SEQ ID NO: 206222
  derived and/or modified CDS sequence (opt5) from neuraminidase__InfluenzaA__AEI54361

SEQ ID NO: 212829 - RNA, 1410 nt, Artificial Sequence; identical to SEQ ID NO: 206786
  derived and/or modified CDS sequence (opt5) from neuraminidase__InfluenzaA__AEI54372

SEQ ID NO: 212830 - RNA, 1410 nt, Artificial Sequence; identical to SEQ ID NO: 206663
  derived and/or modified CDS sequence (opt5) from neuraminidase__InfluenzaA__AEI54383

SEQ ID NO: 212831 - RNA, 1410 nt, Artificial Sequence; identical to SEQ ID NO: 206786
  derived and/or modified CDS sequence (opt5) from neuraminidase__InfluenzaA__AEI54394

SEQ ID NO: 212832 - RNA, 1410 nt, Artificial Sequence; identical to SEQ ID NO: 207956
  derived and/or modified CDS sequence (opt5) from neuraminidase__InfluenzaA__AEI54416

SEQ ID NO: 212833 - RNA, 1410 nt, Artificial Sequence; identical to SEQ ID NO: 212776
  derived and/or modified CDS sequence (opt5) from neuraminidase__InfluenzaA__AEI54427

SEQ ID NO: 212834 - RNA, 1410 nt, Artificial Sequence; identical to SEQ ID NO: 211590
  derived and/or modified CDS sequence (opt5) from neuraminidase__InfluenzaA__AEI54438

SEQ ID NO: 212835 - RNA, 1410 nt, Artificial Sequence; identical to SEQ ID NO: 211590
  derived and/or modified CDS sequence (opt5) from neuraminidase__InfluenzaA__AEI54449

SEQ ID NO: 212836 - RNA, 1410 nt, Artificial Sequence; identical to SEQ ID NO: 211590
  derived and/or modified CDS sequence (opt5) from neuraminidase__InfluenzaA__AEI54460

SEQ ID NO: 212837 - RNA, 1410 nt, Artificial Sequence
  derived and/or modified CDS sequence (opt5) from neuraminidase__InfluenzaA__AEI54471
augaaccccaaucagaagaucauuaccaucggcagcgugucccugacaauuucuacgaucugcuucuuuaugcaaauugccguccucaucaccacaguuacccugcacuucaaacaguacaaguuuaacagcccuccgaauaaccaggugaugcuuugugagcccacaaucauugaaagaaauaucaccgagauuguguaucugacaaacaccacgaucgaaaaagagauuugcccuaagcucgcugaauaccggaauugguccaaaccccagugugacaucaccggguucgccccuuuuucuaaggauaacagcauucgccuguccgcgggaggcgacaucugggucacaagagagcccuaugugucuugcgauccugacaaguguuaccaauucgcucuugggcagggaaccacacugaauaacguucauagcaauaacaccgugcgggaucgcacgccguauagaacacuccugaugaaugagcugggcguccccuuucaccucgggaccaaacaggugugcaucgccugguccagcagcuccugucaugacggaaaggccuggcugcacguuugcauuacaggcgaugacaaaaacgcuaccgccagcuucaucuacaauggccggcuuguggauucugucguguccuggagcaaggaaauucugcgcacccaggagucugaaugugugugcaucaacgggacauguacggucguuaugaccgacggauccgcuagcggcaaagccgauacaaagauucucuuuaucgaggaggggaagaucgugcauaccuccacacugucuggaagcgcgcaacacguggaagagugcuccugcuauccuagauaccccggcguccggugugugugccgcgacaacuggaaagggagcaauagaccuauuguugauaucaacauuaaggaccacucuaucguguccagcuacgucuguucuggacuugugggcgacacgccccggaaaaaugauagcuccucuagcucccauugccuggacccgaacaaugaagagggcgggcacggaguuaagggcugggccuucgaugacgggaacgauguguggaugggacgcaccauuaaugaaacaagcagacucggcuaugagaccuuuaaagucaucgagggguggucuaacccuaaguccaaacugcagaucaaucgccaggugauugucgaccggggaaacagaagcggcuacucuggcaucuucuccguggaagggaagucuuguauuaaucggugcuuuuauguugagcugaucagaggacgcaaggaagagaccgaagugcucuggacauccaacucuauugucguguucuguggcaccagcgggacauacggaacgggcuccuggcccgauggggcugaccugaaucuuaugccuaucuga

SEQ ID NO: 212838 - RNA, 1410 nt, Artificial Sequence; identical to SEQ ID NO: 211482
  derived and/or modified CDS sequence (opt5) from neuraminidase__InfluenzaA__AEI54482

SEQ ID NO: 212839 - RNA, 1410 nt, Artificial Sequence
  derived and/or modified CDS sequence (opt5) from neuraminidase__InfluenzaA__AEI54493
augaaccccaaucagaagaucauuaccaucggcagcgugucccugacaauuucuacgaucugcuucuuuaugcaaauugccauccucaucaccacagucacccugcacuucaaacaguacgaguuuaacagcccuccgaauaaccagguuaugcuuugugaacccacaauuaucgagagaaauauuaccgaaaucguguaucugacaaacaccacgauugagaaggaaaucugcccuaaacucgcugaguaccggaauugguccaagccccagugugacauuaccggguucgccccuuuuucuaaagauaacagcauccgccuguccgcgggaggcgacaucugggugacaagagagcccuaugucucuugcgauccugacaaguguuaccaauucgcucuugggcagggaaccacacugaauaacgugcauagcaauaacaccguucgggaucgcacgccguauagaacacuccugaugaaugaacugggcgugcccuuucaccucgggaccaagcaggucugcauugccugguccucuagcuccugucaugacggaaaagccuggcugcacgugugcaucacaggcgaugacaagaacgcuaccgccagcuucauuuacaauggccggcuuguugauucuguggucuccuggagcaaagagauccugcgcacccaggaaucugagugugugugcauuaacgggacauguacgguggucaugaccgacggauccgcuagcggcaaggccgauacaaaaauccucuuuaucgaggaagggaagauuguucauaccuccacacugucuggaagcgcgcaacacguggaggaaugcuccugcuauccuagauaccccggcgugcggugugucugccgcgacaacuggaaggggagcaauagaccuaucguggauauuaacaucaaagaccacucuauuguuuccagcuacguguguucuggacuugucggcgacacgccccggaagaaugauagcuccucuagcucccauugccuggacccgaacaaugaggaaggcgggcacggagugaaaggcugggccuucgaugacgggaacgauguuuggaugggacgcaccaucaaugagacaagcagacucggcuaugagaccuuuaaggugaucgaaggguggucuaacccuaaauccaagcugcagauuaaucggcaggucaucguggaccgcggaaacagaagcggcuacucuggcauuuucuccgucgaggggaaaagcuguaucaaucggugcuuuuauguggaacugauuagaggacgcaaggaggaaaccgagguucucuggacauccaacucuaucguggucuucuguggcaccagcgggacauacggaacgggcuccuggcccgauggggcugaccugaaucuuaugucuauuuga

SEQ ID NO: 212840 - RNA, 1410 nt, Artificial Sequence; identical to SEQ ID NO: 211590
  derived and/or modified CDS sequence (opt5) from neuraminidase__InfluenzaA__AEI54504

SEQ ID NO: 212841 - RNA, 1410 nt, Artificial Sequence; identical to SEQ ID NO: 211110
  derived and/or modified CDS sequence (opt5) from neuraminidase__InfluenzaA__AEI59982

SEQ ID NO: 212842 - RNA, 1413 nt, Artificial Sequence; identical to SEQ ID NO: 212008
  derived and/or modified CDS sequence (opt5) from neuraminidase__InfluenzaA__AEI59993

SEQ ID NO: 212843 - RNA, 1413 nt, Artificial Sequence; identical to SEQ ID NO: 212004
  derived and/or modified CDS sequence (opt5) from neuraminidase__InfluenzaA__AEI60004

SEQ ID NO: 212844 - RNA, 1410 nt, Artificial Sequence
  derived and/or modified CDS sequence (opt5) from neuraminidase__InfluenzaA__AEI60015
augaaccccaaucagaagaucauuaccaucggcagcgugucccugacaauuucuacgaucugcuucuuuaugcaaauugccauccucaucaccacagucacccugcacuucaaacaguacgaguuuaacagcccuccgaauaaccagguuaugcuuugugaacccacaauuaucgagagaaauauuaccgaaaucguguaucugacaaacaccacgauugagaaggaaaucugcccuaaacucgcugaguaccggaauugguccaagccccagugugacauuaccggguucgccccuuuuucuaaagauaacagcauccgccuguccgcgggaggcgacaucugggugacaagagagcccuaugucucuugcgauccugacaaguguuaccaauucgcucuugggcagggaaccacacugaauaacgugcauagcaauaacaccguucgggaucgcacgccguauagaacacuccugaugaaugaacugggcgugcccuuucaccucgggaccaagcaggucugcauugccugguccagcagcuccugucaugacggaaaagccuggcugcacgugugcaucacaggcgaugacaagaacgcuaccgccagcuucauuuacaauggccggcuuguugauucuguggucuccuggagcaaagagauccugcgcacccaggaaucugagugugugugcauuaacgggacauguacgguggucaugaccgacggauccgcuagcggcaaggccgauacaaaaauccucuuuaucgaggaagggaagauuguucauaccuccacacugucuggaagcgcgcaacacguggaggaaugcuccugcuauccuagauaccccggcgugcggugugucugccgcgacaacuggaaggggagcaauagaccuaucguggauauuaacaucaaagaccacucuauuguuuccagcuacguguguucuggacuugucggcgacacgccccggaagaaugauagcuccucuagcggccauugccuggacccgaacaaugaggaagggggaaacggcgugaaagggugggccuucgaugacggaaaugauguuuggaugggccgcaccaucuccgagaagucuagacucggguaugagacauuuaaagugaucgaaggauggucuaaccacaaguccaaacugcagauuaaucggcaggucaucguggaccgcggcaacagaagcggcuacucugggauuuucuccgucgagggaaagagcuguaucaaucggugcuuuuauguggaacugauuagaggccgcaaggaggaaaccgagguucucuggaccuccaacucuaucguggucuucugugggacaagcggaaccuacggcacaggguccuggccugauggcgcugaccugaaucuuaugcccauuuga

SEQ ID NO: 212845 - RNA, 1410 nt, Artificial Sequence; identical to SEQ ID NO: 210556
  derived and/or modified CDS sequence (opt5) from neuraminidase__InfluenzaA__AEI60026

SEQ ID NO: 212846 - RNA, 1410 nt, Artificial Sequence
  derived and/or modified CDS sequence (opt5) from neuraminidase__InfluenzaA__AEI60037
augaaccccaaucagaagaucauuaccaucggcagcgugucccugacaauuucuacgaucugcuucuuuaugcaaauugccauccucaucaccacagucacccugcacuucaaacaguacgaguuuaacagcccuccgaauaaccagguuaugcuuugugaacccacaauuaucgagagaaauauuaccgaaaucguguaucugacaaacaccacgauugagaaggaaaucugcccuaaacucgcugaguaccggaauugguccaagccccagugugacauuaccggguucgccccuuuuucuaaagauaacagcauccgccuguccgcgggaggcgacaucugggugacaagagagcccuaugucucuugcgauccugacaaguguuaccaauucgcucuugggcagggaaccacacugaauaacgugcauagcaauaacaccguucgggaucgcacgccguauagaacacuccugaugaaugaacugggcgugcccuuucaccucgggaccaagcaggucugcauugccugguccucuagcuccugucaugacggaaaagccuggcugcacgugugcaucacaggcgaugacaagaacgcuaccgccagcuucauuuacaauggccggcuuguugauucuguggucuccuggagcaaagagauccugcgcacccaggaaucugagugugugugcauuaacgggacauguacgguggucaugaccgacggauccgcuagcggcaaggccgauacaaaaauccucuuuaucgaggaagggaagauuguucauaccuccacacugucuggaagcgcgcaacacguggaggaaugcuccugcuauccuagauaccccggcgugcggugugucugccgcgacaacuggaaggggagcaauagaccuaucguggauauuaacaucaaagaccacucuauuguuuccagcuacguguguucuggacuugucggcgacacgccccggcgcaaugauagcuccucuagcucccauugccuggacccgaacaaugaggaaggcgggcacggagugaagggcugggccuucgaugacgggaacgauguuuggaugggaagaaccaucagcgagaaaucucggcucggcuaugagacauuuaaggugaucgaagggugguccaaucauaaaagcaagcugcagauuaaccgccaggucaucguggacagaggaaaucggucuggcuacuccggcauuuucagcgucgaggggaaauccuguaucaacagaugcuuuuauguggaacugauucgcggacggaaggaggaaaccgagguucucuggaccucuaauagcaucguggucuucuguggcacauccgggaccuacggaacaggcucuuggccugauggggcugaccugaaccuuaugcccauuuga

SEQ ID NO: 212847 - RNA, 1410 nt, Artificial Sequence
  derived and/or modified CDS sequence (opt5) from neuraminidase__InfluenzaA__AEI60048
augaaccccaaucagaagaucauuaccaucggcagcgugucccugacaauuucuacgaucugcuucuuuaugcaaauugccauccucaucaccacagucacccugcacuucaaacaguacgaguuuaacagcccuccgaauaaccagguuaugcuuugugcucccacaauuaucgaaagaaauauuaccgagaucguguaucugacaaacaccacgauugaaaaggagaucugcccuaaacucgccgaauaccggaauugguccaagccccagugugacauuaccggguucgcgccuuuuucuaaagauaacagcauccgccuguccgcuggaggcgacaucugggugacaagagagcccuaugucucuugcgauccugacaaguguuaccaauucgcccuugggcagggaaccacacugaauaacgugcauagcaauaacaccguucgggaucgcacgccguauagaacacuccugaugaaugagcugggcgugcccuuucaccucgggaccaagcaggucugcauugccugguccucuagcuccugucaugacggaaaggcuuggcugcacgugugcaucacaggcgaugacaaaaacgccaccgcuagcuucauuuacaauggccggcuuguugauucuguggucuccuggagcaaagaaauccugcgcacccaggagucugaaugugugugcauuaacgggacauguacgguggucaugaccgacggauccgccagcggcaaggcggauacaaaaauccucuuuaucgaggaggggaagauuguucauaccuccacacugucuggaagcgcccaacacguggaagagugcuccugcuauccuagauaccccggcgugcggugugucugccgcgacaacuggaaggggagcaauagaccuaucguggauauuaacaucaaagaccacucuauuguuuccagcuacguguguucuggacuugucggcgacacgccccggaagaaugauagcuccucuagcucccauugccuggacccgaacaaugaagagggcgggcacggagugaaaggcugggcuuucgaugacgggaacgauguuuggaugggacgcaccaucagcgaaaagucuagacucggcuaugagacauuuaaagugaucgaggggugguccaauccuaagagcaaacugcagauuaaccggcaggucaucguggaccgcggaaauagaucuggcuacuccggcauuuucagcgucgaagggaaguccuguaucaaccggugcuuuuauguggagcugauuagaggacgcaaggaagagaccgaaguucucuggaccucuaauagcaucguggucuucuguggcacauccgggaccuacggaacaggcucuuggcccgauggggccgacauuaaccugaugccuaucuga

SEQ ID NO: 212848 - RNA, 1410 nt, Artificial Sequence
  derived and/or modified CDS sequence (opt5) from neuraminidase__InfluenzaA__AEI60089
augaaccccaaucagaagaucauuaccaucggcagcgugugcaugacaauugggauggccaaccugauccuccaaauuggaaauaucaucuccauuuggaucucucacagcauucagcugggcaaccagaaucagaucgagacguguaaccaauccgucauuaccuacgaaaauaacacauggguuaaucagaccuaugugaacaucucuaauacaaacuucgcugccgggcagagcguggucuccgugaaacuugcgggaaauucuagccugugcccuguuuccggcugggcuauuuacagcaaggacaacucuaucagaaucggguccaaaggagauguguuugucauucgggagccguucaucagcuguucuccccucgaaugccgcaccuuuuuccugacacagggcgcccuucugaaugacaagcauuccaacggcaccauuaaagauagaagcccuuaucggacgcucaugucuugucccaucggggaggugccuucccccuacaacagccgcuuugaauccguugccuggucugcuagcgccugccacgacggaauuaauuggcugaccaucggcaucuccgggccugauaacggagcuguggccguccugaaguauaauggcauuaucacagacaccauuaagagcuggagaaacaauauccuccggacacaagagucugagugugcgugcgugaacggguccuguuucaccauuaugacggauggaccgagcgacggccaggccucuuacaaaaucuuucgcaucgaaaagggcaaaauugucaagagcguggagaugaaugcucccaacuauuacuacgaagagugcuccuguuauccugauucuagcgagaucacaugcguuugcagagacaauuggcauggguccaaccggcccugggugagcuucaaucagaaccuggaauaccagauuggauauaucuguucuggcauuuuuggggauaauccucgccccaacgacaaaaccggauccugcggcccggugagcucuaauggggccaacggagucaagggcuucuccuuuaaguacggcaacgggguguggaucggaagaacaaaaagcauuuccucucggaagggcuucgagaugaucugggauccuaauggguggaccggaaccgacaacaauuuuagcaucaaacaagacauuguuggcaucaacgaaugguccggguauucuggcagcuucgugcagcaccccgagcuuacaggacuggauuguauucgcccuugcuucugggucgaacucaucagaggccggcccaaggagaauacgauuuggaccuccgggagcucuaucuccuuuuguggagugaacagcgacacaguuggcuggucuuggcccgauggggcugagcugccuuucaccaucgacaaauga

SEQ ID NO: 212849 - RNA, 1410 nt, Artificial Sequence; identical to SEQ ID NO: 212781
  derived and/or modified CDS sequence (opt5) from neuraminidase__InfluenzaA__AEI60099

SEQ ID NO: 212850 - RNA, 1410 nt, Artificial Sequence
  derived and/or modified CDS sequence (opt5) from neuraminidase__InfluenzaA__AEI60111
augaaccccaaucagaagaucauuaccaucggcagcauuucccugacaaucgccacgauuugcuuccucaugcaaaucgcuauccuggugaccacagucacccuucacuuuaaacaguacaaguguaacucuccuccgaauaacagaguuaugcugugcgagcccacaauuaucgaacggaauauuaccgagaucguguaucucacaaacaccacgauugaaaaagagaucuguccuaagcuggccgaauaccgcaauuggagcaaaccccagugcaacauuaagggguucgcgccuuuuuccaaggacaauucuaucagacuuagcgcuggaggcgauaucugggugacccgggagcccuaugucuccugugacccugauaaaugcuaccaguucgcccuggggcaaggaacaacccucaacaauggccauucuaacgacacagugcacgaucgcaccccguauagaacgcugcugaugaaugagcucgggguucccuuucaucugggaacacgccagguguguauugccuggagcuccagcucuugccacgacggcaaggcuuggcuucaugucuguaucaccggcgaugacgaaaacgccacagcuuccuucauuuacaaugggcggcugguggauagcaucggaucuugguccaaaaagauucucagaacccaggagagcgaaugcguuuguaucaacgggaccugcacaguggucaugacggacggcucugccuccggaaaagcggauaccaagauccuguuuauugaggagggcaagaucgugcacauuagcacacuuuccgggucugcccagcacguggaagagugcagcuguuauccucgguaccccggaguccgcugcguuuguagagacaacuggaaaggcuccaaucggccuaucguggauauuaacgugcgcgacuacagcaucgucucuuccuaugugugcagcggccugguuggggacacccccagaaagaaugauucuuucagcuccucucauugucucgacccgaacaaugaagagggaggccacggggugaaaggaugggcuuuugaugacggcaacgaugucuggauggggcggacaaucagcgaaaagcugcgcuccggauacgagaccuucaaagugauugagggcuggagcaagccuaauucuaaacugcaaguuaacagacaggugaucgucgaacggggcaauagauccggguauagcggaaucuuuucuguggagggcaaguccugcauuaaccgcuguuucuacgucgaacucauucgggggagaaaggaggaaacgaaagugugguggacaagcaauuccaucguuguguuuugcggaaccucuggcaccuaugggacaggcagcuggcccgacggagccgauauuaacaucaugccuaucuga

SEQ ID NO: 212851 - RNA, 1410 nt, Artificial Sequence; identical to SEQ ID NO: 208810
  derived and/or modified CDS sequence (opt5) from neuraminidase__InfluenzaA__AEI73669

SEQ ID NO: 212852 - RNA, 1410 nt, Artificial Sequence
  derived and/or modified CDS sequence (opt5) from neuraminidase__InfluenzaA__AEI86727
augaaccccaaucagaagaucauuaccaucggcagcgugugcauuacaaucgggauggccaaccugauucuccaaaucggaaauaucauuuccaucuggauuucucacagcauccagcugggcaaccagaaucagauugagacguguaaccaauccgucaucaccuacgaaaauaacacauggguuaaucagaccuaugugaacauuucuaauacaaacuucgcugccgggcagagcguggucuccgugaaacuugcgggaaauucuagccugugcccuguuuccggcugggcuaucuacagcaaggacaacucuaucagaauuggguccaaaggagauguguuugucauccgggagccguucauuagcuguucuccccucgaaugccgcaccuuuuuccugacacagggcgcccuucugaaugacaagcauuccaacggcaccaucaaagauagaagcccuuaucggacgcucaugucuugucccauuggggaggugccuucccccuacaacagcaaguuugaauccguugccuggucugcuagcgccugccacgacggaaucuccuggcugaccaucggcauuagcgggccugauaauggagcuguggccguccugaaguauaacggcaucauuacagacaccaucaaaucuuggcgcaauaacauucucagaacacaagaguccgagugugcgugcgugaaugggagcuguuucaccgugaugacggauggaccgucugacggccaggccagcuacaagaucuuucggaucgaaaaaggcaagauugucaaauccguugagaugaacgcucccaauuaucauuacgaagagugcucuuguuacccugauagcuccgagaucacaugcgugugccgcgacaacuggcacgggagcaauagacccugggugucuuucaaccagaaucuggaauaucagauuggauacaucuguuccggcauuuuuggggauaacccucggcccaaugacaagaccggaagcugcggcccggucucuuccaacggggccaauggagugaagggcuucagcuuuaaauauggcaacgggguuuggaucggacgcacaaaguccauuucuagcagaaacggcuucgagaugaucugggauccuaauggguggaccggaaccgacaacaauuuuuccaucaaacaagacauugugggcaucaacgaauggucuggguacagcggcuccuucguccagcaucccgagcuuacaggacuggauuguauucggccuugcuucuggguggaacucauccgcggcagacccaaggagaauacgauuuggaccagcgggucuuccaucagcuuuuguggaguuaacucugacacagugggcugguccuggcccgauggggcugagcugccuuucaccaucgacaaauga

SEQ ID NO: 212853 - RNA, 1410 nt, Artificial Sequence
  derived and/or modified CDS sequence (opt5) from neuraminidase__InfluenzaA__AEI86737
augaaccccaaucagaagaucauuaccaucggcagcgugugcaugacaauugggauggccaaccugauccuccaaauuggaaauaucaucuccauuuggaucucucacagcauucagcugggcaaccagaaucagaucgagacguguaaccaauccgucauuaccuacgaaaauaaaacauggguuaaccagaccuaugugaauaucucuaacacaaauuucgcugccgggcagagcguggucuccgugaaacuugcgggaaacucuagccugugcccuguuuccggcugggcuauuuacagcaaggacaauucuaucagaaucggguccaagggagauguguuugucauucgggagccguucaucagcuguucuccccucgaaugccgcaccuuuuuccugacacagggcgcccuucugaacgacaaacauuccaauggcaccauuaaggauagaagcccuuaucggacgcucaugucuugucccaucggggaggugccuucccccuacaacagccgcuuugaauccguugccuggucugcuagcgccugccacgacggaauuaacuggcugaccaucggcaucuccgggccugauaauggagcuguggccguccugaaguauaacggcauuaucacagacaccauuaaaagcuggagaaauaacauccuccggacacaagagucugagugugcgugcgugaauggguccuguuucaccgugaugacggauggaccgagcgacggccaggccucuuacaagauuuuucgcaucgaaaaaggcaaggucguuaaaagcguggagaugaacgcucccaauuaucauuacgaagagugcuccuguuacccugauucuagcgagaucacaugcgugugcagagacaacuggcacggguccaaucggcccugggucagcuucaaccagaaucuggaauaucagauuggauacaucuguucuggcauuuuuggggauaacccucgccccaaugacaagaccggauccugcggcccggugagcucuaacggggccaauggaguuaagggcuucuccuuuaaauauggcaacgggguguggaucggaagaacaaagagcauuuccucucggaacggcuucgagaugaucugggauccuaauggguggaccggaaccgacaacaauuuuagcauuaaacaagacaucgucggcaucaacgaaugguccggguacucuggcagcuucgugcagcaucccgagcuuacaggacuggauuguauucgcccuugcuucuggguugaacucaucagaggccggcccaaggagaauacgauuuggaccuccgggagcucuaucuccuuuuguggagugaacagcgacacagucggcuggucuuggcccgauggggcugagcugccuuucaccauugacaaauga

SEQ ID NO: 212854 - RNA, 1410 nt, Artificial Sequence
  derived and/or modified CDS sequence (opt5) from neuraminidase__InfluenzaA__AEI86757
augaaccccaaucagaagaucauuaccaucggcagcgugugcauuacaaucgggauggccaaccugauucuccaaaucggaaauaucauuuccaucuggauuucucacagcauccagcugggcaaccagaaucagauugagacguguaaccaauccgucaucaccuacgaaaauaacacauggguuaaucagaccuaugugaacauuucuaauacaaacuucgcugccgggcagagcguggucuccgugaaacuugcgggaaauucuagccugugcccuguuuccggcugggcuaucuacagcaaggacaacucuaucagaauuggguccaaaggagauguguuugucauccgggagccguucauuagcuguucuccccucgaaugccgcaccuuuuuccugacacagggcgcccuucugaaugacaagcauuccaacggcaccaucaaagauagaagcccuuaucggacgcucaugucuugucccauuggggaggugccuucccccuacaacagccgcuuugaauccguugccuggucugcuagcgccugccacgacggaaucuccuggcugaccaucggcauuagcgggccugauaauggagcuguggccguccugaaguauaacggcaucauuacagacaccaucaagucuuggagaaauaacauucuccggacacaagaguccgagugugcgugcgugaaugggagcuguuucaccgugaugacggauggaccgucugacggccaggccagcuacaaaaucuuucgcaucgaaaagggcaaaauugucaaguccguugagaugaacgcucccaauuaucauuacgaagagugcucuuguuacccugauagcuccgagaucacaugcgugugcagagacaacuggcacgggagcaaucggcccugggugucuuucaaccagaaucuggaauaucagauuggauacaucuguuccggcauuuuuggggauaacccucgccccaaugacaaaaccggaagcugcggcccggucucuuccaacggggccaauggagugaagggcuucagcuuuaaguauggcaacgggguuuggaucggaagaacaaaauccauuaucucucggaacggcuucgagaugaucugggauccuaauggguggaccggaaccgacaacaauuuuagcauuaagcaagacaucgugggcauuaacgaaugguccggguacucuggcagcuucguccagcaucccgagcuuacaggacuggauuguauccgcccuugcuucuggguggaacucauuagaggccggcccaaagagaauacgaucuggaccuccgggagcucuaucuccuuuuguggaguuaacagcgacacagugggcuggucuuggcccgauggggcugagcugccuuucaccauugacaaguga

SEQ ID NO: 212855 - RNA, 1410 nt, Artificial Sequence
  derived and/or modified CDS sequence (opt5) from neuraminidase__InfluenzaA__AEI86767
augaaccccaaucagaagaucauuaccaucggcagcgugugcauuacaaucgggauggccaaccugauucuccaaaucggaaauaucauuuccaucuggauuucucacagcauccagcugggcaaccagaaucagauugagacguguaaccaauccgucaucaccuacgaaaauaacacauggguuaaucagaccuaugugaacauuucuaauacaaacuucgcugccgggcagagcguggucuccgugaaacuugcgggaaauucuagccugugcccuguuuccggcugggcuaucuacagcaaggacaacucuaucagaauuggguccaaaggagauguguuugucauccgggagccguucauuagcuguucuccccucgaaugccgcaccuuuuuccugacacagggcgcccuucugaaugacaagcauuccaacggcaccaucaaagauagaagcccuuaucggacgcucaugucuugucccauuggggaggugccuucccccuacaacagccgcuuugaauccguugccuggucugcuagcgccugccacgacggaaucuccuggcugaccaucggcauuagcgggccugauaauggagcuguggccguccugaaguauaacggcaucauuacagacaccaucaagucuuggagaaauaacauucuccggacacaagaguccgagugugcgugcgugaaugggagcuguuucaccgugaugacggauggaccgucugacggccaggccagcuacaaaaucuuucgcaucgaaaagggcaaaauugucaaguccguugagaugaacgcucccaauuaucauuacgaagagugcucuuguuacccugauagcuccgagaucacaugcgugugcagagacaacuggcacgggagcaaucggcccugggugucuuucaaccauaaucuggaauaucagauuggauacaucuguuccggcauuuuuggggauaacccucgccccaaugacaaaaccggaagcugcggcccggucucuuccaacggggccaauggagugaagggcuucagcuuuaaguauggcaacgggguuuggaucggaagaacaaaauccauuucuagccggaacggcuucgagaugaucugggauccuaauggguggaccggaaccgacaacaauuuuuccaucaagcaggacauugugggcaucaacgaauggucuggguacagcggcuccuucguccaacaccccgagcuuacaggacuggauuguauucgcccuugcuucuggguggaacucaucagaggccggcccaaagagaauacgauuuggaccagcgggucuuccaucagcuuuuguggaguuaacucugacacagugggcugguccuggcccgauggggcugagcugccuuucaccaucgacaaguga

SEQ ID NO: 212856 - RNA, 1410 nt, Artificial Sequence; identical to SEQ ID NO: 212855
  derived and/or modified CDS sequence (opt5) from neuraminidase__InfluenzaA__AEI86777

SEQ ID NO: 212857 - RNA, 1410 nt, Artificial Sequence
  derived and/or modified CDS sequence (opt5) from neuraminidase__InfluenzaA__AEI86787
augaaccccaaucagaagaucauuaccaucggcagcgugugcaugacaauugggauggccaaccugaugcuccaaaucggaaauauuaucuccaucuggauuucucacagcauccagcugggcaaccagaaucagauugagacguguaaccaauccgucaucaccuacgaaaauaacacauggguuaaucagaccuaugugaacauuucuaauacaaacuucgcugccgggcagagcguggucuccgugaaacuugcgggaaauucuagccugugcccuguuuccggcugggcuaucuacagcaaggacaacucuauuagaaucggguccaaaggagauguguuugucauccgggagccguucauuagcuguucuccccucgaaugccgcaccuuuuuccugacacagggcgcccuucugaaugacaagcauuccaacggcaccaucaaagauagaagcccuuaucggacgcucaugucuugucccauuggggaggugccuucccccuacaacagccgcuuugaauccguugccuggucugcuagcgccugccacgacggaaucaauuggcugaccauuggcaucuccgggccugauaacggagcuguggccguccugaaguauaauggcaucauuacagacaccaucaagagcuggagaaacaauauucuccggacacaagagucugagugugcgugcgugaacggguccuguuucaccgugaugacggauggaccgagcgacggccaggccucuuacaaaaucuuucgcauugaaaagggcaaaaucgucaagagcguugagaugaaugcucccaacuaucauuacgaagagugcuccuguuacccugauucuagcgagaucacaugcgugugcagagacaauuggcacggguccaaccggcccugggugagcuucaaucagaaccuggaauaucagauuggauacaucuguucuggcauuuuuggggauaauccucgccccaacgacaaaaccggauccugcggcccggucagcucuaauggggccaacggagugaagggcuucuccuuuaaguauggcaacgggguuuggaucggaagaacaaaaagcauuuccucucggaauggcuucgagaugaucugggauccuaacggguggaccggaaccgacaauaacuuuagcauuaagcaagacaucgugggcaucaaugaaugguccggguacucuggcagcuucguccagcaucccgagcuuacaggacuggauuguauucgcccuugcuucuggguggaacucaucagaggccggcccaaagagaacacgauuuggaccuccgggagcucuaucuccuuuuguggaguuaauagcgacacagugggcuggucuuggcccgauggggcugagcugccuuucaccauugacaaguga

SEQ ID NO: 212858 - RNA, 1410 nt, Artificial Sequence
  derived and/or modified CDS sequence (opt5) from neuraminidase__InfluenzaA__AEI86797
augaaccccaaucagaagaucauuaccaucggcagcgugugcauuacaaucgggauggccaaccugauucuccaaaucggaaauaucauuuccaucuggauuucucacagcauccagcugggcaaccagaaucagauugagacguguaaccaauccgucaucaccuacgaaaauaacacauggguuaaucagaccuaugugaacauuucuaauacaaacuucgcugccgggcagagcguggucuccgugaaacuugcgggaaauucuagccugugcccuguuuccggcugggcuaucuacagcaaggacaacucuaucagaauuggguccaaaggagauguguuugucauccgggagccguucauuagcuguucuccccucgaaugccgcaccuuuuuccugacacagggcgcccuucugaaugacaagcauuccaacggcaccaucaaagauagaagcccuuaucggacgcucaugucuugucccauuggggaggugccuucccccuacaacagccgcuuugaauccguugccuggucugcuagcgccugccacgacggaaucuccuggcugaccaucggcauuagcgggccugauaauggagcuguggccguccugaaguauaacggcaucauuacagacaccaucaagucuuggagaaauaacauucuccggacacaagaguccgagugugcgugcgugaaugggagcuguuucaccgugaugacggauggaccgucugacggccaggccagcuacaaaaucuuucgcaucgaaaagggcaaaauugucaaguccguugagaugaacgcucccaauuaucauuacgaagagugcucuuguuacccugauagcuccgagaucacaugcgugugcagagacaacuggcacgggagcaaucggcccugggugucuuucaaccagaaucuggaauaucagauuggauacaucuguuccggcauuuuuggggauaacccucgccccaaugacaaaaccggaagcugcggcccggucucuuccaacggggccaauggagugaagggcuucagcuuuaaguauggcaacgggguuuggaucggaagaacaaaauccauuucuagccggaacggcuucgagaugaucugggauccuaauggguggaccggaaccgacaacaauuuuuccaucaagcaagacauugugggcaucaacgaauggucuggguacagcggcuccuucguccagcaucccgagcuuacaggacuggauuguauucgcccuugcuucuggguggaacucaucagaggccggcccaaagagaauacgauuuggaccagcgggucuuccaucagcuuuuguggaguuaacucugacacagugggcugguccuggcccgauggggcugagcugccuuucaccaucgacaaguga

SEQ ID NO: 212859 - RNA, 1410 nt, Artificial Sequence
  derived and/or modified CDS sequence (opt5) from neuraminidase__InfluenzaA__AEI86807
augaaccccaaucagaagaucauuaccaucggcagcgugugcaugacaauugggauggccaaccugauccuccaaauuggaaauaucaucuccauuuggaucucucacagcauucagcugggcaaccagaaucagaucgagacguguaaccaauccgucauuaccuacgaaaauaacacauggguuaaucagaccuaugugaacaucucuaauacaaacuucgcugccgggcagagcguggucuccgugaaacuugcgggaaauucuagccugugcccuguuuccggcugggcuauuuacagcaaggacaacucuaucagaaucggguccaaaggagauguguuugucauucgggagccguucaucagcuguucuccccucgaaugccgcaccuuuuuccugacacagggcgcccuucugaaugacaagcauuccaacggcaccauuaaagauagaagcccuuaucggacgcucaugucuugucccaucggggaggugccuucccccuacaacagccgcuuugaauccguugccuggucugcuagcgccugccacgacggaauuaauuggcugaccaucggcaucuccgggccugauaacggagcuguggccguccugaaguauaauggcauuaucacagacaccauuaagagcuggagaaacaauauccuccggacacaagagucugagugugcgugcgugaacggguccuguuucaccgugaugacggauggaccgagcgacggccaggccucuuacaaaauuuuucgcaucgaaaagggcaaaaucgucaagagcguugagaugaaugcucccaacuaucauuacgaagagugcuccuguuacccugauucuagcaaaauuacaugcgugugcagagacaauuggcacggguccaaccggcccugggugagcuucaaucagaaccuggaguaucagaucggauacauuuguucuggcaucuuuggggauaauccucgccccaacgacaagaccggauccugcggcccggucagcucuaauggggccaacggagugaagggcuucuccuuuaaauauggcaacgggguuuggauuggaagaacaaagagcaucuccucucggaauggcuucgaaaugauuugggauccuaacggguggaccggaaccgacaauaacuuuagcaucaaacaagacaucgugggcauuaaugagugguccggguacucuggcagcuucguccagcaucccgaacuuacaggacuggauuguauccgcccuugcuucuggguggagcucauuagaggccggcccaaggaaaacacgaucuggaccuccgggagcucuauuuccuuuuguggaguuaauagcgacacagugggcuggucuuggcccgauggggcugagcugccuuucaucaucgacaaauga

SEQ ID NO: 212860 - RNA, 1410 nt, Artificial Sequence; identical to SEQ ID NO: 212855
  derived and/or modified CDS sequence (opt5) from neuraminidase__InfluenzaA__AEI86817

SEQ ID NO: 212861 - RNA, 1410 nt, Artificial Sequence
  derived and/or modified CDS sequence (opt5) from neuraminidase__InfluenzaA__AEI86827
augaaccccaaucagaagaucauuaccaucggcagcgugugcauuacaaucgggauggccaaccugauucuccaaaucggaaauaucauuuccaucuggauuucucacagcauccagcugggcaaccagaaucagauugagacguguaaccaauccgucaucaccuacgaaaauaacacauggguuaaucagaccuaugugaacauuucuaauacaaacuucgcugccgggcagagcguggucuccgugaaacuugcgggaaauucuagccugugcccuguuuccggcugggcuaucuacagcaaggacaacucuaucagaauuggguccaaaggagauguguuugucauccgggagccguucauuagcuguucuccccucgaaugccgcaccuuuuuccugacacagggcgcccuucugaaugacaagcauuccaacggcaccaucaaagauagaagcccuuaucggacgcucaugucuugucccauuggggaggugccuucccccuacaacagccgcuuugaauccguugccuggucugcuagcgccugccacgacggaaucuccuggcugaccaucggcauuagcgggccugauaauggagcuguggccguccugaaguauaacggcaucauuacagacaccaucaagucuuggagaaauaacauucuccggacacaagaguccgagugugcgugcgugaaugggagcuguuucaccgugaugacggauggaccgucugacggccaggccagcuacaaaaucuuucgcaucgaaaagggcaaaauugucaaguccguugagaugaacgcucccaauuaucauuacgaagagugcucuuguuacccugauagcuccgagaucacaugcgugugcagagacaacuggcacgggagcaaucggcccugggugucuuucaaccauaaucuggaauaucagauuggauacaucuguuccggcauuuuuggggauaacccucgccccaaugacaaaaccggaagcugcggcccggucucuuccaacggggccaauggagugaagggcuucagcuuuaaguauggcaacgggguuuggaucggaagaacaaaauccaccucuagccggaacggcuucgagaugauuugggauccuaauggguggaccggaacagacaacaauuuuuccaucaagcaggacaucgugggcauuaacgaauggucuggguacagcggcuccuucguccaacaccccgagcuuacgggacugaauuguauccgcccuugcuucuggguggaacucauuagaggccggcccaaagagaacaccaucuggacaagcgggucuuccauuagcuuuuguggaguuaauucugauaccgugggcugguccuggcccgacggggcugagcugccuuucacaaucgauaaguga

SEQ ID NO: 212862 - RNA, 1410 nt, Artificial Sequence; identical to SEQ ID NO: 212858
  derived and/or modified CDS sequence (opt5) from neuraminidase__InfluenzaA__AEI86837

SEQ ID NO: 212863 - RNA, 1410 nt, Artificial Sequence; identical to SEQ ID NO: 212329
  derived and/or modified CDS sequence (opt5) from neuraminidase__InfluenzaA__AEI86847

SEQ ID NO: 212864 - RNA, 1410 nt, Artificial Sequence
  derived and/or modified CDS sequence (opt5) from neuraminidase__InfluenzaA__AEI86867
augaaccccaaucagaagaucauuaccaucggcagcgugugcaugacaauugggauggccaaccugauccuccaaauuggaaauaucaucuccauuuggaucucucacagcauucagcugggcaaccagaaucagaucgagacguguaaccaauccgucauuaccuacgaaaauaacacauggguuaaucagaccuaugugaacaucucuaauacaaaccuugcugccgggcagagcguggucuccgugaaacuggcgggaaauucuagccucugcccuguuuccggcugggcuauuuacagcaaggacaacucuaucagaaucggguccaaaggagauguguucgucauucgggagccguuuaucagcuguucuccccuggaaugccgcaccuucuuucuuacacagggcgcccugcucaaugacaagcauuccaacggcaccauuaaagauagaagcccuuaucggacgcugaugucuugucccaucggggaggugccuucccccuacaacagcaaguucgaauccguugccuggucugcuagcgccugccacgacggaauuaauuggcugaccaucggcaucuccgggccugauaacggagcuguggccguccucaaguauaauggcauuaucacagacaccauuaaaagcuggcgcaacaauauccugagaacacaagagucugagugugcgugcgugaacggguccuguuuuaccauuaugacggauggaccgagcgacggccaggccucuuacaagaucuuccggaucgaaaaaggcaagauugugaaaagcgucgagaugaaugcucccaacuaucauuacgaagagugcuccuguuacccugauucuagcgagaucacaugcguuugccgcgacaauuggcacggguccaacagacccugggugagcuuuaaucagaaccuugaauaucagauuggauacaucuguucuggcauuuucggggauaauccucggcccaacgacaagaccggauccugcggcccggugagcucuaauggggccaacggagucaagggcuuuuccuucaaauauggcaacgggguguggaucggacgcacaaagagcauuuccucuagaaaaggcuuugagaugaucugggauccuaauggguggaccggaaccgacaacaauuucagcaucaagcaagacauuguuggcaucaacgaaugguccggguacucuggcagcuuugugcagcaucccgagcugacaggacucgauuguauucggccuugcuucugggucgaacugauccgcggcagacccaaagagaauacgauuuggaccuccgggagcucuaucuccuucuguggagugaacagcgacacaguuggcuggucuuggcccgauggggcugagcuuccuuuuaccaucgacaaguga

SEQ ID NO: 212865 - RNA, 1410 nt, Artificial Sequence; identical to SEQ ID NO: 212858
  derived and/or modified CDS sequence (opt5) from neuraminidase__InfluenzaA__AEI86887

SEQ ID NO: 212866 - RNA, 1410 nt, Artificial Sequence; identical to SEQ ID NO: 212858
  derived and/or modified CDS sequence (opt5) from neuraminidase__InfluenzaA__AEI86897

SEQ ID NO: 212867 - RNA, 1410 nt, Artificial Sequence
  derived and/or modified CDS sequence (opt5) from neuraminidase__InfluenzaA__AEI86907
augaaccccaaucagaagaucauuaccaucggcagcgugugcaugacaauugggauggccaaccugauccuccaaauuggaaauaucaucuccauuuggaucucucacagcauucagcugggcaaccagaaucagaucgagacguguaaccaauccgucauuaccuacgaaaauaacacauggguuaaucagaccuaugugaacaucucuaauacaaacuucgcugccgggcagagcguggucuccgugaaacuugcgggaaauucuagccugugcccuguuuccggcugggcuauuuacagcaaggacaacucuaucagaaucggguccaaaggagauguguuugucauucgggagccguucaucagcuguucuccccucgaaugccgcaccuuuuuccugacacagggcgcccuucugaaugacauucauuccaacggcaccaucaaggauagaagcccuuaucggacgcucaugucuugucccauuggggaggugccuucccccuacaacagccgcuuugaauccguugccuggucugcuagcgccugccacgacggaaucaauuggcugaccaucggcauuuccgggccugauaacggagcuguggccguccugaaauauaauggcaucauuacagacaccaucaagagcuggagaaacaauauucuccggacacaagagucugagugugcgugcgugaacggguccuguuucaccaucaugacggauggaccgagcgacggccaggccucuuacaagaucuuucgcauugaaaaaggcaagaucgugaaaagcgucgagaugaaugcucccaacuaucauuacgaagagugcuccuguuacccugauucuagcgagauuacaugcguuugcagagacaauuggcacggguccaaccggcccugggugagcuucaaucagaaccuggaauaucagaucggauacauuuguucuggcaucuuuggggauaauccucgccccaacgacaagaccggauccugcggcccggugagcucuaauggggccaacggagucaaaggcuucuccuuuaaguauggcaacgggguguggauuggaagaacaaagagcaucuccucucggaaaggcuucgagaugaucugggauccuaauggguggaccggaaccgacaacaauuuuagcauuaagcaagacaucguuggcauuaacgaaugguccggguacucuggcagcuucgugcagcaucccgagcuuacaggacuggauuguauccgcccuugcuucugggucgaacucauuagaggccggcccaaagagaauacgaucuggaccuccgggagcucuaucuccuuuuguggagugaacagcgacacaguuggcuggucuuggcccgauggggcugagcugccuuucaccauugacaaguga

SEQ ID NO: 212868 - RNA, 1410 nt, Artificial Sequence
  derived and/or modified CDS sequence (opt5) from neuraminidase__InfluenzaA__AEI86917
augaaccccaaucagaagaucauuaccaucggcagcauuugcaugacaaucgggauggccaaccugauucuccaaaucggaaauaucauuuccaucuggauuucucacagcauccagcugggcaaccagaaucagauugagacguguaaccaauccgugaucaccuacgaaaauaacacaugggucaaucagaccuauguuaacauuucuaauacaaacuucgcugccgggcagagcgugguguccgucaaacuugcgggaaauucuagccugugcccuguguccggcugggcuaucuacagcaaggacaacucuaucagaauuggguccaaaggagauguuuuugugauccgggagccguucauuagcuguucuccccucgaaugccgcaccuuuuuccugacacagggcgcccuucugaaugacaagcauuccaacggcaccaucaaagauagaagcccuuaucggacgcucaugucuugucccauuggggaggucccuucccccuacaacagccgcuuugaauccguggccuggucugcuagcgccugccacgacggaaucaauuggcugaccaucggcauuuccgggccugauaacggagcuguugccgugcugaaguauaauggcaucauuacagacaccaucaagagcuggagaaacaauauucuccggacacaagagucugagugugcgugcgucaacggguccuguuucaccaucaugacggauggaccgagcgacggccaggccucuuacaaaaucuuucgcauugaaaagggcaaaaucgucaagagcguggagaugaaugcucccaacuaucauuacgaagagugcuccuguuacccugauucuagcgagauuacaugcgugugcagagacaauuggcacggguccaaccggcccuggguuagcuucaaucagaaccuggaauaucagaucggauacauuuguucuggcaucuuuggggauaauccucgccccaacgacaaaaccggauccugcggcccggugagcucuaauggggccaacggagugaagggcuucuccuuuaaguauggcaacggggucuggauuggaagaacaaaaagcaucuccucucggaagggcuucgagaugaucugggauccuaauggguggaccggaaccgacaacaauuuuagcauuaaacaagacaucgugggcauuaacgaaugguccggguacucuggcagcuucguucagcaucccgagcuuacaggacuggauuguauccgcccuugcuucuggguggaacucauuagaggccggcccaaggagaauacgaucuggaccuccgggagcucuaucuccuuuuguggagucaacagcgacacagugggcuggucuuggcccgauggggcugagcugccuuucaccauugacaaauga

SEQ ID NO: 212869 - RNA, 1410 nt, Artificial Sequence; identical to SEQ ID NO: 212781
  derived and/or modified CDS sequence (opt5) from neuraminidase__InfluenzaA__AEI86927

SEQ ID NO: 212870 - RNA, 1410 nt, Artificial Sequence; identical to SEQ ID NO: 212855
  derived and/or modified CDS sequence (opt5) from neuraminidase__InfluenzaA__AEI86937

SEQ ID NO: 212871 - RNA, 1410 nt, Artificial Sequence
  derived and/or modified CDS sequence (opt5) from neuraminidase__InfluenzaA__AEI86947
augaaccccaaucagaagaucauuaccaucggcagcgugugcaugacaauugggauggccaaccugauccuccaaauuggaaauaucaucuccauuuggaucucucacagcauucagcugggcaacaaaaaucagaucgagacguguaaccaguccgucauuaccuacgaaaauaacacauggguuaaucaaaccuaugugaacaucucuaauacaaacuucgcugccgggcagagcguggucuccgugaaacuugcgggaaauucuagccugugcccuguuuccggcugggcuauuuacagcaaggacaacucuaucagaaucggguccaagggagauguguuugucauucgggagccguucaucagcuguucuccccucgaaugccgcaccuuuuuccugacacagggcgcccuucugaaugacaaacauuccaacggcaccauuaaggauagaagcccuuaucggacgcucaugucuugucccaucggggaggugccuucccccuacaacagccgcuuugaauccguugccuggucugcuagcgccugccacgacggaauuaauuggcugaccaucggcaucuccgggccugauaacggagcuguggccguccugaaguauaauggcauuaucacagacaccauuaaaagcuggagaaacaauauccuccggacacaggagucugagugugcgugcgugaacggguccuguuucaccgugaugacggauggaccgagcgacggccaagccucuuacaagauuuuucgcaucgaaaaaggcaagaucgucaaaagcguugagaugaaugcucccaacuaucauuacgaagagugcuccuguuacccugauucuagcgagauuacaugcgugugcagagacaauuggcacggguccaaccggcccugggugagcuucaaucagaaccuggaauaucagaucggauacauuuguucuggcaucuuuggggauaauccucgccccaacgacaagaccggauccugcggcccggucagcucuaauggggccaacggagugaagggcuucuccuuuaaauauggcaacgggguuuggauuggaagaacaaagagcaucuccucucggaauggcuucgagaugauuugggauccuaacggguggaccggaaccgacaauaacuuuagcaucaaacaggacaucgugggcauuaaggaaugguccggguacucuggcagcuucguccaacaucccgagcuuacaggacuggauuguauccgcccuugcuucuggguggaacucauuagaggccggcccaaagagaauacgaucuggaccuccgggagcucuauuuccuuuuguggaguuaacagcgacacagugggcuggucuuggcccgauggggcugagcugccuuucaccaucgacaaguga

SEQ ID NO: 212872 - RNA, 1410 nt, Artificial Sequence
  derived and/or modified CDS sequence (opt5) from neuraminidase__InfluenzaA__AEI86967
augaaccccaaucagaagaucauuaccaucggcagcgugugcaugacaauugggauggccaaccugauccuccaaauuggaaauaucaucuccauuuggaucucucacagcauucagcugggcaaccagaaucagaucgagacguguaaccaauccgucauuaccuacgaaaauaacacauggguuaaucagaccuaugugaacaucucuaauacaaacuucgcugccgggcagagcguggucuccgugaaacuugcgggaaauucuagccugugcccuguuuccggcugggcuauuuacagcaaggacaacucuaucagaaucggguccaaaggagaugccuuugugauucgggagccguucaucagcuguucuccccucgaaugccgcaccuuuuuccugacacagggcgcccuucugaaugacaagcauuccaacggcaccauuaaagauagaagcccuuaucggacgcucaugucuugucccaucggggaggucccuucccccuacaacagccgcuuugaauccguggcuuggucugccagcgcuugccacgacggaauuaauuggcugaccaucggcaucuccgggccugauaacggagccguugcggugcugaaguauaauggcauuaucacagacaccauuaagagcuggagaaacaauauccuccggacacaagagucugagugugccugcgucaacggguccuguuucaccauuaugacggauggaccgagcgacggccaggcuucuuacaaaaucuuucgcaucgaaaagggcaaaauugucaagagcguggagaugaaugcccccaacuaucauuacgaagagugcuccuguuacccugauucuagcgagaucacaugcgugugcagagacaauuggcacggguccaaccggcccuggguuagcuucaaucagaaccuggaauaucagauuggauacaucuguucuggcauuuuuggggauaauccucgccccaacgacaaaaccggauccugcggcccggugagcucuaauggggcuaacggagugaagggcuucuccuuuaaguauggcaacggggucuggaucggaagaacaaaaagcauuuccucucggaagggcuucgagaugaucugggauccuaauggguggaccggaaccgacaacaauuuuagcaucaaacaagacauugugggcaucaacgaaugguccggguacucuggcagcuucguucagcaucccgagcuuacaggacuggauuguauucgcccuugcuucuggguggaacucaucagaggccggcccaaggagaauacgauuuggaccuccgggagcucuaucuccuuuuguggagucaacagcgacacagugggcuggucuuggcccgauggggccgagcugccuuucaccaucgacaaauga

SEQ ID NO: 212873 - RNA, 1410 nt, Artificial Sequence
  derived and/or modified CDS sequence (opt5) from neuraminidase__InfluenzaA__AEI86977
augaaccccaaucagaagaucauuaccaucggcagcgugugcaugacaauugggauggccaaccugauccuccaaauuggaaauaucaucuccauuuggaucucucacagcauucagcugggcaaccagaaucagaucgggacguguaaccaauccgucauuaccuacgagaauaacacauggguuaaucagaccuaugugaacaucucuaauacaaacuucgcugccggacagagcguggucuccgugaaacuugcgggcaauucuagccugugcccuguuuccgggugggcuauuuacagcaaggacaacucuaucagaaucggauccaaaggcgauguguuugucauucgggaaccguucaucagcuguucuccccucgagugccgcaccuuuuuccugacacagggcgcccuucugaaugacaagcauuccaacgggaccauuaaagauagaagcccuuaucggacgcucaugucuugucccaucggagaagugccuucccccuacaacagccgcuuugaguccguugccuggucugcuagcgccugccacgacggcauuaauuggcugaccaucgggaucuccggaccugauaacggcgcuguggccguccugaaguauaaugggauuaucacagacaccauuaagagcuggagaaacaauauccuccggacacaagaaucugaguguaccugcgugaacggauccuguuucacggugaugacagauggcccgagcgacggccaggcgucuuacaaaauuuuuaagaucgagaaagggaagaucgucaaaagcguugaaaugaaugcccccaacuaucauuacgaggaaugcuccuguuacccugauucuagcgagauuaccugcgugugccgcgacaauuggcacggauccaacagacccugggugagcuucaaucagaaccuggaguaucagaucggcuacauuuguucugggaucuuuggagauaauccucggcccaacgacaagacaggcuccugcgggccggucagcucuaauggagcuaacggcgugaagggcuucuccuuuaaauaugggaacggaguuuggauuggccgcaccaagagcaucuccucuagaaauggguucgaaaugauuugggauccuaacggauggaccggcacagacaauaacuuuagcaucaaacaagacaucguggggauuaaugagugguccggcuacucuggcagcuucguccagcaucccgaacuuacgggacuggauuguauccggccuugcuucuggguggagcucauucgcgggagacccaaggaaaacaccaucuggacauccggaagcucuauuuccuuuuguggcguuaauagcgacaccgugggguggucuuggcccgauggagccgagcugccuuucacaaucgacaaauga

SEQ ID NO: 212874 - RNA, 1410 nt, Artificial Sequence
  derived and/or modified CDS sequence (opt5) from neuraminidase__InfluenzaA__AEI86997
augaaccccaaucagaagaucauuaccaucggcagcgugugcaugacaauugggauggccaaccugauccuccaaauuggaaauaucaucuccauuuggaucucucacagcauucagcugggcaaccagaaucagaucgagacguguaaccaauccgucauuaccuacgaaaauaacacauggguuaaucagaccuaugugaacaucucuaauacaaacuucgcugccgggcagagcguggucuccgugaaacuugcgggaaauucuagccugugcccuguuuccggcugggcuauuuacagcaaggacaacucuaucagaaucggguccaaaggagauguguuugucauucgggagccguucaucagcuguucuccccucgaaugccgcaccuuuuuccugacacagggcgcccuucugaaugacaagcauuccaacggcaccauuaaagauagaagcccuuaucggacgcucaugucuugucccaucggggaggugccuucccccuacaacagccgcuuugaauccguugccuggucugcuagcgccugccacgacggaauuaauuggcugaccaucggcaucuccgggccugauaacggagcuguggccguccugaaguauaauggcauuaucacagacaccauuaagagcuggagaaacaauauccuccggacacaagagucugagugugcgugcgugaacggguccuguuucaccgugaugacggauggaccgagcgacggccaggccucuuacaaaauuuuucgcaucgaaaagggcaaaaucgucaagagcguugagaugaaugcucccaacuaucauuacgaagagugcuccuguuacccugauucuagcgagauuacaugcgugugcagagacaauuggcacggguccaaccggcccugggugagcuucaaucagaaccuggaauaucagaucggauacauuuguucuggcaucuuuggggauaauccucgccccaacgacaaaaccggauccugcggcccggucagcucuaauggggccaacggagugaagggcuucuccuuuaaguauggcaacgggguuuggauuggaagaacaaaaagcaucuccucucggaauggcuucgagaugauuugggauccuaacggguggaccggaaccgacaauaacuuuagcaucaagcaagacaucgugggcauuaaagaaugguccggguacucuggcagcuucguccagcaucccgagcuuacaggacuggauuguauccgcccuugcuucuggguggaacucauuagaggccggcccaaggagaauacgaucuggaccuccgggagcauuaucucuuuuuguggaguuaacuccgacacagugggcuggagcuggcccgauggggcugagcugccuuucaccaucgacaaauga

SEQ ID NO: 212875 - RNA, 1410 nt, Artificial Sequence
  derived and/or modified CDS sequence (opt5) from neuraminidase__InfluenzaA__AEI87007
augaaccccaaucagaagaucauuaccaucggcagcgugugcauuacaaucgggauggccaaccugauucuccaaaucggaaauaucauuuccaucuggauuucucacagcauccagcugggcaaccagaaucagauugagacguguaaccaauccgucaucaccuacgaaaauaacacauggguuaaucagaccuaugugaacauuucuaauacaaacuucgcugccgggcagagcguggucuccgugaaacuugcgggaaauucuagccugugcccuguuuccggcugggcuaucuacagcaaggacaacucuaucagaauuggguccaaaggagauguguuugucauccgggagccguucauuagcuguucuucccucgaaugccgcaccuuuuuccugacacagggcgcccuucugaaugacaagcauagcaacggcaccaucaaagauagaucucccuaucggacgcucauguccuguccuauuggggaggugcccagcccuuacaacucccgcuuugaaucuguugccuggagcgcuuccgccugccacgacggaaucagcuggcugaccaucggcauuucugggcccgauaauggagcuguggccguccugaaguauaacggcaucauuacagacaccaucaaguccuggagaaauaacauucuccggacacaagagagcgagugugcgugcgugaaugggucuuguuucaccgugaugacggauggaccuagcgacggccaggccuccuacaaaaucuuucgcaucgaaaagggcaaaauugucaagucuguugagaugaacgcuccgaauuaucauuacgaagagugcagcuguuaccccgauuccagcgagaucacaugcgugugcagagacaacuggcacgggucuaaucggccuuggguguccuucaaccagaaucuggaauaucagauuggauacaucuguagcggcauuuuuggggauaacccccgcccuaaugacaaaaccggaucuugcggccccgucuccagcaacggggccaauggagugaagggcuucuccuuuaaguauggcaacgggguuuggaucggaagaacaaaaucuauuagcucccggaacggcuucgagaugaucugggauccgaauggguggaccggaaccgacaacaauuuuucuaucaagcaagacauugugggcaucaacgaauggagcggguacuccggcagcuucguccagcauccugagcuuacaggacuggauuguauucgccccugcuucuggguggaacucaucagaggccggccuaaagagaauacgauuuggaccucuggguccagcaucucuuuuuguggaguuaacuccgacacagugggcuggagcuggcccgauggggcugagcugcccuucaccaucgacaaguga

SEQ ID NO: 212876 - RNA, 1410 nt, Artificial Sequence
  derived and/or modified CDS sequence (opt5) from neuraminidase__InfluenzaA__AEI87017
augaaccccaaucagaagaucauuaccaucggcagcgugugcaugacaauugggauggccaaccugauccuccaaauuggaaauaucaucuccauuuggaucucucacagcauucagcugggcaaccagaaucagaucgagacguguaaccaauccgucauuaccuacgaaaauaacacauggguuaaucagaccuaugugaacaucucuaauacaaacuucgcugccgggcagagcguggucuccgugaaacuugcgggaaauucuagccugugcccuguuuccggcugggcuauuuacagcaaggacaacucuaucagaaucggguccaaaggagauguguuugucauucgggagccguucaucagcuguucuccccucgaaugccgcaccuuuuuccugacacagggcgcccuucugaaugacaagcauuccaacggcaccauuaaagauagaagcccuuaucggacgcucaugucuugucccaucggggaggugccuucccccuacaacagccgcuuugaauccguugccuggucugcuagcgccugccacgacggaauuaauuggcugaccaucggcaucuccgggccugauaacggagcuguggccguccugaaguauaauggcauuaucacagacaccauuaagagcuggagaaacaauauccuccggacacaagagucugagugugcgugcgugaacggguccuguuucaccgugaugacggauggaccgagcgacggccaggccucuuacaaaauuuuucgcaucgaaaagggcaaaaucgucaagagcguugagaugaaugcucccaacuaucauuacgaagagugcuccuguuacccugauucuagcgagauuacaugcgugugcagagacaauuggcacggguccaaccggcccugggugagcuucaaucagaaccuggaauaucagaucggauacauuuguucuggcaucuuuggggauaauccucgccccaacgacaaaaccggauccugcggcccggucagcucuaauggggccaacggagugaagggcuucuccuuuaaguauggcaacgggguuuggauuggaagaacaaaaagcaucuccucucggaauggcuucgagaugauuugggauccuaacggguggaccggaaccgacaauaacuuuagcaucaagcaagacaucgugggcauuaaugaaugguccggguacucuggcagcuucguccagcaucccgagcuuacaggacuggauuguauccgcccuugcuucuggguggaacucauuagaggccggcccaaagagaacacgaucuggaccuccgggagcucuauuuccuuuuguggaguuaauggcgacacagggggauggagcuggcccgauggcgcugagcugccuuucaccaucgacaaguga

SEQ ID NO: 212877 - RNA, 1410 nt, Artificial Sequence; identical to SEQ ID NO: 212781
  derived and/or modified CDS sequence (opt5) from neuraminidase__InfluenzaA__AEI87027

SEQ ID NO: 212878 - RNA, 1410 nt, Artificial Sequence; identical to SEQ ID NO: 212874
  derived and/or modified CDS sequence (opt5) from neuraminidase__InfluenzaA__AEI87037

SEQ ID NO: 212879 - RNA, 1410 nt, Artificial Sequence; identical to SEQ ID NO: 212858
  derived and/or modified CDS sequence (opt5) from neuraminidase__InfluenzaA__AEI87047

SEQ ID NO: 212880 - RNA, 1410 nt, Artificial Sequence
  derived and/or modified CDS sequence (opt5) from neuraminidase__InfluenzaA__AEI87057
augaaccccaaucagaagaucauuaccaucggcagcgugugcaugacaauugggauggccaaccugauccuccaaauuggaaauaucaucuccauuuggaucucucacagcauucagcugggcaaccagaaucagaucgagacguguaaccaauccgucauuaccuacgaaaauaacacauggguuaaucagaccuaugugaacaucucuaauacaaacuucgcugccgggcagagcguggucuccgugaaacuugcgggaaauucuagccugugcccuguuuccggcugggcuauuuacagcaaggacaacucuaucagaaucggguccaaaggagauguguuugucauucgggagccguucaucagcuguucuccccucgaaugccgcaccuuuuuccugacacagggcgcccuucugaaugacaagcauuccaacggcaccauuaaagauagaagcccuuaucggacgcucaugucuugucccaucggggaggugccuucccccuacaacagccgcuuugaauccguugccuggucugcuagcgccugccacgacggaauuaauuggcugaccaucggcaucuccgggccugauaacggagcuguggccguccugaaguauaauggcauuaucacagacaccauuaagagcuggagaaacaauauccuccggacacaagagucugagugugcgugcgugaacggguccuguuucaccgugaugacggauggaccgagcgacggccaggccucuuacaaaauuuuucgcaucgaaaagggcaaaaucgucaagagcguugagaugaaugcucccaacuaucauuacgaagagugcuccuguuacccugauucuagcgagauuacaugcgugugcagagacaauuggcacggguccaaccggcccugggugagcuucaaucagaaccuggaauaucagaucggauacauuuguucuggcaucuuuggggauaauccucgccccaacgacaaaaccggauccugcggcccggucagcucuaauggggccaacggagugaagggcuucuccuuuaaguauggcaacgggguuuggauuggaagaacaaaaagcaucuccucucggaauggcuucgagaugauuugggauccuaacggguggaccggaaccgacaauaacuuuagcaucaagcaagacaucgugggcauuaaagaaugguccggguacucuggcagcuucguccagcaucccgagcuuacaggacuggauuguauccgcccuugcuucuggguggaacucauuagaggccggcccaaggagaauacgaucuggaccuccgggagcucuauuuccuuuuguggaguuaacagcgacacagugggcuggucuuggcccgauggggcugagcugccuuucaccaucgacaaauga

SEQ ID NO: 212881 - RNA, 1410 nt, Artificial Sequence; identical to SEQ ID NO: 212329
  derived and/or modified CDS sequence (opt5) from neuraminidase__InfluenzaA__AEI87067

SEQ ID NO: 212882 - RNA, 1410 nt, Artificial Sequence
  derived and/or modified CDS sequence (opt5) from neuraminidase__InfluenzaA__AEI87077
augaaccccaaucagaagaucauuaccaucggcagcauuugcaugacaaucgggauggccaaccugauucuccaaaucggaaauaucauuuccaucuggauuucucacagcauccaguucggcaaccagaaucagauugggacguguaaccaauccgugaucaccuacgagaauaacacaugggucaaucagaccuauguuaacauuucuaauacaaacuuugcugccggacagagcgugguguccgucaaacuggcgggcaauucuagccuuugcccuguguccgggugggcuaucuacagcaaggacaacucuaucagaauuggauccaaaggcgauguuuucgugauccgggaaccguuuauuagcuguucuccccuggagugccgcaccuucuuucucacacagggcgcccugcuuaaugacaagcauuccaacgggaccaucaaagauagaagcccuuaucggacgcugaugucuugucccauuggagaagucccuucccccuacaacagccgcuucgaguccguggccuggucugcuagcgccugccacgacggcaucaauuggcucaccaucgggauuuccggaccugauaacggcgcuguugccgugcugaaguauaaugggaucauuacagacaccaucaagagcuggagaaacaauauucugcggacacaagaaucugagugugcgugcgucaacggauccuguuuuaccaucaugacggauggcccgagcgacggccaggccucuuacaaaaucuuccgcauugagaaggggaaaaucgucaagagcguggaaaugaaugcucccaacuaucauuacgaggaaugcuccuguuacccugauucuagcgagauuacaugcgugugcagagacaauuggcacggauccaaccggcccuggguuagcuuuaaucagaaccucgaguaucagaucggcuacauuuguucugggaucuucggagauaauccucgccccaacgacaaaaccggcuccugcgggccggugagcucuaauggagccaacggcgugaagggcuuuuccuucaaguaugggaacggagucuggauuggcagaacaaaaagcaucuccucucggaagggguuugaaaugaucugggauccuaauggauggaccggcaccgacaacaauuucagcauuaaacaagacaucguggggauuaacgagugguccggcuacucuggcagcuucguucagcaucccgaacugacaggacuugauuguauccgcccuugcuuuuggguggagcugauuagagggcggcccaaggaaaauacgaucuggaccuccggaagcucuaucuccuucuguggcgucaacagcgacacagugggguggucuuggcccgauggagcugagcucccuuuuaccauugacaaauga

SEQ ID NO: 212883 - RNA, 1410 nt, Artificial Sequence
  derived and/or modified CDS sequence (opt5) from neuraminidase__InfluenzaA__AEI87087
augaaccccaaucagaagaucauuaccaucggcagcgugugcaugacaauugggauggccaaccugauccuccaaauuggaaauaucaucuccauuuggaucucucacagcauucagcugggcaaccagaaucagaucgagacguguaaccaauccgucauuaccuacgaaaauaacacauggguuaaucagaccuaugugaacaucucuaauacaaacuucgcugccgggcagagcguggucuccgugaaacuugcgggaaauucuagccugugcccuauuuccggcugggcuaucuacagcaaggacaacucuaucagaauuggguccaaaggagauguuuuugugauccgggagccguucauuagcuguucuccccucgaaugccgcaccuuuuuccugacacagggcgcccuucugaaugacaagcauuccaacggcaccaucaaagauagaagcccuuaucggacgcucaugucuugucccauuggggaggucccuucccccuacaacagccgcuuugaauccguggccuggucugcuagcgccugccacgacggaaucaauuggcugaccaucggcauuuccgggccugauaacggagcuguugccgugcugaaguauaauggcaucauuacagacaccaucaagagcuggagaaacaauauucuccggacacaagagucugagugugcgugcgucaacggguccuguuucaccgugaugacggauggaccgagcgacggccaggccucuuacaaaaucuuucgcaucgaaaagggcaaaauugucaagagcguggagaugaaugcucccaacuaucauuacgaagagugcuccuguuacccugauucuagcgagaucacaugcguuugcagagacaauuggcacggguccaaccggcccugggugagcuucaaucagaaccuggaauaucagauuggauacaucuguucuggcauuuuuggggauaauccucgccccaacgacaaaaccggauccugcggcccggugagcucuaauggggccaacggagucaagggcuucuccuuuaaguauggcaacgggguguggaucggaagaacaaaaagcauuuccucucggaauggcuucgagaugaucugggauccuaacggguggaccggaaccgacaauaacuuuagcaucaagcaagacauuguuggcaucaaagaaugguccggguacucuggcagcuucgugcagcaucccgagcuuacaggacuggauuguauucgcccuugcuucugggucgaacucaucagaggccggcccaaggagaauacgauuuggaccuccgggagcaucaucucuuuuuguuccgugaacagcgacacaguuggauggucuuggcccgauggcgcugagcugccuuucaccauugacaaauga

SEQ ID NO: 212884 - RNA, 1410 nt, Artificial Sequence; identical to SEQ ID NO: 212855
  derived and/or modified CDS sequence (opt5) from neuraminidase__InfluenzaA__AEI87097

SEQ ID NO: 212885 - RNA, 1410 nt, Artificial Sequence; identical to SEQ ID NO: 212855
  derived and/or modified CDS sequence (opt5) from neuraminidase__InfluenzaA__AEI87107

SEQ ID NO: 212886 - RNA, 1413 nt, Artificial Sequence
  derived and/or modified CDS sequence (opt5) from neuraminidase__InfluenzaA__AEI91968
augaaccccaaucagaagaucauuaccaucggcagcauuuccaucgccauugggaucaucucucugaugcuccaaauuggaaacaucauuagcaucugggcuucccacucuauucagacaggcagccagaauaacacggggaucugcaaucagagaauuaucaccuacgagaacuccacaugggugaaucauaccuaugugaacaucaauaacacaaauguuguggccggagaagacaaaaccucugugacacuggcgggcaacagcucccuuuguagcauuucugggugggcuaucuacaccaaggauaauuccauucggaucggaagcaaaggcgacgucuucgugauucgcgagccuuuuaucucuugcucccaccuggaauguagaacguucuuucucacccaaggcgcccugcuuaacgauaagcauagcaaugggacaguuaaagaccggucuccguaucgcgcccugauguccugcccccucggagaggcuccuagccccuacaacuccaaguucgaaucuguggccuggagcgcuuccgccugucacgauggcaugggguggcugaccaucggaauuagcggcccugacaacggggcggucgccgugcugaaguauaauggaaucauuacaggcaccaucaaaucuuggaagaaacagauucucagaacgcaggaguccgagugcguuuguaugaacggcagcugcuuuacaaucaugaccgaugggcccucuaauaaggcugccagcuacaaaaucuucaagauugaaaagggaaaagugacaaaguccaucgagcugaacgcuccuaauuuuuauuacgaagaguguucuugcuacccggacaccggcauugucaugugugugugccgggauaacuggcaugggagcaaucgccccuggguguccuucaaccagaaucuugacuaucaaaucggauacauuugcagcggcgucuuuggggauaacccuagacccgaggacggagaaggcucuuguaauccuguuaccguggauggcgccaacggggugaaaggauucuccuauaaguacggcaauggggucuggaucggacggacaaaaagcaaccgccugagaaagggcuuugagaugauuugggaccccaauggguggacgaacaccgacucugauuucuccgugaaacaggacguuguggcgaucacagauuggagcggcuauuccggaucuuuuguccagcacccggaacucaccggccuggacugcaucaagccuuguuucuggguggagcuuguucgggggcugccccgcgaaaacacaaccauuuggacgagcggauccucuaucagcuucugcggcgucaauuccgauacagccaacuggagcuggccugacggggcugagcuccccuuuaccauugauaaguga

SEQ ID NO: 212887 - RNA, 1410 nt, Artificial Sequence; identical to SEQ ID NO: 208810
  derived and/or modified CDS sequence (opt5) from neuraminidase__InfluenzaA__AEI91983

SEQ ID NO: 212888 - RNA, 1410 nt, Artificial Sequence; identical to SEQ ID NO: 211296
  derived and/or modified CDS sequence (opt5) from neuraminidase__InfluenzaA__AEI91984

SEQ ID NO: 212889 - RNA, 1410 nt, Artificial Sequence
  derived and/or modified CDS sequence (opt5) from neuraminidase__InfluenzaA__AEI92004
augaaccccaaucagaagaucauuaccaucggcagcgugugcaugacaauugggauggccaaccugauccuccaaauuggaaauaucaucuccauuuggaucucucacagcauucagcugggcaaccagaaucagaucgagacguguaaccaauccgucauuaccuacgaaaauaacacauggguuaaucagaccuaugugaacaucucuaauacaaacuucgcugccgggcagagcguggucuccgugaaacuugcgggaaauucuagccugugcccuguuuccggcugggcuauuuacagcaaggacaacucuaucagaaucggguccaaaggagauguguuugucauucgggagccguucaucagcuguucuccccucgaaugccgcaccuuuuuccugacacagggcgcccuucugaaugacaagcauuccaacggcaccauuaaagauagaagcccuuaucggacgcucaugucuugucccaucggggaggugccuucccccuacaacagccgcuuugaauccguugccuggucugcuagcgccugccacgacggaauuaauuggcugaccaucggcaucuccgggccugauaacggagcuguggccguccugaaguauaauggcauuaucacagacaccauuaagagcuggagaaacaauauccuccggacacaagagucugagugugcgugcgugaacggguccuguuucaccgugaugacggauggaccgagcgacggccaggccucuuacaaaauuuuucgcaucgaaaagggcaaaaucgucaagagcguugagaugaaugcucccaacuaucauuacgaagagugcuccuguuacccugauucuagcgagauuacaugcgugugcagagacaauuggcacggguccaaccggcccugggugagcuucaaucagaaccuggaauaucagaucggauacauuuguucuggcaucuuuggggauaauccucgccccaacgacaaaaccggauccugcggcccggucagcucuaauggggccuauggagugaagggcuucuccuuuaaguacggcaacgggguuuggauuggaagaacaaaaagcaucuccucucggaacggcuucgagaugauuugggauccuaauggguggaccggaaccgacaacaauuuuagcaucaagcaagacaucgugggcauuaacgaaugguccggguauucuggcagcuucguccagcaucccgagcuuacaggacuggauuguauccgcccuugcuucuggguggaacucauuagaggccggcccaaagagaauacgaucuggaccuccgggagcucuauuuccuuuuguggaguuaacagcgacacagugggcuggucuuggcccgauggggcugagcugccuuucaccaucgacaaguga

SEQ ID NO: 212890 - RNA, 1413 nt, Artificial Sequence
  derived and/or modified CDS sequence (opt5) from neuraminidase__InfluenzaA__AEI92023
augaaccccaaucagaagaucauuaccaucggcagcauuuccaucgccauugggaucaucucucugaugcuccaaauuggaaacaucauuagcaucugggcuucccacucuauucagacaggcagccagaauaacacggggaucugcaaucagaaaauuaucaccuacgagaacuccacaugggugaaucauaccuaugucaacaucaauaacacaaauguuguggccggagaagacaagaccucugugacacuggcgggcaacagcucccuuuguagcauuucugggugggcuaucuacaccaaagauaauuccauuagaaucggaagcaagggcgacgucuucgugauucgggagccuuuuaucucuugcucccaccuggaaugucgcacguucuuucucacccaaggcgcccugcuuaacgauaaacauagcaaugggacaguuaaggacagaucuccguaucgggcccugauguccugcccccucggagaggcuccuagccccuacaacuccaaguucgaaucuguggccuggagcgcuuccgccugucacgauggcaugggguggcugaccaucggaauuagcggcccugacaacggggcggucgccgugcugaaauauaauggaaucauuacaggcaccaucaagucuuggaaaaagcagauucuccgcacgcaggaguccgagugcguuuguaugaacggcagcugcuuuacaaucaugaccgaugggcccucuaauaaagcugccagcuacaagaucuucaagauugaaaaaggaaaggugacaaaauccaucgagcugaacgcuccuaauuuuuauuacgaagaguguucuugcuacccggacaccggcauugucaugugugugugcagagauaacuggcaugggagcaaucggcccuggguguccuucaaccagaaucuugacuaucaaaucggauacauuugcagcggcgucuuuggggauaacccucgccccgaggacggagaaggcucuuguaauccuguuaccguggauggcacaaacggggugaagggauucuccuauaaauacggcaauggggucuggaucggaagaacgaaguccaaccggcugcgcaaaggcuuugagaugauuugggaccccaauggguggaccaacacagacucugauuucuccgugaagcaggacguuguggccaucaccgauuggagcggcuauuccggaucuuuuguccagcacccggaacucacaggccuggacugcaucagaccuuguuucuggguggagcuuguucgggggcugccccgcgaaaacaccacgauuuggacaagcggauccucuaucagcuucugcggcgugaauagcgauaccgcgaacuggagcuggccugacggggccgagcuccccuuuaccauugauaaguga

SEQ ID NO: 212891 - RNA, 1410 nt, Artificial Sequence
  derived and/or modified CDS sequence (opt5) from neuraminidase__InfluenzaA__AEJ10403
augaaccccaaucagaagaucauuaccaucggcagcgugugcauuacaaucgggauggccaaccugauucuccaaaucggaaauaucauuuccaucuggauuucucacagcauccagcugggcaaccagaaucagauugagacguguaaccaauccgucaucaccuacgaaaauaacacauggguuaaucagaccuaugugaacauuucuaauacaaacuucgcugccgggcagagcguggucuccgugaaacuugcgggaaauucuagccugugcccuguuuccggcugggcuaucuacagcaaggacaacucuaucagaauuggguccaaaggagauguguuugucauccgggagccguucauuagcuguucuccccucgaaugccgcaccuuuuuccugacacagggcgcccuucugaaugacaagcauuccaacggcaccaucaaagauagaagcccuuaucggacgcucaugucuugucccauuggggaggugccuucccccuacaacagccgcuuugaauccguugccuggucugcuagcgccugccacgacggaaucuccuggcugaccaucggcauuagcgggccugauaauggagcuguggccguccugaaguauaacggcaucauuacagacaccaucaagucuuggagaaauaacauucuccggacacaagaguccgagugugcgugcgugaaugggagcuguuucaccgugaugacggauggaccgucugacggccaggccagcuacaaaaucuuucgcaucgaaaagggcaaaauugucaaguccguugagaugaacgcucccaauuaucauuacgaagagugcucuuguuacccugauagcuccgagaucacaugcgugugcagagacaacuggcacgggagcaaucggcccugggugucuuucaaccagaaucuggaauaucagauuggauacaucuguuccggcauuuuuggggauaacccucgccccaaugacaaaaccggaagcugcggcccggucucugccaacggggcuaauggagugaagggcuucuccuuuaaguauggcaacgggguuuggaucggaagaacaaaaagcauuuccucucggaacggcuucgagaugaucugggauccuaauggguggaccggaaccgacaacaauuuuagcaucaagcaagacauugugggcaucaacgaaugguccggguacucuggcagcuucguccagcaucccgagcuuacaggacuggauuguauucgcccuugcuucuggguggaacucaucagaggccggcccaaagagaauacgauuuggaccuccgggagcucuaucuccuuuuguggaguuaacagcgacacagugggcuggucuuggcccgauggggccgagcugccuuucaccaucgacaaguga

SEQ ID NO: 212892 - RNA, 1410 nt, Artificial Sequence; identical to SEQ ID NO: 212858
  derived and/or modified CDS sequence (opt5) from neuraminidase__InfluenzaA__AEJ10413

SEQ ID NO: 212893 - RNA, 1410 nt, Artificial Sequence; identical to SEQ ID NO: 212880
  derived and/or modified CDS sequence (opt5) from neuraminidase__InfluenzaA__AEJ10423

SEQ ID NO: 212894 - RNA, 1410 nt, Artificial Sequence
  derived and/or modified CDS sequence (opt5) from neuraminidase__InfluenzaA__AEJ10433
augaaccccaaucagaagaucauuaccaucggcagcgugugcaugacaauugggauggccaaccugauccuccaaauuggaaauaucaucuccauuuggaucucucacagcauucagcugggcaaccagaaucagaucgagacguguaaccaauccgucauuaccuacgaaaauaacacauggguuaaucagaccuaugugaacaucucuaauacaaacuucgcugccgggcagagcguggucuccgugaaacuugcgggaaauucuagccugugcccuguuuccggcugggcuauuuacagcaaggacaacucuaucagaaucggguccaaaggagauguguuugucauucgggagccguucaucagcuguucuccccucgaaugccgcaccuuuuuccugacacagggcgcccuucugaaugacaagcauuccaacggcaccauuaaagauagaagcccuuaucggacgcucaugucuugucccaucggggaggugccuucccccuacaacagccgcuuugaauccguugccuggucugcuagcgccugccacgacggaauuaauuggcugaccaucggcaucuccgggccugauaacggagcuguggccguccugaaguauaauggcauuaucacagacaccauuaagagcuggagaaacaauauccuccggacacaagagucugagugugcgugcgugaacggguccuguuucaccgugaugacggauggaccgagcgacggccaggccucuuacaaaauuuuucgcaucgaaaagggcaaaaucgucaagagcguugagaugaaugcucccaacuaucauuacgaagagugcuccuguuacccugauucuagcgagauuacaugcgugugcagagacaauuggcacggguccaaccggcccugggugagcuucaaucagaaccuggaauaucgcaucggauacauuuguucuggcaucuuuggggauaauccuagacccaacgacaaaaccggauccugcggcccggucagcucuaauggggccaacggagugaagggcuucuccuuuaaguauggcaacgggguuuggauuggacggacaaaaagcaucuccucucgcaauggcuucgagaugauuugggauccuaacggguggaccggaaccgacaauaacuuuagcaucaagcaggacaucauuggcaucaaugaaugguccggguacucuggcagcuucgugcaacaucccgagcuuacaggacuggauuguauuagaccuugcuucugggucgaacucauccggggccgccccaaagagaacacgauuuggaccuccgggagcucuaucuccuuuuguggagugaauagcggcacaguuggguggucuuggcccgacggagcugagcugccuuucaccaucgauaaguga

SEQ ID NO: 212895 - RNA, 1410 nt, Artificial Sequence; identical to SEQ ID NO: 212329
  derived and/or modified CDS sequence (opt5) from neuraminidase__InfluenzaA__AEJ10443

SEQ ID NO: 212896 - RNA, 1410 nt, Artificial Sequence; identical to SEQ ID NO: 212329
  derived and/or modified CDS sequence (opt5) from neuraminidase__InfluenzaA__AEJ10453

SEQ ID NO: 212897 - RNA, 1410 nt, Artificial Sequence; identical to SEQ ID NO: 212781
  derived and/or modified CDS sequence (opt5) from neuraminidase__InfluenzaA__AEJ10463

SEQ ID NO: 212898 - RNA, 1410 nt, Artificial Sequence
  derived and/or modified CDS sequence (opt5) from neuraminidase__InfluenzaA__AEJ10473
augaaccccaaucagaagaucauuaccaucggcagcgugugcaugacaauugggauggccaaccugauccuccaaauuggaaauaucaucuccauuuggaucucucacagcauucagcugggcaaccagaaucagaucgagacguguaaccaauccgucauuaccuacgaaaauaaaacauggguuaaccagaccuaugugaauaucucuaacacaaauuucgcugccgggcagagcguggucuccgugaaacuugcgggaaacucuagccugugcccuguuuccggcugggcuauuuacagcaaggacaauucuaucagaaucggguccaagggagauguguuugucauucgggagccguucaucagcuguucuccccucgaaugccgcaccuuuuuccugacacagggcgcccuucugaacgacaaacauuccaauggcaccauuaaggauagaagcccuuaucggacgcucaugucuugucccaucggggaggugccuucccccuacaacagccgcuuugaauccguugccuggucugcuagcgccugccacgacggaauuaacuggcugaccaucggcaucuccgggccugauaauggagcuguggccguccugaaguauaacggcauuaucacagacaccauuaaaagcuggagaaauaacauccuccggacacaagagucugagugugcgugcgugaauggguccuguuucaccgugaugacggauggaccgagcgacggccaggccucuuacaagauuuuucgcaucgaaaaaggcaagaucgucaaaagcguugagaugaacgcucccaauuaucauuacgaagagugcuccuguuacccugauucuagcgagauuacaugcgugugcagagacaacuggcacggguccaaucggcccugggugagcuucaaccagaaucuggaauaucagaucggauacauuuguucuggcaucuuuggggauaacccucgccccaaugacaagaccggauccugcggcccggucagcucuaacggggccaauggagugaagggcuucuccuuuaaauauggcaacgggguuuggauuggaagaacaaagagcaucuccucucggaacggcuucgagaugauuugggauccuaauggguggaccggaaccgacaacaaauuuagcaucaagcaagacaucgugggcauuaaugaaugguccggguacucuggcagcuucguccagcaucccgagcuuacaggacugaacuguauccgcccuugcuucuggguggaacucauuagaggccggcccaaagagaauacgaucuggaccuccgggagcucuauuuccuuuuguggaguuaacagcgauacagugggcuggucuuggcccgacggggcugagcugccuuucaccaucgauaaguga

SEQ ID NO: 212899 - RNA, 1410 nt, Artificial Sequence; identical to SEQ ID NO: 212329
  derived and/or modified CDS sequence (opt5) from neuraminidase__InfluenzaA__AEJ10503

SEQ ID NO: 212900 - RNA, 1410 nt, Artificial Sequence; identical to SEQ ID NO: 208810
  derived and/or modified CDS sequence (opt5) from neuraminidase__InfluenzaA__AEJ10523

SEQ ID NO: 212901 - RNA, 1410 nt, Artificial Sequence; identical to SEQ ID NO: 208810
  derived and/or modified CDS sequence (opt5) from neuraminidase__InfluenzaA__AEJ10533

SEQ ID NO: 212902 - RNA, 1410 nt, Artificial Sequence; identical to SEQ ID NO: 208810
  derived and/or modified CDS sequence (opt5) from neuraminidase__InfluenzaA__AEJ10543

SEQ ID NO: 212903 - RNA, 1410 nt, Artificial Sequence; identical to SEQ ID NO: 208810
  derived and/or modified CDS sequence (opt5) from neuraminidase__InfluenzaA__AEJ10553

SEQ ID NO: 212904 - RNA, 1410 nt, Artificial Sequence; identical to SEQ ID NO: 211085
  derived and/or modified CDS sequence (opt5) from neuraminidase__InfluenzaA__AEJ10563

SEQ ID NO: 212905 - RNA, 1410 nt, Artificial Sequence; identical to SEQ ID NO: 211085
  derived and/or modified CDS sequence (opt5) from neuraminidase__InfluenzaA__AEJ10573

SEQ ID NO: 212906 - RNA, 1410 nt, Artificial Sequence; identical to SEQ ID NO: 211085
  derived and/or modified CDS sequence (opt5) from neuraminidase__InfluenzaA__AEJ10583

SEQ ID NO: 212907 - RNA, 1410 nt, Artificial Sequence
  derived and/or modified CDS sequence (opt5) from neuraminidase__InfluenzaA__AEJ36305
augaaccccaaucagaagaucauuaccaucggcagcgugugcaugacaauugggauggccaaccugauccuccaaauuggaaauaucaucuccauuuggaucucucacagcauucagcugggcaaccagaaucagaucgagacguguaaccaauccgucauuaccuacgaaaauaacacauggguuaaucagaccuaugugaacaucucuaauacaaacuucgcugccgggcagagcguggucuccgugaaacuugcgggaaauucuagccugugcccuguuuccggcugggcuauuuacagcaaggacaacucuaucagaaucggguccaaaggagauguguuugucauucgggagccguucaucagcuguucuccccucgaaugccgcaccuuuuuccugacacagggcgcccuucugaaugacaagcauuccaacggcaccauuaaagauagaagcccuuaucggacgcucaugucuugucccaucggggaggugccuucccccuacaacagccgcuuugaauccguugccuggucugcuagcgccugccacgacggaauuaauuggcugaccaucggcaucuccgggccugauaacggagcuguggccguccugaaguauaauggcauuaucacagacaccauuaagagcuggagaaacaauauccuccggacacaagagucugagugugcgugcgugaacggguccuguuucaccgugaugacggauggaccgagcgacggccaggccucuuacaaaauuuuucgcaucgaaaagggcaaaaucgucaagagcguugagaugaaugcucccaacuaucauuacgaagagugcuccuguuacccugauucuagcgagauuacaugcgugugcagagacaauuggcacggguccaaccggcccugggugagcuucaaucagaaccuggaauaucagaucggauacauuuguucuggcaucuuuggggauaauccucgccccaacgacaaaaccggauccugcggcccggucagcucuaauggggccaacggagugaagggcuucuccuuuaaguauggcaacgggguuuggauuggaagaacaaaaagcaccuccucucggaauggcuucgagaugaucugggauccuaacggguggaccggaacagacaauagcuuuuccauuaagcaagacaucgugggcaucaacgaauggucuggguacagcggcuccuucguccagcaucccgagcuuacgggacuggauuguauucgcccuugcuucuggguggaacucaucagaggccggcccaaagagaauaccauuuggacaagcgggucuuccaucagcuuuuguggaguuaacucugacaccgugggcugguccuggcccgauggggcugagcugccuuucacaauugacaaguga

SEQ ID NO: 212908 - RNA, 1410 nt, Artificial Sequence; identical to SEQ ID NO: 208810
  derived and/or modified CDS sequence (opt5) from neuraminidase__InfluenzaA__AEJ37856

SEQ ID NO: 212909 - RNA, 1410 nt, Artificial Sequence; identical to SEQ ID NO: 208810
  derived and/or modified CDS sequence (opt5) from neuraminidase__InfluenzaA__AEJ37866

SEQ ID NO: 212910 - RNA, 1410 nt, Artificial Sequence; identical to SEQ ID NO: 208810
  derived and/or modified CDS sequence (opt5) from neuraminidase__InfluenzaA__AEJ37876

SEQ ID NO: 212911 - RNA, 1410 nt, Artificial Sequence; identical to SEQ ID NO: 212858
  derived and/or modified CDS sequence (opt5) from neuraminidase__InfluenzaA__AEJ37886

SEQ ID NO: 212912 - RNA, 1410 nt, Artificial Sequence
  derived and/or modified CDS sequence (opt5) from neuraminidase__InfluenzaA__AEJ37896
augaaccccaaucagaagaucauuaccaucggcagcgugugcauuacaaucgggauggccaaccugauucuccaaaucggaaauaucauuuccaucuggauuucucacagcauccagcugggcaaccagaaucagauugagacguguaaccaauccgucaucaccuacgaaaauaacacauggguuaaucagaccuaugugaacauuucuaauacaaacuucgcugccgggcagagcguggucuccgugaaacuugcgggaaauucuagccugugcccuguuuccggcugggcuaucuacagcaaggacaacucuaucagaauuggguccaaaggagauguguuugucauccgggagccguucauuagcuguucuccccucgaaugccgcaccuuuuuccugacacagggcgcccuucugaaugacaagcauuccaacggcaccaucaaagauagaagcccuuaucggacgcucaugucuugucccauuggggaggugccuucccccuacaacagccgcuuugaauccguugccuggucugcuagcgccugccacgacggaaucuccuggcugaccaucggcauuagcgggccugauaauggagcuguggccguccugaaguauaacggcaucauuacagacaccaucaagucuuggagaaauaacauucuccggacacaagaguccgagugugcgugcgugaaugggagcuguuucaccgugaugacggauggaccgucugacggccaggccagcuacaaaaucuuucgcaucgaaaagggcagaauugucaaauccguugagaugaacgcucccaauuaucauuacgaagagugcucuuguuacccugauagcuccgagaucacaugcgugugccgggacaacuggcacgggagcaaucgccccugggugucuuucaaccagaaucuggaauaucagauuggauacaucuguuccggcauuuuuggggauaacccuagacccaaugacaagaccggaagcugcggcccggucucuuccaacggggccaauggagugaaaggcuucagcuuuaaguauggcaacgggguuuggaucggacggacaaaguccauuucuagccgcaacggcuucgagaugaucugggauccuaauggguggaccggaaccgacaacaauuuuuccaucaaacaagacauugugggcaucaacgaauggucuggguacagcggcuccuucguccagcaucccgagcuuacaggacuggauuguauuagaccuugcuucuggguggaacucauccggggccgccccaaggagaauacgauuuggaccagcgggucuuccaucagcuuuuguggaguuaacucugacacagugggcugguccuggcccgauggggcugagcugccuuucaccaucgacaaauga

SEQ ID NO: 212913 - RNA, 1410 nt, Artificial Sequence; identical to SEQ ID NO: 212858
  derived and/or modified CDS sequence (opt5) from neuraminidase__InfluenzaA__AEJ37906

SEQ ID NO: 212914 - RNA, 1410 nt, Artificial Sequence; identical to SEQ ID NO: 212858
  derived and/or modified CDS sequence (opt5) from neuraminidase__InfluenzaA__AEJ37916

SEQ ID NO: 212915 - RNA, 1410 nt, Artificial Sequence; identical to SEQ ID NO: 212858
  derived and/or modified CDS sequence (opt5) from neuraminidase__InfluenzaA__AEJ37926

SEQ ID NO: 212916 - RNA, 1410 nt, Artificial Sequence; identical to SEQ ID NO: 210712
  derived and/or modified CDS sequence (opt5) from neuraminidase__InfluenzaA__AEJ37936

SEQ ID NO: 212917 - RNA, 1410 nt, Artificial Sequence; identical to SEQ ID NO: 208810
  derived and/or modified CDS sequence (opt5) from neuraminidase__InfluenzaA__AEJ37946

SEQ ID NO: 212918 - RNA, 1410 nt, Artificial Sequence; identical to SEQ ID NO: 212858
  derived and/or modified CDS sequence (opt5) from neuraminidase__InfluenzaA__AEJ37956

SEQ ID NO: 212919 - RNA, 1410 nt, Artificial Sequence; identical to SEQ ID NO: 212858
  derived and/or modified CDS sequence (opt5) from neuraminidase__InfluenzaA__AEJ37966

SEQ ID NO: 212920 - RNA, 1410 nt, Artificial Sequence; identical to SEQ ID NO: 208810
  derived and/or modified CDS sequence (opt5) from neuraminidase__InfluenzaA__AEJ37976

SEQ ID NO: 212921 - RNA, 1410 nt, Artificial Sequence; identical to SEQ ID NO: 212858
  derived and/or modified CDS sequence (opt5) from neuraminidase__InfluenzaA__AEJ37986

SEQ ID NO: 212922 - RNA, 1410 nt, Artificial Sequence; identical to SEQ ID NO: 211482
  derived and/or modified CDS sequence (opt5) from neuraminidase__InfluenzaA__AEK21372

SEQ ID NO: 212923 - RNA, 1413 nt, Artificial Sequence; identical to SEQ ID NO: 212276
  derived and/or modified CDS sequence (opt5) from neuraminidase__InfluenzaA__AEK21383

SEQ ID NO: 212924 - RNA, 1410 nt, Artificial Sequence; identical to SEQ ID NO: 210712
  derived and/or modified CDS sequence (opt5) from neuraminidase__InfluenzaA__AEK21399

SEQ ID NO: 212925 - RNA, 1410 nt, Artificial Sequence; identical to SEQ ID NO: 208810
  derived and/or modified CDS sequence (opt5) from neuraminidase__InfluenzaA__AEK21409

SEQ ID NO: 212926 - RNA, 1410 nt, Artificial Sequence; identical to SEQ ID NO: 212781
  derived and/or modified CDS sequence (opt5) from neuraminidase__InfluenzaA__AEK21419

SEQ ID NO: 212927 - RNA, 1410 nt, Artificial Sequence; identical to SEQ ID NO: 212858
  derived and/or modified CDS sequence (opt5) from neuraminidase__InfluenzaA__AEK21429

SEQ ID NO: 212928 - RNA, 1410 nt, Artificial Sequence
  derived and/or modified CDS sequence (opt5) from neuraminidase__InfluenzaA__AEK21439
augaaccccaaucagaagaucauuaccaucggcagcgugugcaugacaauugggauggccaaccugauccuccaaauuggaaauaucaucuccauuuggaucucucacagcauucagcugggcaaccagaaucagaucgagacguguaaccaauccgucauuaccuacgaaaauaacacauggguuaaucagaccuaugugaacaucucuaauacaaacuucgcugccgggcagagcguggucuccgugaaacuugcgggaaauucuagccugugcccuguuuccggcugggcuauuuacagcaaggacaacucuaucagaaucggguccaaaggagauguguuugucauucgggagccguucaucagcuguucuccccucgaaugccgcaccuuuuuccugacacagggcgcccuucugaaugacaagcauuccaacggcaccauuaaagauagaagcccuuaucggacgcucaugucuugucccaucggggaggugccuucccccuacaacagccgcuuugaauccguugccuggucugcuagcgccugccacgacggaauuaauuggcugaccaucggcaucuccgggccugauaacggagcuguggccguccugaaguauaauggcauuaucacagacaccauuaagagcuggagaaacaauauccuccggacacaagagucugagugugcgugcgugaacggguccuguuucaccgugaugacggauggaccgagcgacggccaggccucuuacaaaauuuuucgcaucgaaaagggcaaaaucgucaagagcguugagaugaaugcucccaacuaucauuacgaagagugcuccuguuacccugauucuagcgagauuacaugcgugugcagagacaauuggcacggguccaaccggcccugggugagcuucaaucagaaccuggaauaucagaucggauacauuuguucuggcaucuuuggggauaauccucgccccaacgacaaaaccggauccugcggcccggucagcucuaauggggccaacggagugaagggcuucuccuuuaaguauggcaacgggguuuggauuggaagaacaaaaagcaucuccucucggaauggcuucgagaugauuugggauccuaacggguggaccggaaccgacaauaacuuuagcaagaaacaagacaucgugggcaucaaugaaugguccggguacucuggcagcuucguccagcaucccgagcuuacaggacuggauuguauucgcccuugcuucuggguggaacucaucagaggccggcccaaggagaacacgauuuggaccuccgggagcucuaucuccuuuuguggaguuaauagcgacacagugggcuggucuuggcccgauggggcugagcugccuuucaccauugacaaauga

SEQ ID NO: 212929 - RNA, 1410 nt, Artificial Sequence; identical to SEQ ID NO: 212858
  derived and/or modified CDS sequence (opt5) from neuraminidase__InfluenzaA__AEK21449

SEQ ID NO: 212930 - RNA, 1410 nt, Artificial Sequence; identical to SEQ ID NO: 210712
  derived and/or modified CDS sequence (opt5) from neuraminidase__InfluenzaA__AEK21459

SEQ ID NO: 212931 - RNA, 1410 nt, Artificial Sequence; identical to SEQ ID NO: 212858
  derived and/or modified CDS sequence (opt5) from neuraminidase__InfluenzaA__AEK21469

SEQ ID NO: 212932 - RNA, 1410 nt, Artificial Sequence; identical to SEQ ID NO: 212858
  derived and/or modified CDS sequence (opt5) from neuraminidase__InfluenzaA__AEK21479

SEQ ID NO: 212933 - RNA, 1410 nt, Artificial Sequence; identical to SEQ ID NO: 208810
  derived and/or modified CDS sequence (opt5) from neuraminidase__InfluenzaA__AEK21489

SEQ ID NO: 212934 - RNA, 1410 nt, Artificial Sequence; identical to SEQ ID NO: 212526
  derived and/or modified CDS sequence (opt5) from neuraminidase__InfluenzaA__AEK28776

SEQ ID NO: 212935 - RNA, 1410 nt, Artificial Sequence
  derived and/or modified CDS sequence (opt5) from neuraminidase__InfluenzaA__AEK28787
augaaccccaaucagaagaucauuaccaucggcagcgugucccugacaauuucuacgaucugcuucuuuaugcaaauugccauccucaucaccacagucacccugcacuucaaacaguacgaguuuuauagcccuccgaacaaucagguuaugcuuugugaacccacaauuaucgagagaaacauuaccgaaaucguguaccugacaaauaccacgauugagaaggaaaucugcccuaaacucgcugaguaucggaacugguccaagccccagugugacauuaccggguucgccccuuuuucuaaagauaauagcauccgccuguccgcgggaggcgacaucugggugacaagagagcccuacgucucuugcgauccugacaaguguuaucaauucgcucuugggcagggaaccacacugaacaaugugcauagcaacaauaccguucgggaucgcacgccguacagaacacuccugaugaacgaacugggcgugcccuuucaccucgggaccaagcaggucugcauugccugguccucuagcuccugucaugacggaaaagccuggcugcacgugugcaucacaggcgaugacaagaaugcuaccgccagcuucauuuauaacggccggcuuguugauucuguggucuccuggagcaaagagauccugcgcacccaggaaucugagugugugugcauuaaugggacauguacgguggucaugaccgacggauccgcuagcggcaaggccgauacaaaaauccucuuuaucgaggaagggaagauuguucauaccuccacacugucuggaagcgcgcaacacguggaggaaugcuccugcuacccuagauaccccggcgugcggugugucugccgcgacaacuggaaggggagcaacagaccuaucguggauauuaauaucaaagaccacucuauuguuuccagcuauguguguucuggacuugucggcgacacgccccggaagaacgauagcuccucuagcucccauugccuggacccgaauaacgaggaaggcgggcacggagugaaaggcugggccuucgaugacgggaaugauguuuggaugggacgcaccaucaacgagacaagcagacucggcuacgagaccuuuaaggugaucgaaggguggucuaauccuaaauccaagcugcagauuaaccggcaggucaucguggaccgcggaaauagaagcggcuauucuggcauuuucuccgucgaggggcggagcuguaucaacagaugcuuuuacguggaacugauucgcggacggaaagaggaaaccgagguucucuggacauccaauucuaucguggucuucuguggcaccagcgggacauauggaacgggcuccuggcccgauggggcugaccugaaccuuaugccuauuuga

SEQ ID NO: 212936 - RNA, 1410 nt, Artificial Sequence
  derived and/or modified CDS sequence (opt5) from neuraminidase__InfluenzaA__AEK28798
augaaccccaaucagaagaucauuaccaucggcagcgugucccugacaauuucuacgaucugcuucuuuaugcaaauugccauccucaucaccacagucacccugcacuucaaacaguacgaguuuaacagcccuccgaauaaccagguuaugcuuugugaacccacaauuaucgagagaaauauuaccgaaaucguguaucugacaaacaccacgauugagaaggaaaucugcccuaaacucgcugaguaccggaauugguccaagccccagugugacauuaccggguucgccccuuuuucuaaagauaacagcauccgccuguccgcgggaggcgacaucugggugacaagagagcccuaugucucuugcgauccugacaaguguuaccaauucgcucuugggcagggaaccacacugaauaacgugcauagcaauaacaccguucgggaucgcacgccguauagaacacuccugaugaaugaacugggcgugcccuuucaccucgggaccaagcaggucugcauugccugguccucuagcuccugucaugacggaaaagccuggcugcacgugugcaucacaggcgaugacaagaacgcuaccgccagcuucauuuacaauggccggcuuguugauucuguggucuccuggagcaaagagauccugcgcacccaggaaucugagugugugugcauuaacgggacauguacgguggucaugaccgacggaaacgcuuccggcaaggccgauacaaaaauccucuuuaucgaggaagggaagauuguucauaccagcacacuguccggaucugcgcaacacguggaggaaugcagcugcuauccuagauaccccggcgugcggugugucugccgcgacaauuggaagggguccaacagaccuaucguggauauuaauaucaaagaccacagcauuguuucuuccuacguguguagcggacuugucggcgacacgccccggaagaacgauucuagcuccucuagccauugcuccgacccgaauaacgaggaaggcgggcacggagugaaaggcugggccuucgaugacgggaaugauguuuggaugggacgcaccaucagcgagaagucuagacugggcuaugagacauuuaaagugaucgaagggugguccaacccuaagagcaaacuccagauuaaucggcaggucaucguggaccgcggaaacagaucuggcuacuccggcauuuucagcgucgaggggaaguccuguaucaaucggugcuuuuauguggaacugauuagaggacgcaaggaggaaaccgagguucuguggaccucuaacagcaucguggucuucuguggcacauccgggaccuacggaacaggcucuuggcccgauggggcugacauuaaucucaugccuaucuga

SEQ ID NO: 212937 - RNA, 1410 nt, Artificial Sequence
  derived and/or modified CDS sequence (opt5) from neuraminidase__InfluenzaA__AEK28809
augaaccccaaucagaagaucauuaccaucggcagcgugucccugacaauuucuacgaucugcuucuuuaugcaaauugccauccucaucaccacagucaccguucacuucaaacaguacgaguuuaacagcccuccgaauaaccaggugaugcugugugaacccacaauuaucgagagaaauauuaccgaaaucguguaucuuacaaacaccacgauugagaaggaaaucugcccuaaacuggcugaguaccggaauugguccaagccccagugugacauuaccggguucgccccuuuuucuaaagauaacagcauccgccucuccgcgggaggcgacaucugggucacaagagagcccuaugugucuugcgauccugacaaguguuaccaauucgcucuggggcagggaaccacacuuaauaacguucauagcaauaacaaggugcgggaucgcaccccguauagaacgcugcucaugaaugaacugggcguccccuuucaccuggggacaaaacaggugugcauugccugguccucuagcuccugucaugacggaaaggccuggcuccacguuugcaucaccggcgaugacaaaaacgcuacagccagcuucauuuacaauggccggcugguggauucugucguguccuggagcaaggagauccuucgcacccaggaaucugagugugugugcauuaacgggaccuguacagucguuaugacggacggauccgcuagcggcaaagccgauaccaagauccuguuuaucgaggaagggaagauugugcauacauccacccucucuggaagcgcgcaacacguggaggaaugcuccugcuauccuagauaccccggcguccggugugugugccgcgacaacuggaaagggagcaauagaccuaucguugauauuaacaucaaggaccacucuauuguguccagcuacgucuguucuggacuggugggcgacacaccccggaaaaaugauagcuccucuagcucccauugccuugacccgaacaaugaggaaggcgggcacggaguuaagggcugggccuucgaugacgggaacgauguguggaugggacgcaccaucagcgagaaaucuagacugggcuaugagacguuuaaggucaucgaagggugguccaauccuaaaagcaagcuccagauuaaccgccaggugaucgucgaccggggaaauagaucuggcuacuccggcauuuucagcguggaggggaaguccuguaucaaccggugcuuuuauguugaacugauuagaggacgcaaagaggaaacagaggugcuguggaccucuaauagcaucgucguguucuguggcaccuccgggacauacggaaccggcucuuggcccgauggggcugacauuaaccucaugccuaucuga

SEQ ID NO: 212938 - RNA, 1410 nt, Artificial Sequence
  derived and/or modified CDS sequence (opt5) from neuraminidase__InfluenzaA__AEK28819
augaaccccaaucagaagaucauuaccaucggcagcgugucccugacaauuucuacgaucugcuucuuuaugcaaauugccauccucaucaccacagucacccugcacuucaaacaguacgaguuuaacuauccuccgaauaaccagguuaugcuuugugaacccacaauuaucgagagaaauauuaccgaaaucguguaccugacaaacaccacgauugagaaggaaaucugcccuaaacucgcugaguaucggaauuggagcaagccccagugugacauuaccggguucgccccuuuuuccaaagauaacucuauccgccugagcgcgggaggcgacaucugggugacaagagagcccuacgucuccugcgauccugacaaguguuaucaauucgcucuugggcagggaaccacacugaauaacgugcauucuaauaacaccguucgggaacgcacgccguacagaacacuccugaugaaugagcugggcgugcccuuucaccucgggaccaagcaggucugcauugccuggagcuccagcucuugucaugauggaaaagccuggcugcacgugugcaucacaggcgacgauaagaacgcuaccgccuccuucauuuauaauggccggcuuguugacagcguggucucuugguccaaagaaauccugcgcacccaggagagcgagugugugugcauuaacgggacauguacgguggucaugaccgauggaucugcuuccggcaaggccgacacaaaaauccucuuuaucgaagaggggaagauuguucauaccagcacacuguccggaucugcgcaacacguggaagagugcagcugcuacccuagauaccccggcgugcggugugucugccgcgauaacuggaagggguccaauagaccuaucguggacauuaacaucaaagaucacagcauuguuucuuccuauguguguagcggacuugucggcgacacgccccggaagaaugacucuagcuccucuagccauugccuggauccgaacaaugaagagggcgggcacggagugaaaggcugggccuucgacgaugggaacgacguuuggaugggacgcaccaucuccgaaaagagcagacucggcuacgagacauuuaaagugaucgagggguggucuaauccuaaguccaaacugcagauuaaccggcaggucaucguggaucgcggaaauagaagcggcuauucuggcauuuucuccgucgaaggaaagagcuguaucaaccggugcuuuuacguggagcugauuagagggcgcaaggaagagaccgagguucucuggaccuccaauucuaucguggucuucuguggcacaagcgggaccuauggaacaggcuccuggcccgacggggcugauauuaaccugaugccuaucuga

SEQ ID NO: 212939 - RNA, 1410 nt, Artificial Sequence
  derived and/or modified CDS sequence (opt5) from neuraminidase__InfluenzaA__AEK28830
augaaccccaaucagaagaucauuaccaucggcagcgugucccugacaauuucuacgaucugcuucuuuaugcaaauugccauccucaucaccacagucacccugcacuucaaacaguacgaguuuaacagcccuccgaauaaccagguuaugcuuugugaacccacaauuaucgagagaaauauuaccgaaaucguguaucugacaaacaccacgauugagaaggaaaucugcccuaaucucgcugaguaccggaacugguccaaaccccagugugacauuaccggguucgccccuuuuucuaaggauaauagcauccgccuguccgcgggaggcgacaucugggugacaagagagcccuaugucucuugcgauccugacaaauguuaccaauucgcucuugggcagggaaccacacugaacaaugugcauagcaacaauaccguucggggccgcacgccguauagaacacuccugaugaacgaacugggggugcccuuucaccucggaaccaagcaggucugcauugccugguccucuagcuccugucaugauggcaaggccuggcugcacgugugcaucacaggcgacgauaaaaaugcuaccgccagcuucauuuacaacgggcggcuuguugacucuguggucuccuggagcaaggagauccugcgcacccaggaaucugagugugugugcauuaacggaacauguacgguggucaugaccgauggcuccgcuagcgggaaagccgacacaaagauccucuuuaucgaggaaggaaaaauuguucauaccuccacacugucuggcagcgcgcaacacguggaggaaugcuccugcuauccuagauaccccggggugcggugugucugccgcgauaauuggaagggaagcaacagaccuaucguggacauuaauaucaaggaucacucuauuguuuccagcuacguguguucuggccuugucggcgacacgccccggaaaaacgacagcuccucuagcucccauugccuggauccgaauaacgaggaagggggacacggcgugaaggggugggccuucgacgauggaaaugacguuuggaugggccgcaccaucagcgagaaaucuagacucggguaugagacauuuaaggugaucgaaggaugguccaacccuaaaagcaagcugcagauuaaucggcaggucaucguggaucgcggcaacagaucuggcuacuccgggauuuucagcgucgagggaaaauccuguaucaaucggugcuuuuauguggaacugauuagaggccgcaaggaggaaaccgagguucucuggaccucuaacagcaucguggucuucugugggacauccggaaccuacggcacagggucuuggcccgacggcgcugauauuaaucugaugccuaucuga

SEQ ID NO: 212940 - RNA, 1410 nt, Artificial Sequence
  derived and/or modified CDS sequence (opt5) from neuraminidase__InfluenzaA__AEK28841
augaaccccaaucagaagaucauuaccaucggcagcgugucccugacaauuucuacgaucugcuucuuuaugcaaauugccauccucaucaccacagucacccugcacuucaaacaguacgaguuuaacagcccuccgaauaaccagguuaugcuuugugaacccacaauuaucgagagaaauauuaccgaaaucguguaucugacaaacaccacgauugagaaggaaaucugcccuaaacucgcugaguaccggaauugguccaagccccagugugacauuaccggguucgccccuuuuucuaaagauaacagcauccgccuguccgcgggaggcgacaucugggugacaagagagcccuaugucucuugcgauccugacaaguguuaccaauucgcucuugggcagggaaccacagugaauaacguucauagcaauaacaccgugcggggccgcacgccguauagaacacugcucaugaaugaacuggggguccccuuucaccugggaaccaaacaggugugcauugccugguccucuagcuccugucaugauggcaaggccuggcuccacguuugcaucacaggcgacgauaagaacgcuaccgccagcuucauuuacaaugggcggcugguggacucugucguguccuggagcaaagagauccuucgcacccaggaaucugagugugugugcauuaacggaacauguacggucguuaugaccgauggcuccgcuagcgggaaggccgacacaaaaauccuguuuaucgaggaaggaaagauugugcauaccuccacacucucuggcagcgcgcaacacguggaggaaugcuccugcuauccuagauaccccgggguccggugugugugccgcgauaacuggaagggaagcaauagaccuaucguugacauuaacaucaaagaucacucuauuguguccagcuacgucuguucuggccuggugggcgacacgccccggaagaaugacagcuccucuagcucccauugccuugauccgaacaaugaggaagggggacacggcguuaaagggugggccuucgacgauggaaacgacguguggaugggccgcaccaucagcgagaagucuagacugggguaugagacauuuaaagucaucgaaggaugguccaaucauaagagcaaacuccagauuaaccgccaggugaucgucgaucggggcaauagaucuggcuacuccgggauuuucagcguggagggaaaguccuguaucaaccggugcuuuuauguugaacugauuagaggccgcaaggaggaaaccgaggugcuguggaccucuaauagcaucgucguguucugugggacauccggaaccuacggcacagggucuuggccugacggcgcugaucucaaccugaugcccauuuga

SEQ ID NO: 212941 - RNA, 1410 nt, Artificial Sequence
  derived and/or modified CDS sequence (opt5) from neuraminidase__InfluenzaA__AEK28852
augaaccccaaucagaagaucauuaccaucggcagcgugucccugacaauuucuacgaucugcuucuuuaugcaaauugccauccucaucaccacagucacccugcacuucaaacaguacgaguuuaacagcccuccgaauaaccagguuaugcuuugugaacccacaauuaucgagaagaauauuaccgaaaucguguaucugacaaacaccacgauugagaaagaaaucugcccuaagcucgcugaguacagaaauugguccaaaccccagugugacauuaccggguucgccccuuuuucuaaggauaacagcauccggcuguccgcgggaggcgacaucugggugacacgcgagcccuaugucucuugcgauccugacaaguguuaccaauucgcucuugggcagggaaccacacugaauaacgugcauagcaauaacagaguucgggaucgcaccccguauagaacgcuccugaugaaugaacugggcgugcccuuucaccucgggacaaaacaggucugcauugccugguccucuagcuccugucaugacggaaaggccuggcugcacgugugcaucaccggcgaugacaaaaacgcuacagccagcuucauuuacaauggccggcuuguugauucuguggucuccuggagcaaggagauccugcgcacccaggaaucugagugugugugcauuaacgggaccuguacaguggucaugacggacggauccgcuagcggcaaagccgauaccaagauccucuuuaucgaggaagggaagauuguucauacauccacccugucuggaagcgcgcaacacguggaggaaugcuccugcuauccuagauaccccggcgugcggugugucugccgcgacaacuggaaagggagcaauagaccuaucguggauauuaacaucaaggaccacucuauuguuuccagcuacguguguucuggacuugucggcgacacaccccggaaaaaugauagcuccucuagcucccauugccuggacccgaacaaugaggaaggcgggcacggagugaagggcugggccuucgaugacgggaacgauguuuggaugggacgcaccaucagcgagaaaucuagacucggcuaugagacguuuaaggugaucgaagggugguccaauccuaaaagcaagcugcagauuaaccggcaggucaucguggaccgcggaaauagaucuggcuacuccggcauuuucagcgucgaggggaaguccuguaucaaccggugcuuuuauguggaacugauuagaggacgcaaagaggaaacagagguucucuggaccucuaauagcaucguggucuucuguggcaccuccgggacauacggaaccggcucuuggcccgauggggcugacauuaaccugaugccuaucuga

SEQ ID NO: 212942 - RNA, 1410 nt, Artificial Sequence; identical to SEQ ID NO: 210556
  derived and/or modified CDS sequence (opt5) from neuraminidase__InfluenzaA__AEK28863

SEQ ID NO: 212943 - RNA, 1410 nt, Artificial Sequence
  derived and/or modified CDS sequence (opt5) from neuraminidase__InfluenzaA__AEK28874
augaaccccaaucagaagaucauuaccaucggcagcgugucccugacaauuucuacgaucugcuucuuuaugcaaauugccauccucaucaccacagucacccugcacuucaaacaguacgaguuuaacagcccuccgaauaaccagguuaugcuuugugaacccacaauuaucgagagaaauauuaccgaaaucguguaucugacaaacaccacgauugagaaggaaaucugcccuaaacucgcugaguaccggaauugguccaagccccagugugacauuaccggguucgccccuuuuucuaaagauaacagcauccgccuguccgcgggaggcgacaucugggugacaagagagcccuaugucucuugcgauccugacaaguguuaccaauucgcucuugggcagggaaccacacugaauaacgugcauagcaauaacaagguucgggaucgcaccccguauagaacgcuccugaugaaugaacugggcgugcccuuucaccucgggacaaaacaggucugcauugccugguccucuagcuccugucaugacggaaaggccuggcugcacgugugcaucaccggcgaugacaaaaacgcuacagccagcuucauuuacaauggccggcuuguugauucuguggucuccuggagcaaggagauccugcgcacccaggaaucugagugugugugcauuaacgggaccuguacaguggucaugacggacggauccgcuagcggcaaagccgauaccaagauccucuuuaucgaggaagggaagauuguucauacauccacccugucuggaagcgcgcaacacguggaggaaugcuccugcuauccuagauaccccggcgugcggugugucugccgcgacaacuggaaagggagcaauagaccuaucguggauauuaacaucaaggaccacucuauuguuuccagcuacguguguucuggacuugucggcgacacaccccggaaaaaugauagcuccucuagcucccauugccuggacccgaacaaugaggaaggcgggcacggagugaagggcugggccuucgaugacgggaacgauguuuggaugggacgcaccaucagcgagaaaucuagacucggcuaugagacguuuaaggugaucgaagggugguccaaucauaaaagcaagcugcagauuaaccggcaggucaucguggaccgcggaaauagaucuggcuacuccggcauuuucagcgucgaggggaaguccuguaucaaccggugcuuuuauguggaacugauuagaggacgcaaagaggaaacagagguucucuggaccucuaauagcaucguggucuucuguggcaccuccgggacauacggaaccggcucuuggccugauggggcugaccugaaccuuaugcccauuuga

SEQ ID NO: 212944 - RNA, 1410 nt, Artificial Sequence
  derived and/or modified CDS sequence (opt5) from neuraminidase__InfluenzaA__AEK28885
augaaccccaaucagaagaucauuaccaucggcagcgugucccugacaauuucuacgaucugcuucuuuaugcaaauugccauccucaucaccacagucacccugcacuucaaacaguacgaguuuaaccuuccuccgaauaaccagguuaugcugugugaacccacaauuaucgagagaaauauuaccgaaaucguguaucucacaaacaccacgauugagaaggaaaucugcccuaaacuggcugaguaccggaauuggagcaagccccagugugacauuaccggguucgccccuuuuuccaaagauaacucuauccgccuuagcgcgggaggcgacaucugggugacaagagagcccuaugucuccugcgauccugacaaguguuaccaauucgcucuggggcagggaaccacacucaauaacgugcauucuaauaacaccguucgggaucgcacgccguauagaacacugcugaugaaugaacucggcgugcccuuucaccuggggaccaagcaggucugcauugccuggagcuccagcucuugucaugacggaaaagccuggcuucacgugugcaucacaggcgaugacaagaacgcuaccgccuccuucauuuacaauggccggcugguugauagcguggucucuugguccaaagagauccuccgcacccaggaaagcgagugugugugcauuaacgggacauguacgguggucaugaccgacggaucugcuuccggcaaggccgauacaaaaauccuguuuaucgaggaagggaagauuguucauaccagcacacuuuccggaucugcgcaacacguggaggaaugcagcugcuauccuagauaccccggcgugcggugugucugccgcgacaacuggaagggguccaauagaccuaucguggauauuaacaucaaagaccacagcauuguuucuuccuacguguguagcggacuggucggcgacacgccccggaagaaugauucuagcuccucuagccauugccucgacccgaacaaugaggaaggcgggcacggagugaaaggcugggccuucgaugacgggaacgauguuuggaugggacgcaccaucuccgaaaagagcagacugggcuaugagacauuuaaagugaucgagggguggucuaauccuaaguccaaacugcagauuaaccggcaggucaucguggaccgcggaaauagaagcggcuacucuggcauuuucuccgucgagggaaagagcuguaucaaccggugcuuuuauguggaacucauuagagggcgcaaggaggaaaccgagguucuguggaccuccaauucuaucguggucuucuguggcacaagcgggaccuacggaacaggcuccuggcccgauggggcugacauuaaccuuaugccuaucuga

SEQ ID NO: 212945 - RNA, 1410 nt, Artificial Sequence; identical to SEQ ID NO: 210681
  derived and/or modified CDS sequence (opt5) from neuraminidase__InfluenzaA__AEK28896

SEQ ID NO: 212946 - RNA, 1410 nt, Artificial Sequence
  derived and/or modified CDS sequence (opt5) from neuraminidase__InfluenzaA__AEK28907
augaaccccaaucagaagaucauuaccaucggcagcgugucccugacaauuucuacgaucugcuucuuuaugcaaauugccauccucaucaccacagucacccugcacuucaaacaguacgaguuuaacagcccuccgaauaaccagguuaugcuuugugaacccacaauuaucgagaagaauauuaccgaaaucguguaucugacaaacaccacgauugagaaagaaaucugcccuagacucgcugaguaccggaauugguccaagccccagugugacauuaccggguucgccccuuuuucuaaagauaacagcauccgccuguccgcgggaggcgacaucugggugacaagagagcccuaugucucuugcgauccugacaaguguuaccaauucgcucuugggcagggaaccacacugaauaacgugcauagcaauaacaccguucgggaucgcacgccguauagaacacuccugaugaaugaacugggcgugcccuuucaccucgggaccaagcaggucugcauugccugguccucuagcuccugucaugacggaaaagccuggcugcacgugugcaucacaggcgaugacaagaacgcuaccgccagcuucauuuacaauggccggcuuguugauucuguggucuccuggagcaaagagauccugcgcacccaggaaucugagugugugugcauuaacgggacauguacgguggucaugaccgacggauccgcuagcggcaaggccgauacaaaaauccucuuuaucgaggaagggaagauuguucauaccuccacacugucuggaagcgcgcaacacguggaggaaugcuccugcuauccuagauaccccggcgugcggugugucugccgcgacaacuggaaggggagcaauagaccuaucguggauauuaacaucaaagaccacucuauuguuuccagcuacguguguucuggacuugucggcgacacgccccggaagaaugauagcuccucuagcucccauugccuggacccgaacaaugaggaaggcgggcacggagugaaaggcugggccuucgaugacgggaacgauguuuggaugggacgcaccaucagcgagaagucuagacucggcuaugagacauuuaaagugaucgaagggugguccaauccuaagagcaaacugcagauuaaccggcaggucaucguggaccgcggaaauagaucuggcuacuccggcauuuucagcgucgaggggaaguccuguaucaaccggugcuuuuauguggaacugauuagaggacgcaaggaggaaaccgagguucucuggaccucuaauagcaucguggucuucuguggcacauccgggaccuacggaacaggcucuuggcccgauggggcugacauuaaccugaugccuaucuga

SEQ ID NO: 212947 - RNA, 1410 nt, Artificial Sequence; identical to SEQ ID NO: 208671
  derived and/or modified CDS sequence (opt5) from neuraminidase__InfluenzaA__AEK28918

SEQ ID NO: 212948 - RNA, 1410 nt, Artificial Sequence; identical to SEQ ID NO: 209977
  derived and/or modified CDS sequence (opt5) from neuraminidase__InfluenzaA__AEK28929

SEQ ID NO: 212949 - RNA, 1410 nt, Artificial Sequence
  derived and/or modified CDS sequence (opt5) from neuraminidase__InfluenzaA__AEK28951
augaaccccaaucagaagaucauuaccaucggcagcgugucccugacaauuucuacgaucugcuucuuuaugcaaauugccauccucaucaccacagucacccugcacuucaaacaguacgaguuuaacagcccuccgaauaaccagguuaugcuuugugaacccacaauuaucgagagaaauauuaccgaaaucguguaucugacaaacaccacgauugagaaggaaaucugcccuaaacucgcugaguaccggaauugguccaagccccagugugacauuaccggguucgccccuuuuucuaaagauaacagcauccgccuguccgcgggaggcgacaucugggugacaagagagcccuaugucucuugcgauccugacaaguguuaccaauucgcucuugggcagggaaccacacugaauaacgugcauagcaauaacaccguucgggaucgcacgccguauagaacacuccugaugaaugaacugggcgugcccuuucaccucgggaccaagcaggucugcauugccugguccucuagcuccugucaugacggaaaagccuggcugcacgugugcaucacaggcgaugacaagaacgcuaccgccagcuucauuuacaauggccggcuuguugauucuguggucuccuggagcaaagagauccugcgcacccaggaaucugagugugugugcauuaacgggacauguacgguggucaugaccgacggauccgcuagcggcaaggccgauacaaaaauccucuuuaucgaggaagggaagauuguucauaccuccacacugucuggaagcgcgcaacacguggaggaaugcuccugcuauccuagauaccccggcgugcggugugucugccgcgacaacuggaaggggagcaauagaccuaucguggauauuaacaucaaagaccacucuauuguuuccagcuacguguguucuggacuugucggcgacacgccccggaagaaugauagcuccucuagcucccauugccuggacccgaacaaugaggaaggcgggcacggagugaaaggcugggccuucgaugacgggaacgauguuuggaugggacgcaccaucagcgagaagucuagauccggcuaugagacauuuaaagugaucgaaggguggagcaaucauaagucuaaacuccagauuaaccggcaggucaucguggaccgcggaaauagauccggcuacagcggcauuuucuccgucgaggggaagucuuguaucaaccggugcuuuuauguggaacugauuagaggacgcaaggaggaaaccgaggcucuguggaccagcaauuccaucguuguguucuguggcacaucugggaccuacggaacaggcagcuggccugauggggccgaccucaaccugaugcccauuuga

SEQ ID NO: 212950 - RNA, 1410 nt, Artificial Sequence
  derived and/or modified CDS sequence (opt5) from neuraminidase__InfluenzaA__AEK28962
augaaccccaaucagaagaucauuaccaucggcagcgugucccugacaauuucuacgaucugcuucuuuaugcaaauugccauccucaucaccacagucacccugcacuucaaacaguacgaguuuaacagcccuccgaauaaccagguuaugcuuugugaacccacaauuaucgagagaaauauuaccgaaaucguguauccuacaaacaccacgauugagaaggaaaucugccccaaacuggcugaguaccggaauugguccaagccucagugugacauuaccggguucgcccccuuuucuaaagauaacagcauccgccucuccgcgggaggcgacaucugggugacaagagagccuuaugucucuugcgauccggacaaguguuaccaauucgcucuggggcagggaaccacacuuaauaacgugcauagcaauaacaccguucgggaucgcacgcccuauagaacacugcucaugaaugaacugggcgugccuuuucaccuggggaccaagcaggucugcauugccugguccucuagcuccugucaugacggaaaagccuggcuccacgugugcaucacaggcgaugacaagaacgcuaccgccagcuucauuuacaauggccggcugguugauucuguggucuccuggagcaaagagauccuucgcacccaggaaucugagugugugugcauuaacgggacauguacgguggucaugaccgacggauccgcuagcggcaaggccgauacaaaaauccuguuuaucgaggaagggaagauuguucauaccuccacacucucuggaagcgcgcaacacguggaggaaugcuccugcuaucccagauacccuggcgugcggugugucugccgcgacaacuggaaggggagcaauagacccaucguggauauuaacaucaaagaccacucuauuguuuccagcuacguguguucuggacuggucggcgacaccccgcggaagaaugauagcuccucuagcucccauugccuugacccuaacaaugaggaaggcgggcacggagugaaaggcugggccuucgaugacgggaacgauguuuggaugggacgcacgaucagcgagaagucuagacugggcuaugagacauuuaaagugaucgaagggugguccaaucccaagagcaaacuccagauuaaccggcaggucaucguggaccgcggaaauagaucuggcuacuccggcauuuucagcgucgaggggaaguccuguaucaaccggugcuuuuauguggaacugauuagaggacgcaaggaggaaaccgagguucuguggaccucuaauagcaucguggucuucuguggcacauccgggaccuacggaacaggcucuuggccugauggggcugacauuaaccucaugcccaucuga

SEQ ID NO: 212951 - RNA, 1410 nt, Artificial Sequence
  derived and/or modified CDS sequence (opt5) from neuraminidase__InfluenzaA__AEK28973
augaaccccaaucagaagaucauuaccaucggcagcgugucccugacaauuucuacgaucugcuucuuuaugcaaauugccauccucaucaccacagucacccugcacuucaaacaguacgaguuuaacagcccuccgaauaaccagguuaugcuuugugaacccacaauuaucgagagaaauauuaccgaaaucguguaucugacaaacaccacgauugagaaggaaaucugcccuaaacucgcugaguaccggaauugguccaagccccagugugacauuaccggguucgccccuuuuucuaaagauaacagcauccgccuguccgcgggaggcgacaucugggugacaagagagcccuaugucucuugcgauccugacaaguguuaccaauucgcucuugggcagggaaccacacugaauaacgugcauagcaauaacaccguucgggaucgcacgccguauagaacacuccugaugaaugaacugggcgugcccuuucaccucgggaccaagcaggucugcauugccugguccucuagcuccugucaugacggaaaagccuggcugcacgugugcaucacaggcgaugacaagaacgcuaccgccagcuucauuuacaauggccggcuuguugauucuguggucuccuggagcaaagagauccugcgcacccaggaaucugagugugugugcauuaacgggacauguacgguggucaugaccgacggauccgcuagcggcaaggccgauacaaaaauccucuuuaucgaggaagggaagauuguucauaccuccacacugucuggaagcgcgcaacacguggaggaaugcuccugcuauccuagauaccccggcgugcggugugucugccgcgacaacuggaaggggagcaauagaccuaucguggauauuaacaucaaagaccacucuauuguuuccagcuacguguguucuggacuugucggcgacacgccccggaagaaugauagcuccucuagcucccauugccuggacccgaacaaugaggaaggcgggcacggagugaaaggcugggccuucgaugacgggaacgauguuuggaugggacgcaccaucagcgagaagucuagacucggcuaugagacauuuaaagugaucgaagggugguccaaucauaagagcaaacugcagauuaaccggcaggucaucguggaccgcggaaauagaucuggcuacuccggcauuuucagcgucgaggggaaguccuguaucaaccggugcuuuuauguggaacugauuagaggacgcaaggaggaaaccgagguucucuggaccucuaauagcaucguggucuucuguggcacauccgggaccuacggaacaggcucuuggccugauggggcugaccugaacuucaugcccauuuga

SEQ ID NO: 212952 - RNA, 1410 nt, Artificial Sequence
  derived and/or modified CDS sequence (opt5) from neuraminidase__InfluenzaA__AEK28984
augaaccccaaucagaagaucauuaccaucggcagcgugucccugacaauuucuacgaucugcuucuuuaugcaaauugccauccucaucaccacagucacccugcacuucaaacaguacgaguuuaacagcccuccgaauaaccagguuaugcuuugugaacccacaauuaucgagagaaauauuaccgaaaucguguaucugacaaacaccacgauugagaaggaaaucugcccuaaacucgcugaguaccggaauugguccaagccccagugugacauuaccggguucgccccuuuuucuaaagauaacagcgugcgccuguccgcgggaggcgacaucugggucacaagagagcccuaugugucuugcgauccugacaaguguuaccaauucgcucuugggcagggaaccacacugaauaacguucauagcaauaacaccgugcgggaucgcacgccguauagaacacuccugaugaaugaacugggcguccccuuucaccucgggaccaaacaggugugcaucgccugguccucuagcuccugucaugacggaaaggccuggcugcacguuugcauuacaggcgaugacaagaacgcuaccgccagcuucaucuacaauggccggcuuguggauucugucguguccuggagcaaagagauucugcgcacccaggaaucugagugugugugcaucaacgggacauguacggucguuaugaccgacggauccgcuagcggcaaggccgauacaaaaauucucuuuaucgaggaagggaagaucgugcauaccuccacacugucuggaagcgcgcaacacguggaggaaugcuccugcuauccuagauaccccggcguccggugugugugccgcgacaacuggaaggggagcaauagaccuauuguugauaucaacauuaaagaccacucuaucguguccagcuacgucuguucuggacuugugggcgacacgccccggaagaaugauagcuccucuagcucccauugccuggacccgaacaaugaggaaggcgggcacggaguuaaaggcugggccuucgaugacgggaacgauguguggaugggacgcaccauuagcgagaagucuagacucggcuaugagacauuuaaagucaucgaagggugguccaauccuaagagcaaacugcagaucaaccgccaggugauugucgaccggggaaauagaucuggcuacuccggcaucuucagcguggaggggaaguccuguauuaaccggugcuuuuauguugaacugaucagaggacgcaaggaggaaaccgaggugcucuggaccucuaauagcauugucguguucuguggcacauccgggaccuacggaacaggcucuuggcccgauggggcugacaucaaccugaugccuauuuga

SEQ ID NO: 212953 - RNA, 1410 nt, Artificial Sequence; identical to SEQ ID NO: 212952
  derived and/or modified CDS sequence (opt5) from neuraminidase__InfluenzaA__AEK28995

SEQ ID NO: 212954 - RNA, 1410 nt, Artificial Sequence; identical to SEQ ID NO: 211590
  derived and/or modified CDS sequence (opt5) from neuraminidase__InfluenzaA__AEK29006

SEQ ID NO: 212955 - RNA, 1410 nt, Artificial Sequence
  derived and/or modified CDS sequence (opt5) from neuraminidase__InfluenzaA__AEK29028
augaaccccaaucagaagaucauuaccaucggcagcgugucccugacaauuucuacgaucugcuucuuuaugcaaauugccauccucaucaccacagucacccugcacuucaaacaguacgaguuuaacagcccuccgaauaaccagguuaugcuuugugaacccacaauuaucgagagaaauauuaccgaaaucguguaucugacaaacaccacgauugagaaggaaaucugcccuaaacucgcugaguaccggaauugguccaagccccagugugacauuaccggguucgccccuuuuucuaaagauaacagcauccgccuguccgcgggaggcgacaucugggugacaagagagcccuaugucucuugcgauccuaauaaguguuaccaauucgcucuugggcagggaaccacacugaacaaugugcauagcaacaauaccguucgggaccgcacgccguauagaacacuccugaugaacgaacugggcgugcccuuucaccucgggaccaagcaggucugcauugccugguccucuagcuccugucaugauggaaaagccuggcugcacgugugcaucacaggcgacgauaagaaugcuaccgccagcuucauuuacaacggccggcuuguugacucuguggucuccuggagcaaagagauccugcgcacccaggaaucugagugugugugcauuaacgggacauguacgguggucaugaccgauggauccgcuagcggcaaggccgacacaaaaauccucuuuaucgaggaagggaagauuguucauaccuccacacugucuggaagcgcgcaacacguggaggaaugcuccugcuauccuagauaccccggcgugcggugugucugccgcgauaauuggaaggggagcaacagaccuaucguggacauuaauaugaaagaucacucuaucguuuccagcuacguguguucuggacuugucggcgacacgccccggaagaacgacagcuccucuagcucccauugcuucgauccgaaugacgaggaaggcgggcacggagugaaaggcugggccuuugaugacgggaacgauguuuggaugggacgcaccauuagcgagaagucuagacugggcuaugagacauucaaagugaucgaagggugguccaauccuaagagcaaacuccagaucaaccggcaggucauuguggaccgcggaaauagaucuggcuacuccggcaucuuuagcgucgaggggaaguccuguauuaaccggugcuucuauguggaacugaucagaggacgcaaggaggaaaccgagguucuguggaccucuaauagcauuguggucuucuguggcacauccgggaccuacggaacaggcucuuggcccgauggggcugacaucaaccucaugccuauuuga

SEQ ID NO: 212956 - RNA, 1410 nt, Artificial Sequence
  derived and/or modified CDS sequence (opt5) from neuraminidase__InfluenzaA__AEK29050
augaaccccaaucagaagaucauuaccaucggcagcgugucccugacaauuucuacgaucugcuucuuuaugcaaauugccauccucaucaccacagucacccugcacuucaaacaguacgaguuuaacccuccgcccaauaaccagguuaugcuuugugaaccuacaauuaucgagagaaauauuaccgaaaucguguaucugacaaacaccacgauugagaaggaaaucugccccaaacucgcugaguaccggaauuggagcaagccucagugugacauuaccggguucgcccccuuuuccaaagauaacucuauccgccugagcgcgggaggcgacaucugggugacaagagagccuuaugucuccugcgauccggacaaguguuaccaauucgcucuugggcagggaaccacacugaauaacgugcauucuaauaacaccguucgggaucgcacgcccuauagaacacuccugaugaaugaacugggcgugccuuuucaccucgggaccaagcaggucugcauugccuggagcuccagcucuugucaugacggaaaagccuggcugcacgugugcaucacaggcgaugacaagaacgcuaccgccuccuucauuuacaauggccggcuuguugauagcguggucucuugguccaaagagauccugcgcacccaggaaagcgagugugugugcauuaacgggacauguacgguggucaugaccgacggaucugcuuccggcaaggccgauacaaaaauccucuuuaucgaggaagggaagauuguucauaccagcacacuguccggaucugcgcaacacguggaggaaugcagcugcuaucccagauacccuggcgugcggugugucugccgcgacaacuggaagggguccaauagacccaucguggauauuaacaucaaagaccacagcauuguuucuuccuacguguguagcggacuugucggcgacaccccgcggaagaaugauucuagcuccucuagccauugccuggacccuaacaaugaggaaggcgggcacggagugaaaggcugggccuucgaugacgggaacgauguuuggaugggacgcacgaucaaugagacauccagacucggcuaugagaccuuuaaggugaucgaaggguggagcaaccccaaaucuaagcugcagauuaaucggcaggucaucguggaccgcggaaacagauccggcuacagcggcauuuucucugucgaggggaaauccuguaucaaucggugcuuuuauguggaacugauuagaggacgcaaggaggaaaccgagguucucuggacaagcaacuccaucguggucuucuguggcaccucugggacauacggaacgggcagcuggccugauggggcugaccugaaucuuaugcccauuuga

SEQ ID NO: 212957 - RNA, 1410 nt, Artificial Sequence
  derived and/or modified CDS sequence (opt5) from neuraminidase__InfluenzaA__AEK29061
augaaccccaaucagaagaucauuaccaucggcagcgugucccugacaauuucuacgaucugcuucuuuauucaaaucgccauccucauuaccacagucacccugcacuucaaacaguacgaguuuaacagcccuccgaauaaccagguuaugcuuugugaacccacaaucauugagaagaauaucaccgaaauuguguaucugacaaacaccacgaucgagaaagaaauuugcccuaagcucgcugaguacagaaauugguccaaaccccagugugacaucaccggguucgccccuuuuucuaaggauaacagcauccggcuguccgcgggaggcgacauuugggugacacgcgagcccuaugucucuugcgauccugacaaguguuaccaauucgcucuugggcagggaaccacacugaauaacgugcauagcaauaacaucguuagagaucggaccccguaucgcacgcuccugaugaaugaacugggcgugcccuuucaccucgggacaaaacaggucugcauugccugguccucuagcuccugucaugacggaaaggccuggcugcacgugugcaucaccggcgaugacaaaaacgcuacagccagcuucauuuacaauggcagacuuguugauucuguggucuccuggagcaaggagauccugcggacccaggaaucugagugugugugcaucaacgggaccuguacaguggucaugacggacggauccgcuagcggcaaagccgauaccaagauucucuuuaucgaggaagggaagauuguucauacauccacccugucuggaagcgcgcaacacguggaggaaugcuccugcuauccucgcuaccccggcgugagaugugucugccgggacaacuggaaagggagcaaucgcccuaucguggauauuaacaucaaggaccacucuaucguuuccagcuacguguguucuggacuugucggcgacacacccagaaagaaugauagcuccucuagcucccauugccuggacccgaacaaugaggaaggcgggcacggagugaagggcugggccuucgaugacgggaacgauguuuggaugggacggaccauuaaugagacgagccgccucggcuaugagacauuuaaagugaucgaaggguggucuaacccuaaguccaaacugcagauuaauagacaggucaucguggaccggggaaaccgcagcggcuacucuggcauuuucuccgucgaggggaaaagcuguaucaauagaugcuuuuauguggaacugauucggggaagaaaggaggaaaccgagguucucuggaccuccaacucuaucguggucuucuguggcacaagcgggaccuacggaacaggcuccuggcccgauggggcugaccugaaucuuaugccuaucuga

SEQ ID NO: 212958 - RNA, 1410 nt, Artificial Sequence
  derived and/or modified CDS sequence (opt5) from neuraminidase__InfluenzaA__AEK29083
augaaccccaaucagaagaucauuaccaucggcagcgugucccugacaauuucuacgaucugcuucuuuauucaaaucgccauccucauuaccacagucacccugcacuucaaacaguacgaguuuaacagcccuccgaauaaccagguuaugcuuugugaacccacaaucauugagaagaauaucaccgaaauuguguaucugacaaacaccacgaucgagaaagaaauuugcccuaagcucgcugaguacagaaauugguccaaaccccagugugacaucaccggguucgccccuuuuucuaaggauaacagcauccggcuguccgcgggaggcgacauuugggugacacgcgagcccuaugucucuugcgauccugacaaguguuaccaauucgcucuugggcagggaaccacacugaauaacgugcauagcaauaacaccguuagagaucggacgccguaucgcacacuccugaugaaugaacugggcgugcccuuucaccucgggaccaaacaggucugcaucgccugguccucuagcuccugucaugacggaaaggccuggcugcacgugugcauuacaggcgaugacaaaaacgcuaccgccagcuucaucuacaauggcagacuuguugauucuguggucuccuggagcaaggagauucugcggacccaggaaucugagugugugugcaucaacgggacauguacgguggucaugaccgacggauccgcuagcggcaaagccgauacaaagauccucuuuauugaggaagggaagaucguucauaccuccacacugucuggaagcgcgcaacacguggaggaaugcuccugcuauccucgcuaccccggcgugagaugugucugccgggacaacuggaaagggagcaaucgcccuauuguggauaucaacauuaaggaccacucuaucguuuccagcuacguguguucuggacuugucggcgacacccccagaaagaaugauagcuccucuagcucccauugccuggacccgaacaaugaggaaggcgggcacggagugaagggcugggccuucgaugacgggaacgauguuuggaugggacggacgaucaaugagacaagccgccucggcuaugagaccuuuaaagugauugaaggguggucuaacccuaaguccaaacugcagaucaauagacaggucauuguggaccggggaaaccgcagcggcuacucuggcaucuucuccgucgaggggaaaagcuguauuaauagaugcuuuuauguggaacugauccggggaagaaaggaggaaaccgagguucucuggacauccaacucuauuguggucuucuguggcaccagcgggacauacggaacgggcuccuggcccgauggggcugaccugaaucuuaugccuaucuga

SEQ ID NO: 212959 - RNA, 1410 nt, Artificial Sequence; identical to SEQ ID NO: 211482
  derived and/or modified CDS sequence (opt5) from neuraminidase__InfluenzaA__AEK29094

SEQ ID NO: 212960 - RNA, 1410 nt, Artificial Sequence; identical to SEQ ID NO: 211590
  derived and/or modified CDS sequence (opt5) from neuraminidase__InfluenzaA__AEK29127

SEQ ID NO: 212961 - RNA, 1410 nt, Artificial Sequence; identical to SEQ ID NO: 211590
  derived and/or modified CDS sequence (opt5) from neuraminidase__InfluenzaA__AEK29138

SEQ ID NO: 212962 - RNA, 1410 nt, Artificial Sequence
  derived and/or modified CDS sequence (opt5) from neuraminidase__InfluenzaA__AEK29182
augaaccccaaucagaagaucauuaccaucggcagcgugucccugacaauuucuacgaucugcuucuuuaugcaaauugccauccucaucaccacagucacccugcacuucaaacaguacgaguuuaacagcccuccgaauaaccagguuaugcuuugugaacccacaauuaucgagagaaauauuaccgaaaucguguaucugacaaacaccacgauugagaaggaaaucugcccuaaacucgcugaguaccggaauugguccaagccccagugugacauuaccggguucgccccuuuuucuaaagauaacagcauccgccuguccgcgggaggcgacaucugggugacaagagagcccuaugucucuugcgauccugacaaguguuaccaauucgcucuugggcagggaaccacacugaauaacgugcauagcaauaacaccguucgggaucgcacgccguauagaacacuccugaugaaugaacugggcgugcccuuucaccucgggaccaagcaggucugcauugccugguccucuagcuccugucaugacggaaaagccuggcugcacgugugcaucacaggcgaugacaagaacgcuaccgccagcuucauuuacaauggccggcuuguugauucuguggucuccuggagcaaagagauccugcgcacccaggaaucugagugugugugcauuaacgggacauguacgguggucaugaccgacggauccgcuagcggcaaggccgauacaaaaauccucuuuaucgaggaagggaagauuguucauaccuccacacugucuggaagcgcgcaacacguggaggaaugcuccugcuauccuagauaccccggcgugcggugugucugccgcgacaacuggaaggggagcaauagaccuaucguggauauuaacaucaaagaccacucuauuguuuccagcuacguguguucuggacuugucggcgacacgccccggaagaaugauagcuccucuagcucccauugccuggacccgaacaaugaggaaggcgggcacggagugaaaggcugggccuucgaugacgggaacgauguuuggaugggacgcaccaucaaugagacaagcagacucggcuaugagaccuuuaaggugaucgaaggguggucuaacccuaaauccaagcugcaggucaaucgccaggugauugucgaccggggaaacagaagcggcuacucuggcaucuucuccguggaggggaaaagcuguauuaaucggugcuuuuauguugaacugaucagaggacgcaaggaggaaaccgaggugcucuggacauccaacucuauugucguguucuguggcaccagcgggacauacggaacgggcuccuggcccgauggggcugaccugaaucuuaugccuaucuga

SEQ ID NO: 212963 - RNA, 1410 nt, Artificial Sequence
  derived and/or modified CDS sequence (opt5) from neuraminidase__InfluenzaA__AEK29204
augaaccccaaucagaagaucauuaccaucggcagcgugucccugacaauuucuacgaucugcuucuuuaugcaaauugccauccucaucaccacagucacccugcacuucaaacaguacgaguuuaacagcccuccgaauaaccagguuaugcuuugugaacccacaauuaucgagagaaauauuaccgaaaucguguaucugacaaacaccacgauugagaaggaaaucugcccuaaacucgcugaguaccggaauugguccaagccccagugugacauuaccggguucgccccuuuuucuaaagauaacagcauccgccuguccgcgggaggcgacaucugggugacaagagagcccuaugucucuugcgauccugacaaguguuaccaauucgcucuugggcagggaaccacacugaauaacgugcauagcaauaacaccguucgggaucgcacgccguauagaacacuccugaugaaugaacugggcgugcccuuucaccucgggaccaagcaggucugcauugccugguccucuagcuccugucaugacggaaaagccuggcugcacgugugcaucacaggcgaugacaagaacgcuaccgccagcuucauuuacaauggccggcuuguugauucuguggucuccuggagcaaagagauccugcgcacccaggaaucugagugugugugcauuaacgggacauguacgguggucaugaccgacggauccgcuagcggcaaggccaacacaaaaguucucuuuaucgaggaagggaagaucgugcauaccuccacacugucuggaagcgcgcaacacguggaggaaugcuccugcuauccuagauaccccggcguccggugugugugccgcgauaauuggaaggggagcaacagaccuauuguugacaucaauauuaaagaucacucuaucguguccagcuacgucuguucuggacuugugggcgacacgccccggaagaacgacagcuccucuagcucccauugccuggauccgaauaacgaggaaggcgggcacggaguuaaaggcugggccuucgacgaugggaaugacguguggaugggacgcaccauuaacgagacaagcagacucggcuaugagaccuuuaaggucaucgaaggguggucuaauccuaaauccaagcugcagaucaaccgccaggugauugucgaucggggaaauagaagcggcuacucuggcaucuucuccguggaggggaaaagcuguauuaaccggugcuuuuauguugaacugaucagaggacgcaaggaggaaaccgaggugcucuggacauccaauucuauugucguguucuguggcaccagcgggacauacggaacgggcuccuggcccgacggggcugaucugaaccuuaugccuaucuga

SEQ ID NO: 212964 - RNA, 1410 nt, Artificial Sequence
  derived and/or modified CDS sequence (opt5) from neuraminidase__InfluenzaA__AEK29215
augaaccccaaucagaagaucauuaccaucggcagcgugucccugacaauuucuacgaucugcuucuuuaugcaaauugccauccucaucaccacagucacccugcacuucaaacaguacgaguuuaacagcccuccgaauaaccagguuaugcuuugugaacccacaauuaucgagagaaauauuaccgaaaucguguaucugacaaacaccacgauugagaaggaaaucugcccuaaacucgcugaguaccggaauugguccaagccccagugugacauuaccggguucgccccuuuuucuaaagauaacagcauccgccuguccgcgggaggcgacaucugggugacaagagagcccuaugucucuugcgauccugacaaguguuaccaauucgcucuugggcagggaaccacacugaauaacgugcauagcaauaacaccguucggaaucgcacgccguauagaacacuccugaugaacgaacugggcgugcccuuucaccucgggaccaagcaggucugcauugccugguccucuagcuccugucaugauggaaaagccuggcugcacgugugcaucacaggcgacgauaagaaugcuaccgccagcuucauuuacaacggccggcuuguugacucuguggucuccuggagcaaagagauccugcgcacccaggaaucugagugugugugcauuaacgggacauguacgguggucaugaccgauggauccgcuagcggcaaggccgacacaaaaauccucuuuaucgaggaagggaagauuguucauaccuccacacugucuggaagcgcgcaacacguggaggaaugcuccugcuauccuagauaccccggcgugcggugugucugccgcgauaauuggaaggggagcaacagaccuaucguggacauuaauaucaaagaucacucuauuguuuccagcuacguguguucuggacuugucggcgacacgccccggaagaacgacagcuccucuagcucccauugccuggauccgaauaacgaggaaggcgggcacggagugaaaggcugggccuucgacgaugggaaugacguuuggaugggacgcaccaucaacgagacaagcagacucggcuaugagaccuuuaaggugaucgaaggguggucuaauccuaaauccaagcugcagauuaaccggcaggucaucguggaucgcggagacagaagcggcuacucuggcauuuucuccgucgaggggaaaagcuguaucaaucggugcuuuuauguggaacugauuagaggacgcaaggaggaaaccgagguucucuggacauccaacucuaucguggucuucuguggcaccagcgggacauacggaacgggcuccuggcccgauggggcugaccugaaucuuaugccuauuuga

SEQ ID NO: 212965 - RNA, 1410 nt, Artificial Sequence; identical to SEQ ID NO: 212963
  derived and/or modified CDS sequence (opt5) from neuraminidase__InfluenzaA__AEK29237

SEQ ID NO: 212966 - RNA, 1410 nt, Artificial Sequence; identical to SEQ ID NO: 211590
  derived and/or modified CDS sequence (opt5) from neuraminidase__InfluenzaA__AEK29248

SEQ ID NO: 212967 - RNA, 1410 nt, Artificial Sequence; identical to SEQ ID NO: 211590
  derived and/or modified CDS sequence (opt5) from neuraminidase__InfluenzaA__AEK29259

SEQ ID NO: 212968 - RNA, 1410 nt, Artificial Sequence; identical to SEQ ID NO: 211590
  derived and/or modified CDS sequence (opt5) from neuraminidase__InfluenzaA__AEK29270

SEQ ID NO: 212969 - RNA, 1413 nt, Artificial Sequence
  derived and/or modified CDS sequence (opt5) from neuraminidase__InfluenzaA__AEK59839
augaaccccaaucagaagaucauuaccaucggcagcauuuccaucgccauugggaucaucucucugaugcuccaaauuggaaacaucauuagcaucugggcuucccacucuauucagacaggcagccagaaucauacggggaucugcaaccagagaauuaucaccuacgaaaauuccacaugggugaaccacaccuaugucaauaucaacaauacaaacguuguggccggaaaagacaagaccucugugacacuggcgggcaauagcucccuuuguagcauuucugggugggcuaucuacaccaaagauaacuccauucggaucggaagcaagggcgacgucuucgugauucgcgagccuuuuaucucuugcucccaucuggaguguagaacguucuuucucacccaaggcgcccugcuuaaugauaaacacagcaacgggacaguuaaggaccggucuccguaucgcgcccugauguccugcccccucggagaagcuccuagccccuacaauuccaaguucgagucuguggccuggagcgcuuccgccugucaugauggccugggguggcugaccaucggaauuagcggcccugacaacggggcggucgccgugcucaaauauaacggaaucauuacaggcaccaucaagucuuggaaaaagcagauucugagaacgcaggaauccgagugcguuuguaugaauggcagcugcuuuacaaucaugaccgaugggcccucuaacggagcugccagcuacaaaaucuucaagauugagaagggcaaagugacaaaguccaucgaacuuaaugcuccuaacuuucacuaugaggaauguucuugcuacccggacaccgggauugucaugugugugugccgggauaauuggcacggaagcaaccgccccuggguguccuucaaucagaaccuggacuaccaaaucggcuauauuugcagcggggucuuuggagauaauccuagacccaaagacggcgagggcucuuguaacccuguuaccguggauggggccgacggagugaagggcuucuccuacaaauaugacaauggggucuggaucggacggacaaagagcaaccgccucagaaaaggcuuugagaugauuugggaucccaauggguggacgaacaccgacucugauuucuccgugaagcaggacguuguggcgaucacagauuggagcggcuacuccggaucuuuuguccagcauccggaacugaccggccuugacugcauccggccuuguuucuggguggagcugguucgcgggcuccccagagaaaauacaaccauuuggacgagcggauccucuaucagcuucugcggcgugaacuccgauacagccaacuggagcuggccugacggggcugagcugcccuuuaccauugauaaguga

SEQ ID NO: 212970 - RNA, 1410 nt, Artificial Sequence
  derived and/or modified CDS sequence (opt5) from neuraminidase__InfluenzaA__AEK98375
augaaccccaaucagaagaucauuaccaucggcagcgugucccugacaauuucuacgaucugcuucuuuaugcaaauugccauccucaucaccacagucacccugcacuucaaacaguacgaguuuaacagcccuccgaauaaccagguuaugcuuugugaacccacaauuaucgagagaaauauuaccgaaaucguguaucugacaaacaccacgauugagaaggaaaucugcccuaaacucgcugaguaccggaauugguccaagccccagugugacauuaccggguucgccccuuuuucuaaagauaacagcauccgccuguccgcgggaggcgacaucugggugacaagagagcccuaugucucuugcgauccugacaaguguuaccaauucgcucuugggcagggaaccacacugaauaacgugcauagcaaugauaccguucgggaccgcacgccguauagaacacuccugaugaacgaacugggcgugcccuuucaccucgggaccaagcaggucugcauugccugguccucuagcuccugucaugauggaaaagccuggcugcacgugugcaucacaggcgacgauaagaaugcuaccgccagcuucauuuacaacggccggcuuguugacucuaucguguccuggagcaaagagauucugcgcacccaggaaucugagugugucugcaucaaugggacauguacgguggugaugaccgauggauccgcuagcggcgaggccgacacaaagauccucuuuauugaagaggggaaaaucguccauaccuccacacugucuggaagcgcgcaacacguugaagagugcuccugcuauccuagauaccccggcgugcggugugugugccgcgauaacuggaaggggagcaacagaccuauugucgacaucaauauuaaggaccacucuaucguguccagcuacguuuguucuggacuugugggcgauacgccccggaaaaacgacagcuccucuagcucccauugccuggauccgaauaacgaagagggcgggcacggagucaagggcugggccuucgacgaugggaaugacguguggaugggacgcaccaucagcgagaaaucuagacucggcuaugaaacauuuaagguuauugaggggugguccaacccuaaaagcaagcugcagaccaaucgccaggugaucgucgaucggggaaacagaucuggcuacuccggcauuuucagcguggaagggaaauccuguaucaaucggugcuuuuaugucgagcugauuagaggacgcaaggaagagaccgaggugcucuggacaucuaacagcaucguuguguucuguggcaccuccgggacauacggaacgggcucuuggcccgacggggcugauauuaaucugaugccuaucuga

SEQ ID NO: 212971 - RNA, 1410 nt, Artificial Sequence; identical to SEQ ID NO: 208671
  derived and/or modified CDS sequence (opt5) from neuraminidase__InfluenzaA__AEK98377

SEQ ID NO: 212972 - RNA, 1410 nt, Artificial Sequence; identical to SEQ ID NO: 208113
  derived and/or modified CDS sequence (opt5) from neuraminidase__InfluenzaA__AEK98379

SEQ ID NO: 212973 - RNA, 1410 nt, Artificial Sequence
  derived and/or modified CDS sequence (opt5) from neuraminidase__InfluenzaA__AEK98381
augaaccccaaucagaagaucauuaccaucggcagcgugucccugacaauuucuacgaucugcuucuuuaugcaaauugccauccucaucaccacagucacccugcacuucaaacaguacgaguuuaacagcccuccgaauaaccagguuaugcuuugugaacccacaauuaucgagagaaauauuaccgaaaucguguaucugacaaacaccacgauugagaaggaaaucugcccuaaacucgcugaguaccggaauugguccaagccccagugugacauuaccggguucgccccuuuuucuaaagauaacagcauccgccuguccgcgggaggcgacaucugggugacaagagagcccuaugucucuugcgauccugacaaguguuaccaauucgcucuugggcagggaaccacacugaauaacgugcauagcaaugauaccguucgggaccgcacgccguauagaacacuccugaugaacgaacugggcgugcccuuucaccucgggaccaagcaggucugcauugccugguccucuagcuccugucaugauggagaggccuggcugcacgugugcaucacaggcgacgauaaaaaugcuaccgccagcuucauuuacaacggccggcuuguugacucuaucguguccuggagcaaggaaauucugcgcacccaggagucugagugugucugcaucaaugggacauguacgguggugaugaccgauggauccgcuagcggcgaagccgacacaaaaauccucuuuauugaggaagggaagaucguccauaccuccacacugucuggaagcgcgcaacacguugaggaaugcuccugcuauccuagauaccccggcgugcggugugugugccgcgauaacuggaaagggagcaacagaccuauugucgacaucaauauuaaggaccacucuaucguguccagcuacguuuguucuggacuugugggcgauacgccccggaagaacgacagcuccucuagcucccauugccuggauccgaauaacgaggagggcgggcacggagucaaaggcugggccuucgacgaugggaaugacguguggaugggacgcaccaucagcgaaaagucuagacucggcuaugagacauuuaaaguuauugaagggugguccaacccuaagagcaaacugcagaucaaucgccaggugauugucgaucggggaaacagaucuggcuacuccggcaucuucagcguggaggggaaguccuguauuaaucggugcuuuuaugucgaacugaucagaggacgcaaagaggagaccgaagugcucuggaccucuaacagcauuguuguguucuguggcacauccgggaccuacggaacaggcucuuggcccgacggggcugauaucaaucugaugccuaucuga

SEQ ID NO: 212974 - RNA, 1410 nt, Artificial Sequence; identical to SEQ ID NO: 208113
  derived and/or modified CDS sequence (opt5) from neuraminidase__InfluenzaA__AEK98383

SEQ ID NO: 212975 - RNA, 1410 nt, Artificial Sequence; identical to SEQ ID NO: 208671
  derived and/or modified CDS sequence (opt5) from neuraminidase__InfluenzaA__AEK98385

SEQ ID NO: 212976 - RNA, 1410 nt, Artificial Sequence
  derived and/or modified CDS sequence (opt5) from neuraminidase__InfluenzaA__AEK98387
augaaccccaaucagaagaucauuaccaucggcagcgugucccugacaauuucuacgaucugcuucuuuaugcaaauugccauccucaucaccacagucacccugcacuucaaacaguacgaguuuaacagcccuccgaauaaccagguuaugcuuugugaacccacaauuaucgagagaaauauuaccgaaaucguguaucugacaaacaccacgauugagaaggaaaucugcccuaaacucgcugaguaccggaauugguccaagccccagugugacauuaccggguucgccccuuuuucuaaagauaacagcauccgccuguccgcgggaggcgacaucugggugacaagagagcccuaugucucuugcgauccugacaaguguuaccaauucgcucuugggcagggaaccacacugaauaacgugcauagcaauaacaccguucgggaucgcacgccguauagaacacuccugaugaaugaacugggcgugcccuuucaccucgggaccaagcaggucugcauugccugguccucuagcuccugucaugacggaaaagccuggcugcacgugugcaucacaggcgaugacaagaacgcuaccgccagcuucauuuacaauggccggcuuaucgauucuguuguguccuggagcaaagagauucugcgcacccaggaaucugagugugucugcaucaacgggacauguacgguggugaugaccgacggauccgcuagcggcaaggccgauacaaaaauccucuuuauugaggaagggaagaucguccauaccuccacacugucuggaagcgcgcaacacguugaggaaugcuccugcuauccuagauaccccggcgugcggugugugugccgcgacaacuggaaggggagcaauagaccuauugucgauaucaacauuaaagaccacucuaucguguccagcuacguuuguucuggacuugugggcgacacgccccggaagaaugauagcuccucuagcucccauugccuggacccgaacaaugaggaaggcgggcacggagucaaaggcugggccuucgaugacgggaacgauguguggaugggacgcaccaucaaugagacaagcagacucggcuaugagaccuuuaagguuauugaaggguggucuaacccuaaauccaagcugcagaucaaucgccaggugauugucgaccggggaaacagaagcggcuacucuggcaucuucuccguggaggggaaaagcuguauuaaucggugcuuuuaugucgaacugaucagaggacgcaaggaggaaaccgaggugcucuggacauccaacucuauuguuguguucuguggcaccagcgggacauacggaacgggcuccuggcccgauggggcugaccugaaucuuaugccuaucuga

SEQ ID NO: 212977 - RNA, 1410 nt, Artificial Sequence; identical to SEQ ID NO: 208671
  derived and/or modified CDS sequence (opt5) from neuraminidase__InfluenzaA__AEK98389

SEQ ID NO: 212978 - RNA, 1410 nt, Artificial Sequence
  derived and/or modified CDS sequence (opt5) from neuraminidase__InfluenzaA__AEK98393
augaaccccaaucagaagaucauuaccaucggcagcgugucccugacaauuucuacgaucugcuucuuuaugcaaauugccauccucaucaccacagucacccugcacuucaaacaguacgaguuuaacagcccuccgaauaaccagguuaugcuuugugaacccacaauuaucgagagaaauauuaccgaaaucguguaucugacaaacaccacgauugagaaggaaaucugcccuaaacucgcugaguaccggaauugguccaagccccagugugacauuaccggguucgccccuuuuucuaaagauaacagcauccgccuguccgcgggaggcgacaucugggugacaagagagcccuaugucucuugcgauccugacaaguguuaccaauucgcucuugggcagggaaccacacugaauaacgugcauagcaauaacaccguucgggaucgcacgccguauagaacacuccugaugaaugaacugggcgugcccuuucaccucgggaccaagcaggucugcauugccugguccucuagcuccugucaugacggaaaagccuggcugcacgugugcaucacaggcgaugacaagaacgcuaccgccagcuucauuuacaauggccggcuuguugauucuguggucuccuggagcaaagagauccugcgcacccaggaaucugagugugugugcauuaacgggacauguacgguggucaugaccgacggauccgcuagcggcaaggccgauacaaaaauccucuuuaucgaggaagggaagauuguucauaccuccacacugucuggaagcgcgcaacacguggaggaaugcuccugcuauccuagauaccccggcgugcggugugucugccgcgacaacuggaaggggagcaauagaccuaucguggauauuaacaucaaagaccacucuauugccuccagcuacguuuguucuggacuugugggcgacacgccccggaagaaugauagcuccucuagcucccauugccuggacccgaacaaugaggaaggcgggcacggagucaaaggcugggcuuucgaugacgggaacgauguguggaugggacgcaccaucaaugagacaagcagacucggcuaugagaccuuuaagguuaucgaaggguggucuaacccuaaauccaagcugcagauuaaucgccaggugaucgucgaccggggaaacagaagcggcuacucuggcauuuucuccguggaggggaaaagcuguaucaaucggugcuuuuaugucgaacugauuagaggacgcaaggaggaaaccgaggugcucuggacauccaacucuaucguuguguucuguggcaccagcgggacauacggaacgggcuccuggcccgauggggccgaccugaaucuuaugccuauuuga

SEQ ID NO: 212979 - RNA, 1410 nt, Artificial Sequence; identical to SEQ ID NO: 211590
  derived and/or modified CDS sequence (opt5) from neuraminidase__InfluenzaA__AEK98395

SEQ ID NO: 212980 - RNA, 1410 nt, Artificial Sequence
  derived and/or modified CDS sequence (opt5) from neuraminidase__InfluenzaA__AEK98397
augaaccccaaucagaagaucauuaccaucggcagcgugucccugacaauuucuacgaucugcuucuuuaugcaaauugccauccucaucaccacagucacccugcacuucaaacaguacgaguuuaacagcccuccgaauaaccagguuaugcuuugugaacccacaauuaucgagagaaauauuaccgaaaucguguaucugacaaacaccacgauugagaaggaaaucugcccuaaacucgcugaguaccggaauugguccaagccccagugugacauuaccggguucgccccuuuuucuaaagauaacagcauccgccuguccgcgggaggcgacaucugggugacaagagagcccuaugucucuugcgauccuaauaaguguuaccaauucgcucuugggcagggaaccacacugaacaaugugcauagcaacaauaccguucgggaccgcacgccguauagaacacuccugaugaacgaacugggcgugcccuuucaccucgggaccaagcaggucugcauugccugguccucuagcuccugucaugauggaaaagccuggcugcacgugugcaucacaggcgacgauaagaaugcuaccgccagcuucauuuacaacggccggcuuguugacucuguggucuccuggagcaaagagauccugcgcacccaggaaucugagugugugugcauuaacgggacauguacgguggucaugaccgauggauccgcuagcggcaaggccgacacaaaaauccucuuuaucgaggaagggaagauuguucauaccuccacacugucuggaagcgcgcaacacguggaggaaugcuccugcuauccuagauaccccggcgugcggugugucugccgcgauaauuggaaggggagcaacagaccuaucguggacauuaauaugaaagaucacucuaucguuuccagcuacguguguucuggacuugucggcgacacgccccggaagaacgacagcuccucuagcucccauugccuggauccgaauaacgaggaaggcgggcacggagugaaaggcugggccuucgacgaugggaaugacguuuggaugggacgcaccauuagcgagaagucuagacucggcuaugagacauuuaaagugaucgaagggugguccaacccuaagagcaaacugcagaucaaucggcaggucauuguggaucgcggaaacagaucuggcuacuccggcaucuucagcgucgaggggaaguccuguauuaaucggugcuuuuauguggaacugaucagaggacgcaaggaggaaaccgagguucucuggaccucuaacagcauuguggucuucuguggcacauccgggaccuacggaacaggcucuuggcccgacggggcugauaucaauuucaugccuauuuga

SEQ ID NO: 212981 - RNA, 1410 nt, Artificial Sequence; identical to SEQ ID NO: 208671
  derived and/or modified CDS sequence (opt5) from neuraminidase__InfluenzaA__AEK98399

SEQ ID NO: 212982 - RNA, 1410 nt, Artificial Sequence; identical to SEQ ID NO: 208584
  derived and/or modified CDS sequence (opt5) from neuraminidase__InfluenzaA__AEK98403

SEQ ID NO: 212983 - RNA, 1410 nt, Artificial Sequence
  derived and/or modified CDS sequence (opt5) from neuraminidase__InfluenzaA__AEK98405
augaaccccaaucagaagaucauuaccaucggcagcgugucccugacaauuucuacgaucugcuucuuuaugcaaauugccauccucaucaccacagucacccugcacuucaaacaguacgaguuuaacagcccuccgaauaaccagguuaugcuuugugaacccacaauuaucgagagaaauauuaccgaaaucguguaucugacaaacaccacgauugagaaggaaaucugcccuaaacucgcugaguaccggaauugguccaagccccagugugacauuaccggguucgccccuuuuucuaaagauaacagcauccgccuguccgcgggaggcgacaucugggugacaagagagcccuaugucucuugcgauccugacaaguguuaccaauucgcucuugggcagggaaccacacugaauaacgugcauagcaauaacaccguucgggaucgcacgccguauagaacacuccugaugaaugaacugggcgugcccuuucaccucgggaccaagcaggucugcauugccugguccucuagcuccugucaugacggaaaagccuggcugcacgugugcaucacaggcgaugacaagaacgcuaccgccagcuucauuuacaauggccggcuuguugauucuaucguguccuggagcaaagagauucugcgcacccaggaaucugagugugucugcaucaacgggacauguacgguggugaugaccgacggauccgcuagcggcaaggccgauacaaaaauccucuuuauugaggaagggaagaucguccauaccuccacacugucuggaagcgcgcaacacguugaggaaugcuccugcuauccuagauaccccggcgugcggugugugugccgcgacaacuggaaggggagcaauagaccuauugucgauaucaacauuaaagaccacucuaucguguccagcuacguuuguucuggacuugugggcgacacgccccggaagaaugauagcuccucuagcucccauugccuggacccgaacaaugaggaaggcgggcacggagucaaaggcugggccuucgaugacgggaacgauguguggaugggacgcaccaucagcgagaagucuagacucggcuaugagacauuuaaaguuauugaagggugguccaauccuaagagcaaacugcagaucaaccgccaggugauugucgaccgggauaauagaucuggauacuccggcaucuucagcguggagggcaaguccuguauuaaccggugcuuuuaugucgaacugaucagagggcgcaaggaggaaaccgaggugcucuggaccucuaauagcauuguuguguucuguggaacauccggcaccuacgggacaggaucuuggcccgacggcgcugauaucaaccugaugccuaucuga

SEQ ID NO: 212984 - RNA, 1410 nt, Artificial Sequence
  derived and/or modified CDS sequence (opt5) from neuraminidase__InfluenzaA__AEK98407
augaaccccaaucagaagaucauuaccaucggcagcgugucccugacaauuucuacgaucugcuucuuuaugcaaauugccauccucaucaccacagucacccugcacuucaaacaguacgaguuuaacagcccuccgaauaaccagguuaugcuuugugaacccacaauuaucgagagaaauauuaccgaaaucguguaucugacaaacaccacgauugagaaggaaaucugcccuaaacucgcugaguaccggaauugguccaagccccagugugacauuaccggguucgccccuuuuucuaaagauaacagcauccgccuguccgcgggaggcgacaucugggugacaagagagcccuaugucucuugcgauccugacaaguguuaccaauucgcucuugggcagggaaccacacugaauaacgugcauagcaauaacaccguucgggugcgcacgccguauagaacacuccugaugaaugaacugggcguccccuuucaccucgggaccaaacaggugugcauugccugguccucuagcuccugucaugauggaaaggccuggcugcacguuugcaucacaggcgacgauaagaacgcuaccgccagcuucauuuacaauggccggcuuguggacucuaucgucuccuggagcaaagagauucugcgcacccaggaaucugagugugugugcaucaacgggacauguacgguggucaugaccgauggauccgcuagcggcaaggccgacacaaaaauccucuuuauugaggaagggaagaucguucauaccuccacacugucuggaagcgcgcaacacguggaggaaugcuccugcuauccuagauaccccggcgugcggugugucugccgcgauaacuggaaggggagcaauagaccuauuguggacaucaacauuaaagaucacucuaucguuuccagcuacguguguucuggacuugucggcgacacgccccggaagaaugacagcuccucuagcucccauugccuggauccgaacaaugaggaaggcgggcacggagugaaaggcugggccuucgacgaugggaacgacguuuggaugggacgcaccaucagcgagaagucuagacucggcuaugagacauuuaaagugauugaagggugguccaauccuaagagcaaacugcagaucaaccggcaggucauuguggaucgcgacaauagaucuggauacuccggcaucuucagcgucgagggcaaguccuguauuaaccggugcuuuuauguggaacugaucagagggcgcaaggaggaaaccgagguucucuggaccucuaauagcauuguggucuucuguggaacauccggcaccuacgggacaggaucuuggcccgauggcgcugacaucaaccugaugccuaucuga

SEQ ID NO: 212985 - RNA, 1410 nt, Artificial Sequence; identical to SEQ ID NO: 206399
  derived and/or modified CDS sequence (opt5) from neuraminidase__InfluenzaA__AEL11690

SEQ ID NO: 212986 - RNA, 1410 nt, Artificial Sequence; identical to SEQ ID NO: 211085
  derived and/or modified CDS sequence (opt5) from neuraminidase__InfluenzaA__AEL89300

SEQ ID NO: 212987 - RNA, 1410 nt, Artificial Sequence; identical to SEQ ID NO: 211085
  derived and/or modified CDS sequence (opt5) from neuraminidase__InfluenzaA__AEL89310

SEQ ID NO: 212988 - RNA, 1410 nt, Artificial Sequence; identical to SEQ ID NO: 211085
  derived and/or modified CDS sequence (opt5) from neuraminidase__InfluenzaA__AEL89320

SEQ ID NO: 212989 - RNA, 1410 nt, Artificial Sequence; identical to SEQ ID NO: 211085
  derived and/or modified CDS sequence (opt5) from neuraminidase__InfluenzaA__AEL89330

SEQ ID NO: 212990 - RNA, 1410 nt, Artificial Sequence; identical to SEQ ID NO: 211085
  derived and/or modified CDS sequence (opt5) from neuraminidase__InfluenzaA__AEL89340

SEQ ID NO: 212991 - RNA, 1410 nt, Artificial Sequence; identical to SEQ ID NO: 211085
  derived and/or modified CDS sequence (opt5) from neuraminidase__InfluenzaA__AEL89350

SEQ ID NO: 212992 - RNA, 1410 nt, Artificial Sequence; identical to SEQ ID NO: 211085
  derived and/or modified CDS sequence (opt5) from neuraminidase__InfluenzaA__AEL89360

SEQ ID NO: 212993 - RNA, 1410 nt, Artificial Sequence; identical to SEQ ID NO: 211085
  derived and/or modified CDS sequence (opt5) from neuraminidase__InfluenzaA__AEL89370

SEQ ID NO: 212994 - RNA, 1410 nt, Artificial Sequence; identical to SEQ ID NO: 211085
  derived and/or modified CDS sequence (opt5) from neuraminidase__InfluenzaA__AEL89394

SEQ ID NO: 212995 - RNA, 1410 nt, Artificial Sequence; identical to SEQ ID NO: 211085
  derived and/or modified CDS sequence (opt5) from neuraminidase__InfluenzaA__AEL89404

SEQ ID NO: 212996 - RNA, 1410 nt, Artificial Sequence; identical to SEQ ID NO: 211085
  derived and/or modified CDS sequence (opt5) from neuraminidase__InfluenzaA__AEL89414

SEQ ID NO: 212997 - RNA, 1410 nt, Artificial Sequence; identical to SEQ ID NO: 211085
  derived and/or modified CDS sequence (opt5) from neuraminidase__InfluenzaA__AEL89424

SEQ ID NO: 212998 - RNA, 1410 nt, Artificial Sequence; identical to SEQ ID NO: 211085
  derived and/or modified CDS sequence (opt5) from neuraminidase__InfluenzaA__AEL89434

SEQ ID NO: 212999 - RNA, 1410 nt, Artificial Sequence; identical to SEQ ID NO: 211085
  derived and/or modified CDS sequence (opt5) from neuraminidase__InfluenzaA__AEL89444

SEQ ID NO: 213000 - RNA, 1410 nt, Artificial Sequence; identical to SEQ ID NO: 211085
  derived and/or modified CDS sequence (opt5) from neuraminidase__InfluenzaA__AEL89454

SEQ ID NO: 213001 - RNA, 1410 nt, Artificial Sequence; identical to SEQ ID NO: 211085
  derived and/or modified CDS sequence (opt5) from neuraminidase__InfluenzaA__AEL89464

SEQ ID NO: 213002 - RNA, 1410 nt, Artificial Sequence; identical to SEQ ID NO: 211085
  derived and/or modified CDS sequence (opt5) from neuraminidase__InfluenzaA__AEL89474

SEQ ID NO: 213003 - RNA, 1410 nt, Artificial Sequence
  derived and/or modified CDS sequence (opt5) from neuraminidase__InfluenzaA__AEL89484
augaaccccaaucagaagaucauuaccaucggcagcgugugcaugacaauugggauggccaaccugaugcuccaaaucggaaauauuaucuccaucuggauuucucacagcauccagcugggcaaccagaaucagauugagacguguaaccaauccgucaucaccuacgaaaauaacacauggguuaaucagaccuaugugaacauuucuaauacaaacuucgcugccgggcagagcguggucuccgugaaacuugcgggaaauucuagccugugcccuguuuccggcugggcuaucuacagcaaggacaacucuauuagaaucggguccaaaggagauguguuugucauccgggagccguucauuagcuguucuccccucgaaugccgcaccuuuuuccugacacagggcgcccuucugaaugacaagcauuccaacggcaccaucaaagauagaagcccuuaucggacgcucaugucuugucccauuggggaggugccuucccccuacaacagccgcuuugaauccguugccuggucugcuagcgccugccacgacggaaucaauuggcugaccauuggcaucuccgggccugauaacggagcuguggccguccugaaguauaauggcaucauuacagacaccaucaagagcuggagaaacaauauucuccggacacaagagucugagugugcgugcgugaacggguccuguuucaccgugaugacggauggaccgagcgacggccaggccucuuacaaaaucuuucgcauugaaaagggcaaaaucgucaagagcguugagaucaaugcucccaacuaucauuacgaagagugcuccuguuacccugauucuagcgagauuacaugcgugugcagagacaauuggcacggguccaaccggcccugggugagcuucaaucagaaccuggaauaucagaucggauacauuuguucuggcaucuuuggggauaauccucgccccaacgacaaaaccggauccugcggcccggucagcucuaauggggccaacggagugaagggcuucuccuuuaaguauggcaacgggguuuggauuggaagaacaaaaagcaucuccucucggaauggcuucgagaugauuugggauccuaacggguggaccggaaccgacaauaacuuuagcaucaagcaagacaucgugggcauuaaugaaugguccggguacucuggcagcuucguccagcaucccgagcuuacaggacuggauuguauccgcccuugcuucuggguggaacucauuagaggccggcccaaagagaacacgaucuggaccuccgggagcucuauuuccuuuuguggaguuaauagcgacacagugggcuggucuuggcccgauggggcugagcugccuuucaccaucgacaaguga

SEQ ID NO: 213004 - RNA, 1410 nt, Artificial Sequence; identical to SEQ ID NO: 212874
  derived and/or modified CDS sequence (opt5) from neuraminidase__InfluenzaA__AEL89494

SEQ ID NO: 213005 - RNA, 1410 nt, Artificial Sequence; identical to SEQ ID NO: 212880
  derived and/or modified CDS sequence (opt5) from neuraminidase__InfluenzaA__AEL89514

SEQ ID NO: 213006 - RNA, 1410 nt, Artificial Sequence; identical to SEQ ID NO: 212858
  derived and/or modified CDS sequence (opt5) from neuraminidase__InfluenzaA__AEL89524

SEQ ID NO: 213007 - RNA, 1410 nt, Artificial Sequence
  derived and/or modified CDS sequence (opt5) from neuraminidase__InfluenzaA__AEL89534
augaaccccaaucagaagaucauuaccaucggcagcgugugcaugacaauugggauggccaaccugauccuccaaauuggaaauaucaucuccauuuggaucucucacagcauucagcugggcaaccagaaucagaucgggacguguaaccaauccgucauuaccuacgagaauaacacauggguuaaucagaccuaugugaacaucucuaauacaaacuucgcugccggacagagcguggucuccgugaaacuugcgggcaauucuagccugugcccuguuuccgggugggcuauuuacagcaaggacaacucuaucagaaucggauccaaaggcgauguguuugucauucgggaaccguucaucagcuguucuccccucgagugccgcaccuuuuuccugacacagggcgcccuucugaaugacaagcauuccaacgggaccauuaaagauagaagcccuuaucggacgcucaugucuugucccaucggagaagugccuucccccuacaacagccgcuuugaguccguugccuggucugcuagcgccugccacgacggcauuaauuggcugaccaucgggaucuccggaccugauaacggcgcuguggccguccugaaguauaaugggauuaucacagacaccauuaagagcuggagaaacaauauccuccggacacaagaaucugagugugcgugcgugaacggauccuguuucaccgugaugacggauggcccgagcgacggccaggccucuuacaaaauuuuucgcaucgagaaggggaaaaucgucaagagcguugaaauuaaugcucccaacuaucauuacgaggaaugcuccuguuacccugauucuagcgagaucacaugcgugugcagagacaauuggcacggauccaaccggcccugggugagcuucaaucagaaccuggaguaucagauuggcuacaucuguucugggauuuuuggagauaauccucgccccaacgacaaaaccggcuccugcgggccggucagcucuaauggagccaacggcgugaagggcuucuccuuuaaguaugggaacggaguuuggaucggcagaacaaaaagcauuuccucucggaauggguucgaaaugaucugggauccuaacggauggaccggcaccgacaauaacuuuagcaagaaacaagacaucguggggauuaaugagugguccggcuacucuggcagcuucguccagcaucccgaacuuacaggacuggauuguauccgcccuugcuucuggguggagcucauuagagggcggcccaaggaaaacacgaucuggaccuccggaagcucuauuuccuuuuguggcguuaauagcgacacagugggguggucuuggcccgauggagcugagcugccuuucaccaucgacaaauga

SEQ ID NO: 213008 - RNA, 1410 nt, Artificial Sequence; identical to SEQ ID NO: 212880
  derived and/or modified CDS sequence (opt5) from neuraminidase__InfluenzaA__AEL89544

SEQ ID NO: 213009 - RNA, 1410 nt, Artificial Sequence; identical to SEQ ID NO: 212880
  derived and/or modified CDS sequence (opt5) from neuraminidase__InfluenzaA__AEL89554

SEQ ID NO: 213010 - RNA, 1410 nt, Artificial Sequence
  derived and/or modified CDS sequence (opt5) from neuraminidase__InfluenzaA__AEL89564
augaaccccaaucagaagaucauuaccaucggcagcgugugcauuacaaucgggauggccaaccugauucuccaaaucggaaauaucauuuccaucuggauuucucacagcauccagcugggcaaccagaaucagauugagacguguaaccaauccgucguuaccuacgaaaauaacacaugggugaaucagaccuaugugaacaucucuaauacaaacuucgcugccgggcagagcgucguguccguuaaacuugcgggaaauucuagccugugcccuguguccggcugggcuauuuacagcaaggacaacucuaucagaaucggguccaaaggagaugucuuugugauucgggagccguucaucagcuguucuccccucgaaugccgcaccuuuuuccugacacagggcgcccuucugaaugacaagcauuccaacggcaccauuaaagauagaagcccuuaucggacgcucaugucuugucccaucggggagguuccuucccccuacaacagccgcuuugaauccguggccuggucugcuagcgccugccacgacggaauuuccuggcugaccaucggcaucagcgggccugauaauggagcugucgccgugcugaaguauaacggcauuaucacagacaccauuaagucuuggagaaauaacauccuccggacacaagaguccgagugugcgugcgugaaugggagcuguuucaccgucaugacggauggaccgucugacggccaggccagcuacaaaauuuuucgcaucgaaaagggcaaaaucguuaaguccguggagaugaacgcucccaauuaucauuacgaagagugcucuuguuacccugauagcuccgagauuacaugcgugugcagagacaacuggcacgggagcaaucggcccugggucucuuucaaccagaaucuggaauaucagaucggauacauuuguuccggcaucuuuggggauaacccucgccccaaugacaaaaccggaagcugcggcccggugucuuccaacggggccaauggaguuaagggcuucagcuuuaaguauggcaacgggguguggauuggaagaacaaaauccaucucuagccggaacggcuucgagaugauuugggauccuaauggguggaccggaaccgacaacaauuuuuccaucaagcaagacaucgucggcauuaacgaauggucuggguacagcggcuccuucgugcagcaucccgagcuuacaggacuggauuguauccgcccuugcuucuggguugaacucauuagaggccggcccaaagagaauacgaucuggaccagcgggucuuccauuagcuuuuguggagugaacucugacacagucggcugguccuggcccgauggggcugagcugccuuucaccaucgacaaguga

SEQ ID NO: 213011 - RNA, 1410 nt, Artificial Sequence; identical to SEQ ID NO: 212880
  derived and/or modified CDS sequence (opt5) from neuraminidase__InfluenzaA__AEL89574

SEQ ID NO: 213012 - RNA, 1410 nt, Artificial Sequence; identical to SEQ ID NO: 212880
  derived and/or modified CDS sequence (opt5) from neuraminidase__InfluenzaA__AEL89584

SEQ ID NO: 213013 - RNA, 1410 nt, Artificial Sequence; identical to SEQ ID NO: 209827
  derived and/or modified CDS sequence (opt5) from neuraminidase__InfluenzaA__AEL89604

SEQ ID NO: 213014 - RNA, 1410 nt, Artificial Sequence; identical to SEQ ID NO: 212329
  derived and/or modified CDS sequence (opt5) from neuraminidase__InfluenzaA__AEL89624

SEQ ID NO: 213015 - RNA, 1410 nt, Artificial Sequence
  derived and/or modified CDS sequence (opt5) from neuraminidase__InfluenzaA__AEL89634
augaaccccaaucagaagaucauuaccaucggcagcgugugcauuacaaucgggauggccaaccugauucuccaaaucggaaauaucauuuccaucuggauuucucacagcauccagcugggcaaccagaaucagauugagacguguaaccaauccgucaucaccuacgaaaauaacacauggguuaaucagaccuaugugaacauuucuaauacaaacuucgcugccgggcagagcguggucuccgugaaacuugcgggaaauucuagccugugcccuguuuccggcugggcuaucuacagcaaggacaacucuaucagaauuggguccaaaggagauguguuugucauccgggagccguucauuagcuguucuccccucgaaugccgcaccuuuuuccugacacagggcgcccuucugaaugacaagcauuccaacggcaccaucaaagauagaagcccuuaucggacgcucaugucuugucccauuggggaggugccuucccccuacaacagccgcuuugaauccguugccuggucugcuagcgccugccacgacggaaucuccuggcugaccaucggcauuagcgggccugauaauggagcuguggccguccugaaguauaacggcaucauuacagacaccaucaagucuuggagaaauaacauucuccggacacaagaguccgagugugcgugcgugaaugggagcuguuucaccgugaugacggauggaccgucugacggccaggccagcuacaaaaucuuucgcaucgaaaagggcaaaauugucaaguccguugagaugaacgcucccaauuaucauuacgaagagugcucuuguuacccugauagcuccgagaucacaugcgugugcagagacaacuggcacgggagcaaucggcccugggugucuuucaaccagaaucuggaauaucagauuggauacaucuguuccggcauuuuuggggauaacccucgccccaaugacaaaaccggaagcugcggcccggucucuuccaacggggccaauggagugaagggcuucagcuauaaguacggcaacgggguuuggaucggaagaacaaaauccauuucuagccggaacggcuuugagaugaucugggauccuaauggguggaccggaaccgacaacaauuucuccaucaagcaagacauugugggcaucaacgaauggucuggguauagcggcuccuuuguccagcaucccgagcuuacaggacuggauuguauucgcccuugcuucuggguggaacucaucagaggccggcccaaagagaauacgauuuggaccagcgggucuuccaucagcuucuguggaguuaacucugacacagugggcugguccuggcccgauggggcugagcugccuuuuaccaucgacaaguga

SEQ ID NO: 213016 - RNA, 1410 nt, Artificial Sequence; identical to SEQ ID NO: 211085
  derived and/or modified CDS sequence (opt5) from neuraminidase__InfluenzaA__AEL89644

SEQ ID NO: 213017 - RNA, 1410 nt, Artificial Sequence; identical to SEQ ID NO: 212781
  derived and/or modified CDS sequence (opt5) from neuraminidase__InfluenzaA__AEL89654

SEQ ID NO: 213018 - RNA, 1410 nt, Artificial Sequence; identical to SEQ ID NO: 212329
  derived and/or modified CDS sequence (opt5) from neuraminidase__InfluenzaA__AEL89664

SEQ ID NO: 213019 - RNA, 1410 nt, Artificial Sequence; identical to SEQ ID NO: 212329
  derived and/or modified CDS sequence (opt5) from neuraminidase__InfluenzaA__AEL89674

SEQ ID NO: 213020 - RNA, 1410 nt, Artificial Sequence; identical to SEQ ID NO: 212329
  derived and/or modified CDS sequence (opt5) from neuraminidase__InfluenzaA__AEL89694

SEQ ID NO: 213021 - RNA, 1410 nt, Artificial Sequence
  derived and/or modified CDS sequence (opt5) from neuraminidase__InfluenzaA__AEL89704
augaaccccaaucagaagaucauuaccaucggcagcgugugcaugacaauugggauggccaaccugauccuccaaauuggaaauaucauccugauuuggaucucccacucuauucagcuuggcaaccagaaucagaucgagacguguaaccaaagcgucauuaccuacgaaaauaacacauggguuaaucagaccuaugugaacaucuccaauacaaacuucgcugccgggcagucuguggucagcgugaaacuggcgggaaauuccucucucugcccuguuagcggcugggcuauuuacuccaaggacaacagcaucagaaucgggucuaaaggagauguguuugucauucgggagccguucaucuccuguagcccccuggaaugccgcaccuuuuuccuuacacagggcgcccugcucaaugacaagcauucuaacggcaccauuaaagauagauccccuuaucggacgcugaugagcugucccaucggggaggugccuucucccuacaacucccgcuuugaaagcguugccugguccgcuucugccugccacgacggaauuaauuggcugaccaucggcaucagcgggccugauaacggagcuguggccguccucaaguauaauggcauuaucacagacaccauuaaguccuggagaaacaauauccugcggacacaagagagcgagugugcgugcgugaacgggucuuguuucaccgugaugacggauggaccgaaugacggccaggccuccuacaaaauuuuucgcaucgaaaagggcaaaaucgucaagagcguugagaugaacgcucccaauuaucauuacgaagagugcucuuguuacccugauagcuccgagauuacaugcgugugcagagacaacuggcacgggucuaaucggcccugggugagcuucaaccagaaucuugaauaucagaucggauacauuuguuccggcaucuuuggggauaacccucgccccaaugacaaaaccggaagcugcggcccggucucuuccaacggggccaacggagugaagggcuucagcuuuaaguauggcaaugggguuuggauuggaagaacaaaaucuaucuccagccggaacggcuucgagaugauuugggauccuaauggguggaccggaaccgacaacaauuuuuccgugaagcaagacaucaucggcauuaacgaauggucuggguacagcggcuccuucguccagcaucccgagcugacaggacucgauuguauccgcccuugcuucuggguggaacugauuagaggccggcccaaagagaauacgaucuggaccucugggagcuccauuagcuuuuguggaguuaacucugacacagugggcugguccuggcccgauggggcugagcuuccuuucaccaucgacaaguga

SEQ ID NO: 213022 - RNA, 1410 nt, Artificial Sequence; identical to SEQ ID NO: 213021
  derived and/or modified CDS sequence (opt5) from neuraminidase__InfluenzaA__AEL89714

SEQ ID NO: 213023 - RNA, 1410 nt, Artificial Sequence; identical to SEQ ID NO: 212329
  derived and/or modified CDS sequence (opt5) from neuraminidase__InfluenzaA__AEL89744

SEQ ID NO: 213024 - RNA, 1410 nt, Artificial Sequence
  derived and/or modified CDS sequence (opt5) from neuraminidase__InfluenzaA__AEL89754
augaaccccaaucagaagaucauuaccaucggcagcgugugcauuacaaucgggauggccaaccugauucuccaaaucggaaauaucauuuccaucuggauuucucacagcauccagcugggcaaccagaaucagauugagacguguaaccaauccgucaucaccuacgaaaauaacacauggguuaaucagaccuaugugaacauuucuaauacaaacuucgcugccgggcagagcguggucuccgugaaacuugcgggaaauucuagccugugcccuguuuccggcugggcuaucuacagcaaggacaacucuaucagaauuggguccaaaggagauguguuugucauccgggagccguucauuagcuguucuccccucgaaugccgcaccuuuuuccugacacagggcgcccuucugaaugacaagcauuccaacggcaccaucaaagauagaagcccuuaucggacgcucaugucuugucccauuggggaggugccuucccccuacaacagccgcuuugaauccguugccuggucugcuagcgccugccacgacggaaucuccuggcugaccaucggcauuagcgggccugauaauggagcuguggccguccugaaguauaacggcaucauuacagacaccaucaagucuuggagaaauaacauucuccggacacaagaguccgagugugcgugcgugaaugggagcuguuucaccgugaugacggauggaccgucugacggccaggccagcuacaaaaucuuucgcaucgaaaagggcaaaauugucaaguccguugagaugaacgcucccaauuaucauuacgaagagugcucuuguuacccugauagcuccgagaucacaugcgugugcagagacaacuggcacgggagcaaucggcccugggugucuuucaaccagaaucuggaauaucagauuggauacaucuguuccggcauuuuuggggauaacccucgccccaaugacaaaaccggaagcugcggcccggucucuuccaacggggccaauggagugaagggcuucagcuuuaaguauggcaacgggguuuggaucggaagaacaaaauccauuucuagccggaacggcuucgagaugaucugggauccuaauggguggaccggaaccgacaacaauuuuuccaucaagcaagacauugugggcaucaacgaauggucuggguacagcggcuccuucguccagcaucccgagcuuacaggacuggauuguauucgcccuugcuucuggguggaacucaucagaggccggcccaaagagaauacgauuuggaccagcgggucuuccaucagcuuuuguggaguuaacucugacacagugggcugguccuggcccgauggggcugagcugccuuucaucauugacaaguga

SEQ ID NO: 213025 - RNA, 1410 nt, Artificial Sequence; identical to SEQ ID NO: 211085
  derived and/or modified CDS sequence (opt5) from neuraminidase__InfluenzaA__AEL89774

SEQ ID NO: 213026 - RNA, 1410 nt, Artificial Sequence
  derived and/or modified CDS sequence (opt5) from neuraminidase__InfluenzaA__AEL89784
augaaccccaaucagaagaucauuaccaucggcagcgugugcaugacaauugggauggccaaccugauccuccaaauuggaaauaucaucuccauuuggaucucucacagcauucagcugggcaaccagaaucagaucgagacguguaaccaauccgucauuaccuacgaaaauaacacauggguuaaucagaccuaugugaacaucucuaauacaaacuucgcugccgggcagagcguggucuccgugaaacuugcgggaaauucuagccugugcccuguuuccggcugggcuauuuacagcaaggacaacucuaucagaaucggguccaaaggagauguguuugucauucgggagccguucaucagcuguucuccccucgaaugccgcaccuuuuuccugacacagggcgcccuucugaaugacaagcauuccaacggcaccauuaaagauagaagcccuuaucggacgcucaugucuugucccaucggggaggugccuucccccuacaacagccgcuuugaauccguugccuggucugcuagcgccugccacgacggaauuaauuggcugaccaucggcaucuccgggccugauaacggagcuguggccguccugaaguauaauggcauuaucacagacaccauuaagagcuggagaaacaauauccuccggacacaagagucugagugugcgugcgugaacggguccuguuucaccgugaugacggauggaccgagcgacggccaggccucuuacaaaauuuuucgcaucgaaaagggcaaaaucgucaagagcguugagaugaaugcucccaacuaucauuacgaagagugcuccuguuacccugauucuagcgagauuacaugcgugugcagagacaauuggcacggguccaaccggcccugggugagcuucaaucagaaccuggaauaucagaucggauacauuuguucuggcaucuuuggggauaauccucgccccaacgacaaaaccggauccugcggcccggucagcucuaauggggccaacggagugaagggcuucuccuuuaaguauggcaacgggguuuggauuggaagaacaaaaagcaucucccuucggaauggcuucgagaugauuugggauccuaacggguggaccggaaccgacaauaacuuuucugugaagcaagacaucaucggcauuaaugaauggagcggguacuccggcucuuucguccagcaucccgagcugacaggacucgauuguauccgcccuugcuucuggguggaacugauuagaggccggcccaaagagaacacgaucuggaccagcggguccagcauuucuuuuuguggaguuaauuccgacacagugggcuggagcuggcccgauggggcugagcuuccuuucaccaucgacaaguga

SEQ ID NO: 213027 - RNA, 1410 nt, Artificial Sequence
  derived and/or modified CDS sequence (opt5) from neuraminidase__InfluenzaA__AEL89794
augaaccccaaucagaagaucauuaccaucggcagcgugugcaugacaauugggauggccaaccugauccuccaaauuggaaauaucaucuccauuuggaucucucacagcauucagcugggcaaccagucccagaucgagacguguaaucaaucugucauuaccuacgaaaacaauacauggguuaaccagaccuaugugaauaucagcaacacaaauuucgcugccgggcaguccguggucucugugaaacuugcgggaaacagcucccugugcccuguuagcggcugggcuauuuacucuaaggacaauuccaucagaaucgggagcaaaggagauguguuugucauucgggagccguucaucucuuguagcccccucgaaugccgcaccuuuuuccugacacagggcgcccuucugaacgacaagcauuccaauggcaccauuaaagauagaucuccuuaucggacgcucauguccugucccaucggggaggugccuagccccuacaacucccgcuuugaaucuguugccuggagcgcuuccgccugccacgacggaauuaacuggcugaccaucggcaucagcgggccugauaauggagcuguggccguccugaaguauaacggcauuaucacagacaccauuaagucuuggagaaauaacauccuccggacacaagaguccgagugugcgugcgugaaugggagcuguuucaccauuaugacggauggaccgucugacggccaggccagcuacaaaaucuuucgcaucgaaaagggcaaaauugugaaguccgucgagaugaacgcucccaauuaucauuacgaagagugcucuuguuacccugauagcuccgagaucacaugcguuugcagagacaacuggcacgggagcaaucggcccugggugucuuucaaccagaaucuggaauaucagauuggauacaucuguuccggcauuuuuggggauaacccucgccccaaugacaaaaccggaagcugcggcccggugucuuccaacggggccaauggagucaagggcuucagcuuuaaguauggcaacgggguguggaucggaagaacaaaauccauuucuagccggaagggcuucgagaugaucugggauccuaacggguggaccggaaccgacaauaacuuuuccaucaaacaagacauuguuggcaucaaugaauggucuggguacagcggcuccuucgugcagcaucccgagcuuacaggacuggauuguauucgcccuugcuucugggucgaacucaucagaggccggcccaaggagaacacgauuuggaccagcgggucuuccaucagcuuuuguggaguuaauucugacgcugugggcugguccuggcccgauggggccgagcugccuuucacaaucgacaaauga

SEQ ID NO: 213028 - RNA, 1410 nt, Artificial Sequence; identical to SEQ ID NO: 212781
  derived and/or modified CDS sequence (opt5) from neuraminidase__InfluenzaA__AEL89804

SEQ ID NO: 213029 - RNA, 1410 nt, Artificial Sequence
  derived and/or modified CDS sequence (opt5) from neuraminidase__InfluenzaA__AEL89815
augaaccccaaucagaagaucauuaccaucggcagcgugugcaugacaauugggauggccaaccugauccuccaaauuggaaauaucaucuccauuuggaucucucacagcauucagcugggcaaccagaaucagaucgagacguguaaccaauccgucauuaccuacgaaaauaacacauggguuaaucagaccuaugugaacaucucuaauacaaacuucgcugccgggcagagcguggucuccgugaaacuugcgggaaauucuagccugugcccuguuuccggcugggcuauuuacagcaaggacaacucuaucagaaucggguccaaaggagauguguuugucauucgggagccguucaucagcuguucuccccucgaaugccgcaccuuuuuccugacacagggcgcccuucugaaugacaagcauuccaacggcaccauuaaagauagaagcccuuaucggacgcucaugucuugucccaucggggaggugccuucccccuacaacagccgcuuugaauccguugccuggucugcuagcgccugccacgacggaauuaauuggcugaccaucggcaucuccgggccugauaacggagcuguggccguccugaaguauaauggcauuaucacagacaccauuaagagcuggagaaacaauauccuccggacacaagagucugagugugcgugcgugaacggguccuguuucaccgugaugacggauggaccgagcgacggccaggccucuuacaaaauuuuucgcaucgaaaagggcaaaaucgucaagagcguugagaugaaugcucccaacuaucauuacgaagagugcuccuguuacccugauucuagcgagauuacaugcgugugcagagacaauuggcacggguccaaccggcccugggugagcuucaaucagaaccuggaauaucagaucggauacauuuguucuggcaucuuuggggauaauccucgccccaacgacaaaaccggauccugcggcccggucagcucuaauggggccaacggagugaagggcuucuccuuuaaguauggcaacgggguuuggauuggaagaacaaaaagcaucuccucucggaauggcuucgagaugauuugggauccuaacggguggaccggaaccgacaauaacuuuagcgugaagcaagacaucaucggcauuaaugaaugguccggguacucuggcagcuucguccagcaucccgagcuuacaggacuggauuguauccgcccuugcuucuggguggaacucauuagaggccggcccaaagagaacacgaucuggaccuccgggagcucuauuuccuuuuguggaguuaauagcgacacagugggcuggucuuggcccgauggggcugagcugccuuucaccaucgacaaguga

SEQ ID NO: 213030 - RNA, 1410 nt, Artificial Sequence
  derived and/or modified CDS sequence (opt5) from neuraminidase__InfluenzaA__AEL89825
augaaccccaaucagaagaucauuaccaucggcagcgugugcaugacaauugggauggccaaccugauccuccaaauuggaaauaucaucuccauuuggaucucucacagcauucagcugggcaaccagaaucagaucgagacguguaaccaauccgucauuaccuacgaaaauaacacauggguuaaucagaccuaugugaacaucucuaauacaaacuucgcugccgggcagagcguggucuccgugaaacuugcgggaaauucuagccugugcccuguuuccggcugggcuauuuacagcaaggacaacucuaucagaaucggguccaaaggagauguguuugucauucgggagccguucaucagcuguucuccccucgaaugccgcaccuuuuuccugacacagggcgcccuucugaaugacaagcauuccaacggcaccauuaaagauagaagcccuuaucggacgcucaugucuugucccaucggggaggugccuucccccuacaacagccgcuuugaauccguugccuggucugcuagcgccugccacgacggaauuaauuggcugaccaucggcaucuccgggccugauaacggagcuguggccguccugaaguauaauggcauuaucacagacaccauuaagagcuggagaaacaauauccuccggacacaagagucugagugugcgugcgugaacggguccuguuucaccgugaugacggauggaccgagcgacggccaggccucuuacaaaauuuuucgcaucgaaaagggcaaaaucgucaagagcguugagaugaaugcucccaacuaucauuacgaagagugcuccuguuacccugauucuagcgagauuacaugcgugugcagagacaauuggcacggggccaaccggcccuggguguccuucaaucagaaccuggaauaucagaucggauacauuuguagcggcaucuuuggggauaauccucgccccaacgacaaaaccggaucuugcggcccggucuccagcaauggggcuaacggagugaagggcuucucuuuuaaguauggcaacgggguuuggauuggaagaacaaaauccaucagcucccggaauggcuucgagaugauuugggauccuaacggguggaccggaaccgacaauaacuuuucuaucaagcaagacaucgugggcauuaaugaauggagcggguacuccggcucuuucguccagcaucccgagcuuacaggacuggauuguauccgcccuugcuucuggguggaacucauuagaggccggcccaaagagaacacgaucuggaccagcggguccagcauuucuuuuuguggaguuaauuccgacacagugggcuggagcuggcccgauggggccgagcugccuuucaccaucgacaaguga

SEQ ID NO: 213031 - RNA, 1410 nt, Artificial Sequence
  derived and/or modified CDS sequence (opt5) from neuraminidase__InfluenzaA__AEL89835
augaaccccaaucagaagaucauuaccaucggcagcgugugcaugacaauugggauggccaaccugauccuccaaauuggaaauaucaucuccauuuggaucucucacagcauucagcugggcaaccagucccagaucgagacguguaaucaaucugucauuaccuacgaaaacaauacauggguuaaccagaccuaugugaauaucagcaacacaaauuucgcugccgggcaguccguggucucugugaaacuugcgggaaacagcucccugugcccuguuagcggcugggcuauuuacucuaaggacaauuccaucagaaucgggagcaaaggagauguguuugucauucgggagccguucaucucuuguagcccccucgaaugccgcaccuuuuuccugacacagggcgcccuucugaacgacaagcauuccaauggcaccauuaaagauagaucuccuuaucggacgcucauguccugucccaucggggaggugccuagccccuacaacucccgcuuugaaucuguugccuggagcgcuuccgccugccacgacggaauuaacuggcugaccaucggcaucagcgggccugauaauggagcuguggccguccugaaguauaacggcauuaucacagacaccauuaagucuuggagaaauaacauccuccggacacaagaguccgagugugugugcgugaaugggagcuguuucaccauuaugacggauggaccgucugacggccaggcgagcuacaaaaucuuucgcaucgaaaagggcaaaauugucaaguccguugagaugaacgcccccaauuaucauuacgaagagugcucuuguuacccugauagcuccgagaucacaugcgugugcagagacaacuggcacgggagcaaucggcccugggugucuuucaaccagaaucuggaauaucagauuggauacaucuguuccggcauuuuuggggauaacccucgccccaaugacaaaaccggaagcugcggcccggucucuuccaacggggcuaauggagugaagggcuucagcuuuaaguauggcaacgggguuuggaucggaagaacaaaauccauuucuagccggaagggcuucgagaugaucugggauccuaacggguggaccggaaccgacaauaacuuuuccaucaaacaagacauugugggcaucaaugaauggucuggguacagcggcuccuucguccagcaucccgagcuuacaggacuggauuguauucgcccuugcuucuggguggaacucaucagaggccggcccaaggagaacacgauuuggaccagcgggucuuccaucagcuuuuguggaguuaauucugacacagugggcugguccuggcccgauggggccgagcugccuuucaccaucgacaaauga

SEQ ID NO: 213032 - RNA, 1410 nt, Artificial Sequence
  derived and/or modified CDS sequence (opt5) from neuraminidase__InfluenzaA__AEL89845
augaaccccaaucagaagaucauuaccaucggcagcgugugcaugacaauugggauggccaaccugauccuccaaauuggaaauaucaucuccauuuggaucucucacagcauucagcugggcaacaaaaaucagaucgagacguguaaccaguccgucauuaccuacgaaaauaacacauggguuaaucaaaccuaugugaacaucucuaauacaaacuucgcuaccgggcagagcguggucuccgugaaacuugccggaaauucuagccugugcccuguuuccggcugggcgauuuacagcaaggacaacucuaucagaaucggguccaagggagauguguuugucauucgggagccguucaucagcuguucuccccucgaaugccgcacauuuuuccugacccagggcgcccuucugaaugacaaacauuccaacggcacgauuaaggauagaagcccuuaucggacccucaugucuugucccaucggggaggcuccuucccccuacaacagccgcuuugaauccguggccuggucugcuagcgccugccacgacggaauuaauuggcugacaaucggcaucuccgggccugauaacggagcuguugccgugcugaaguauaauggcauuaucaccgacacaauuaaaagcuggagaaacaauauccuccggacccaggagucugagugugcgugcgucaacggguccuguuucacggugaugacagauggaccgagcgacggccaagccucuuacaagauuuuucgcaucgaaaaaggcaagaucgugaaaagcgucgagaugaaugcucccaacuaucauuacgaagagugcuccuguuacccugauucuagcgagauuaccugcguuugcagagacaauuggcacggguccaaccggcccugggugagcuucaaucagaaccuggaauaucagaucggauacauuuguucuggcaucuuuggggauaauccucgccccaacgacaagaagggauccugcggcccggugagcucuaauggggccaacggagucaaaggcuucuccuuuaaguauggcaacgggguguggauuggaagaacaaaaagcaucuccucucggaauggcuucgagaugauuugggauccuaacggguggaccggaaccgacaauaacuuuagcaucaagcaggacaucguuggcauuaaugaaugguccggguacucuggcagcuucgugcaacaucccgagcuuacaggacuggauuguauccgcccuugcuucugggucgaacucauuagaggccggcccaaagagaacacgaucuggaccuccgggagcucuauuuccuuuuguggagugaauagcgacacaguuggcuggucuuggcccgauggggcugagcugccuuucaccaucgacaaguga

SEQ ID NO: 213033 - RNA, 1410 nt, Artificial Sequence; identical to SEQ ID NO: 213030
  derived and/or modified CDS sequence (opt5) from neuraminidase__InfluenzaA__AEL89855

SEQ ID NO: 213034 - RNA, 1410 nt, Artificial Sequence; identical to SEQ ID NO: 212329
  derived and/or modified CDS sequence (opt5) from neuraminidase__InfluenzaA__AEL93581

SEQ ID NO: 213035 - RNA, 1410 nt, Artificial Sequence
  derived and/or modified CDS sequence (opt5) from neuraminidase__InfluenzaA__AEL93591
augaaccccaaucagaagaucauuaccaucggcagcgugugcaugacaauugggauggccaaccugauccuccaaauuggaaauaucaucuccauuuggaucucucacagcauucagcugggcaaccagaaucagaucgagacguguaaccaauccgucauuaccuacgaaaauaacacauggguuaaucagaccuaugugaacaucucuaauacaaacuucgcugccgggcagagcguggucuccgugaaucuugcgggaaacucuagccugugcccuguuuccggcugggcuauuuacagcaaagacaauucuaucagaaucggguccaagggagauguguuugucauucgggagccguucaucagcuguucuccccucgaaugccgcaccuuuuuccugacacagggcgcccuucugaacgacaaacauuccaacggcaccauuaaggauagaagcccuuaucggacgcucaugucuugucccaucggggaggugccuucccccuacaauagccgcuuugaauccguugccuggucugcuagcgccugccacgacggaauuaacuggcugaccaucggcaucuccgggccugauaauggagcuguggccguccugaaauauaacggcauuaucacagacaccauuaagagcuggagaaauaacauccuccggacacaagagucugagugugcgugcgugaauggguccuguuucaccauuaugacggauggaccgagcgacggccaggccucuuacaagaucuuucgcaucgaaaaaggcaagauugugaaaagcgucgagaugaacgcucccaauuaucauuacgaagagugcuccuguuacccugauucuagcgagaucacaugcguuugcagagacaacuggcacggguccaaucggcccugggugagcuucaaccagaaucuggaauaucagauuggauacaucuguucuggcauuuuuggggauaacccucgccccaaugacaagaccggauccugcggcccggugagcucuaacggggccaacggagucaaaggcuucuccuuuaaguauggcaaugggguguggaucggaagaacaaagagcauuuccucucggaaaggcuucgagaugaucugggauccuaacggguggaccggaaccgacaauaacuuuagcaucaagcaagacauuguuggcaucaaugaaugguccggguacucuggcagcuucgugcagcaucccgagcuuacaggacuggauuguauucgcccuugcuucugggucgaacucaucagaggccggcccaaagagaacacgauuuggaccuccgggagcucuaucuccuuuuguggagugaauagcgacacaguuggcuggucuuggcccgauggggcugagcugccuuucaccaucgacaaguga

SEQ ID NO: 213036 - RNA, 1410 nt, Artificial Sequence; identical to SEQ ID NO: 212781
  derived and/or modified CDS sequence (opt5) from neuraminidase__InfluenzaA__AEL93601

SEQ ID NO: 213037 - RNA, 1410 nt, Artificial Sequence; identical to SEQ ID NO: 212329
  derived and/or modified CDS sequence (opt5) from neuraminidase__InfluenzaA__AEL93611

SEQ ID NO: 213038 - RNA, 1410 nt, Artificial Sequence; identical to SEQ ID NO: 212329
  derived and/or modified CDS sequence (opt5) from neuraminidase__InfluenzaA__AEL93621

SEQ ID NO: 213039 - RNA, 1410 nt, Artificial Sequence; identical to SEQ ID NO: 212329
  derived and/or modified CDS sequence (opt5) from neuraminidase__InfluenzaA__AEL93631

SEQ ID NO: 213040 - RNA, 1410 nt, Artificial Sequence
  derived and/or modified CDS sequence (opt5) from neuraminidase__InfluenzaA__AEL93641
augaaccccaaucagaagaucauuaccaucggcagcgugugcauuacaaucgggauggccaaccugauucuccaaaucggaaauaucauuuccaucuggauuucucacagcauccagcugggcaaccagaaucagauugagacguguaaccaauccgucaucaccuacgaaaauaacacauggguuaaucagaccuaugugaacauuucuaauacaaacuucgcugccgggcagagcguggucuccgugaaacuugcgggaaauucuagccugugcccuguuuccggcugggcuaucuacagcaaggacaacucuaucagaauuggguccaaaggagauguguuugucauccgggagccguucauuagcuguucuccccucgaaugccgcaccuuuuuccugacacagggcgcccuucugaaugacaagcauuccaacggcaccaucaaagauagaagcccuuaucggacgcucaugucuugucccauuggggaggugccuucccccuacaacagccgcuuugaauccguugccuggucugcuagcgccugccacgacggaaucuccuggcugaccaucggcauuagcgggccugauaauggagcuguggccguccugaaguauaacggcaucauuacagacaccaucaagucuuggagaaauaacauucuccggacacaagaguccgagugugcgugcgugaaugggagcuguuucaccgugaugacggauggaccgucugacggccaggccagcuacaaaaucuuucgcaucgaaaagggcaaaauugucaaguccguugagaugaacgcucccaauuaucauuacgaagagugcucuuguuacccugauagcuccgagaucacaugcgugugcagagacaacuggcacgggagcaaucggcccugggugucuuucaaccauaaucuggaauaucagauuggauacaucuguuccggcauuuuuggggauaacccucgccccaaugacaaaaccggaagcugcggcccggucucuuccaacggggccaauggagugaagggcuucagcuuuaaguauggcaacgggguuuggaucggaagaacaaaauccauuucuagccggaacggcuucgagaugaucugggauccuaauggguggaccggaaccgacaacaauuuuuccaucaagcaggacauugugggcaucaacgaauggucuggguacagcggcuccuucguccaacaccccgagcuuacaggacuggauuguauucgcccuugcuucuggguggaacucaucagaggccagcccaaagagaauacgauuuggaccagcgggucuuccaucagcuuuuguggaguuaacucugacacagugggcugguccuggcccgauggggcugagcugccuuucaccaucgacaaguga

SEQ ID NO: 213041 - RNA, 1410 nt, Artificial Sequence; identical to SEQ ID NO: 212880
  derived and/or modified CDS sequence (opt5) from neuraminidase__InfluenzaA__AEL94890

SEQ ID NO: 213042 - RNA, 1410 nt, Artificial Sequence
  derived and/or modified CDS sequence (opt5) from neuraminidase__InfluenzaA__AEL95429
augaaccccaaucagaagaucauuaccaucggcagcgugugcaugacaauugggauggccaaccugauccuccaaauuggaaauaucaucuccauuuggaucucucacagcauucagcugggcaaccagucccagaucgagacguguaaucaaucugucauuaccuacgaaaacaauacauggguuaaccagaccuaugugaauaucagcaacacaaauuucgcugccgggcaguccguggucucugugaaacuugcgggaaacagcucccugugcccuguuagcggcugggcuauuuacucuaaggacaauuccaucagaaucgggagcaaaggagauguguuugucauucgggagccguucaucucuuguagcccccucgaaugccgcaccuuuuuccugacacagggcgcccuucugaacgacaagcauuccaauggcaccauuaaagauagaucuccucaccggacgcucauguccugucccaucggggaggugccuagccccuauaacucccgcuuugaaucuguugccuggagcgcuuccgccugccaugacggaauuaacuggcugaccaucggcaucagcgggccugauaauggagcuguggccguccugaaguacaacggcauuaucacagacaccauuaagucuuggagaaauaacauccuccggacacaagaguccgagugugcgugcgugaaugggagcuguuucaccauuaugacggauggaccgucugacggccaggccagcuauaaaaucuuucgcaucgaaaagggcaaaauugugaaguccgucgagaugaacgcucccaauuaccacuaugaagagugcucuuguuacccugauagcuccgagaucacaugcguuugcagagacaacuggcaugggagcaaucggcccugggugucuuucaaccagaaucuggaauaccagauuggauauaucuguuccggcauuuuuggggauaacccucgccccaaugacaaaaccggaagcugcggcccggugucuuccaacggggccaauggagucaagggcuucagcuuuaaguacggcaacgggguguggaucggaagaacaaaauccauuucuagccggaagggcuucgagaugaucugggauccuaacggguggaccggaaccgacaauaacuuuuccaucaaacaagacauuguuggcaucaaugaauggucuggguauagcggcuccuucgugcagcaccccgagcuuacaggacuggauuguauucgcccuugcuucugggucgaacucaucagaggccggcccaaggagaacacgauuuggaccagcgggucuuccaucagcuuuuguggaguuaauucugacacagugggcugguccuggcccgauggggcugagcugccuuucaccaucgacaaauga

SEQ ID NO: 213043 - RNA, 1410 nt, Artificial Sequence
  derived and/or modified CDS sequence (opt5) from neuraminidase__InfluenzaA__AEL97634
augaaccccaaucagaagaucauuaccaucggcagcgugugcaugacaauugggauggccaaccugauccuccaaauuggaaauaucaucuccauuugggucucucacagcauccagcugggcaaccagaaucagauugagacguguaaccaauccguuaucaccuacgaaaauaacacaugggugaaucagaccuaugugaacauuucuaauacaaacuucgcugccgggcagagcgucguguccguuaaacuugcgggaaauucuagccugugcccuguguccggcugggcuaucuacagcaaggacaacucuauuagaaucggguccaaaggagaugucuuugugauccgggagccguucauuagcuguucuccccucgaaugccgcaccuuuuuccugacacagggcgcccuucugaaugacaagcauuccaacggcaccaucaaagauagaagcccuuaucggacgcucaugucuugucccauuggggagguuccuucccccuacaacagccgcuuugaauccguggccuggucugcuagcgccugccacgacggaaucaauuggcugaccauuggcaucuccgggccugauaacggagcugucgccgugcugaaguauaauggcaucauuacagacaccaucaagagcuggagaaacaauauucuccggacacaagagucugagugugcgugcgugaacggguccuguuucaccgucaugacggauggaccgagcgacggccaggccucuuacaaaaucuuucgcauugaaaagggcaaaaucguuaagagcguggagaugaaugcucccaacuaucauuacgaagagugcuccuguuacccugauucuagcgagaucacaugcgugugcagagacaauuggcacggguccaaccggcccugggucagcuucaaucagaaccuggaauaucagauuggauacaucuguucuggcauuuuuggggauaauccucgccccaacgacaaaaccggauccugcggcccggugagcucuaauggggccaacggaguuaagggcuucuccuuuaaguauggcaacgggguguggaucggaagaacaaaaagcauuuccucucggaauggcuucgagaugaucugggauccuaacggguggaccggaaccgacaauaacuuuagcauuaagcaagacaucgucggcgugaaugaaugguccggguacucuggcagcuucguucagcaucccgagcuuacaggacuggauuguauccgcccuugcuucuggguggaacucauuagaggccggcccaaagagaacacgaucuggaccuccgggagcucuauuuccuuuuguggagucaauagcgacacagugggcuggucuuggcccgauggggcugagcugccuuucaccaucgacaaguga

SEQ ID NO: 213044 - RNA, 1410 nt, Artificial Sequence; identical to SEQ ID NO: 208810
  derived and/or modified CDS sequence (opt5) from neuraminidase__InfluenzaA__AEL99667

SEQ ID NO: 213045 - RNA, 1410 nt, Artificial Sequence; identical to SEQ ID NO: 208810
  derived and/or modified CDS sequence (opt5) from neuraminidase__InfluenzaA__AEL99677

SEQ ID NO: 213046 - RNA, 1410 nt, Artificial Sequence; identical to SEQ ID NO: 207848
  derived and/or modified CDS sequence (opt5) from neuraminidase__InfluenzaA__AEM53471

SEQ ID NO: 213047 - RNA, 1413 nt, Artificial Sequence; identical to SEQ ID NO: 208525
  derived and/or modified CDS sequence (opt5) from neuraminidase__InfluenzaA__AEM60040

SEQ ID NO: 213048 - RNA, 1413 nt, Artificial Sequence; identical to SEQ ID NO: 208115
  derived and/or modified CDS sequence (opt5) from neuraminidase__InfluenzaA__AEM60061

SEQ ID NO: 213049 - RNA, 1410 nt, Artificial Sequence
  derived and/or modified CDS sequence (opt5) from neuraminidase__InfluenzaA__AEM60072
augaaccccaaucagaagaucauuaccaucggcagcgugucccugacaauugccacgaucugcuuccucaugcaaauugcuauccuggucaccacaguuacccuucacuuuaaacaguacgaguguucuagcccuccgaacaaucaggugaugcccugcgaaccuacaaucauugagagaaacaucaccgaaauuguguaucugacaaauaccacgaucgagaaggaaauuugucccaaacucgucgaguaccggaacugguccaagccucagugcaaaaucaccggguucgcccccuuuucuaaggacaauagcauucgccuguccgcgggaggcgauaucugggugacaagagagccuuauguuucuugugacccggggaagugcuaccaauucgcucuuggacagggcaccacacugaacaaucggcauagcaacgauaccgugcacgaccgcacgcccuauagaacacuccugaugaaugaacugggggucccuuuucaucucggaaccaaacagguguguaucgccugguccuccucuuccugccacgauggcaaggccuggcugcauguuugugugacaggccacgacgagaacgcuaccgccagcuucauuuacgaugggcggcuugucgacucuaucggauccuggagcaaaaauauucugcgcacccaggaaucugagugcguguguaucaacggcacaugcacgguggucaugaccgauggguccgcuagcgagagagccgacacaaagauucucuuuaucgaagagggaaaaaucguucacauuagcccccugucuggcagcgcgcaacauguggaagagugcuccuguuauccucgguaccccggggugcgcugcgucuguagagauaauuggaagggaagcaaccggccgaucguggacauuaacguuaaggauuacucuaucguguccagcuaugucugcucuggccuugugggcgacaccccucgcaaaaaugacagaagcuccucuagcuacugucggaaccccaauaacgaaaaggggucccacggaguuaaaggcugggccuucgaugacgggaaugauguguggaugggacgcacaauuggcgaggagcugagaagcggguaugaaaccuuuaaggucaucggaggcuggucuacgccuaacuccaaacuccagaucaauagacaggugauugucgacagcggcaaccggucuggguacuccggaaucuucagcguggagggcaaguccugcauuaaucgcuguuuuuauguugaacugauccgggggagagagcaggaaacacgcgugugguggaccucuaacagcauugucguguucugcggaaccuccggcacauacgggaccggcucuuggcccgauggagcugacaucaaucugaugcccauuuga

SEQ ID NO: 213050 - RNA, 1410 nt, Artificial Sequence; identical to SEQ ID NO: 208810
  derived and/or modified CDS sequence (opt5) from neuraminidase__InfluenzaA__AEM62774

SEQ ID NO: 213051 - RNA, 1410 nt, Artificial Sequence; identical to SEQ ID NO: 208810
  derived and/or modified CDS sequence (opt5) from neuraminidase__InfluenzaA__AEM62783

SEQ ID NO: 213052 - RNA, 1410 nt, Artificial Sequence
  derived and/or modified CDS sequence (opt5) from neuraminidase__InfluenzaA__AEM62792
augaaccccaaucagaagaucauuaccaucggcagcgugugcaugacaauugggauggccaaccugauccuccaaauuggaaauaucaucuccauuuggaucucucacagcauucagcugggcucccagaaccagaucgagacguguaaucaaucugucauuaccuacgaaaacaauacauggguuaaccagaccuaugugaauaucagcaacacaaauuucgcugccgggcaguccgugauuucugucagacuugcgggaaacagcucccugugcccugugagcggcugggcuaucuacucuaaagacaauuccauccggauugggagcaagggagauguuuuugugauccgcgagccguucauuucuuguagcccccucgaaugcagaaccuuuuuccugacacagggcgcccuucugaacgacaaacauuccaauggcaccaucaaggaucggucuccuuaucgcacgcucauguccugucccauuggggaggucccuagccccuacaacuccagauuugaaucuguggccuggagcgcuuccgccugccacgacggaaucaacuggcugaccaucggcauuagcgggccugauaauggagcuguugccgugcugaaauauaacggcaucauuacagacaccaucaagucuuggcggaauaacauucuccgcacacaagaguccgagugugcgugcgucaaugggagcuguuucaccgugaugacggauggaccgucugacggccaggccagcuacaagaucuuuagaaucgaaaaaggcaagauugugaaauccgucgagaugaacgcucccaauuaucauuacgaagagugcucuuguuacccugauagcuccgagaucacaugcguuugccgggacaacuggcacgggagcaaucgccccugggugucuuucaaccagaaucuggaauaucagauuggauacaucuguuccggcauuuuuggggauaacccuagacccaaugacaagaccggaagcugcggcccggugucuuccaacggggccaauggagucaaaggcuucagcuuuaaguauggcaacgggguguggaucggacggacaaaguccauuucuagccgcaacggcuucgagaugaucugggauccuaauggguggaccggaaccgacaacaauuuuuccaucaaacaagacauuaucggcauuaacgaauggucuggguacagcggcuccuucguucagcaucccgagcuuacaggacuggauuguaucagaccuugcuucuggguggaacucauucggggccgccccaaggagaauacgaucuggaccagcgggucuuccaucagcuuuuguggagucaacucugacacagugggcugguccuggcccgauggggcugagcugccuuucaccauugacaaauga

SEQ ID NO: 213053 - RNA, 1410 nt, Artificial Sequence; identical to SEQ ID NO: 208810
  derived and/or modified CDS sequence (opt5) from neuraminidase__InfluenzaA__AEM62801

SEQ ID NO: 213054 - RNA, 1410 nt, Artificial Sequence
  derived and/or modified CDS sequence (opt5) from neuraminidase__InfluenzaA__AEM62810
augaaccccaaucagaagaucauuaccaucggcagcgugugcaugacaauugggaugggaaaccugauccuccaaauuggcaauaucaucuccauuuggaucucucacagcauucagcuggggaaccagaaucagaucgagacguguaaccaauccgucauuaccuacgaaaauaacacauggguuaaucagaccuaugugaacaucucuaauacaaacuucgccgcuggacagagcguggucuccgugaaacuugccggcaauucuagccugugcccuguuuccgggugggcgauuuacagcaaggacaacucuaucagaaucggauccaaaggcgauguguuugucauucgggagccguucaucagcuguucuccccucgaaugccgcaccuuuuuccugacacagggcgcccuucugaaugacaagcauuccaacgggaccauuaaagauagaagcccuuaucggacgcucaugucuugucccaucggagaggugccuucccccuacaacagccgcuuugaauccguugcuuggucugccagcgcuugccacgacggcauuaauuggcugaccaucgggaucuccggaccugauaacggcgccguggcuguccugaaguauaaugggauuaucacagacaccauuaagagcuggagaaacaauauccuccggacacaagagucugagugugccugcgugaacggauccuguuucaccgugaugacggauggcccgagcgacggccaggcgucuuacaaaauuuuucgcaucgaaaaggggaaaaucgucaagagcguugagaugaaugcccccaacuaucauuacgaagagugcuccuguuacccugauucuagcgagauuacaugcgugugcagagacaauuggcacggauccaaccggcccugggugagcuucaaucagaaccuggaauaucagaucggcuacauuuguucugggaucuuuggagauaauccucgccccaacgacaaaaccggcuccugcgggccggucagcucuaauggagcuaacggcgugaagggcuucuccuuuaaguaugggaacggaguuuggauuggcagaacaaaaagcaucuccucucggaauggguucgagaugauuugggauccuaacggauggaccggcaccgacaauaacuuuagcaucaagcaagacaucguggggauuaaugaaugguccggcuacucuggcagcuucguccagcaucccgagcuuacaggacuggauuguauccgcccuugcuucuggguggaacucauuagagggcggcccaaagagaacacgaucuggaccuccggaagcucuauuuccuuuuguggcguuaauagcgacacagugggguggucuuggcccgauggagccgagcugccuuucaccaucgacaaguga

SEQ ID NO: 213055 - RNA, 1410 nt, Artificial Sequence
  derived and/or modified CDS sequence (opt5) from neuraminidase__InfluenzaA__AEM62819
augaaccccaaucagaagaucauuaccaucggcagcgugugcaugacaauugggauggccaaccugauccuccaaauuggaaauaucaucuccauuuggaucucucacagcauucagcugggcaaccagaaucagaucgagacguguaaccaauccgucauuaccuacgaaaaugacacauggguuaaccagaccuaugugaauaucucuaacacaaauuucgcugccgggcagagcguggucuccgugaaacuugcgggaaacucuagccugugcccuguuuccggcugggcuauuuacagcaaggauaauucuaucagaaucggguccaaaggagacguguuugucauucgggagccguucaucagcuguucuccccucgaaugccgcaccuuuuuccugacacagggcgcccuucugaacgauaagcauuccaauggcaccauuaaagacagaagcccuuaucggacgcucaugucuugucccaucggggaggugccuucccccuacaacagccgcuuugaauccguugccuggucugcuagcgccugccacgauggaauuaacuggcugaccaucggcaucuccgggccugacaauggagcuguggccguccugaaguauaacggcauuaucacagauaccauuaagagcuggagaaauaacauccuccggacacaagagucugagugugcgugcgugaauggguccuguuucaccgugaugacggacggaccgagcgauggccaggccucuuacaaaauuuuucgcaucgaaaagggcaaaaucgucaagagcguugagaugaacgcucccaauuaucauuacgaagagugcuccuguuacccugacucuagcgagauuacaugcgugugcagagauaacuggcacggguccaaucggcccugggugagcuucaaccagaaucuggaauaucagaucggauacauuuguucuggcaucuuuggggacaacccucgccccaaugauaaaaccggauccugcggcccggucagcucuaacggggccaauggagugaagggcuucuccuuuaaguauggcaacgggguuuggauuggaagaacaaaaagcaucuccucucggaacggcuucgagaugauuugggacccuaauggguggaccggaaccgacaacaauuuuagcaucaagcaagauaucgugggcauuaacgaaugguccggguacucuggcagcuucguccagcaucccgagcuuacaggacuggacuguauccgcccuugcuucuggguggaacucauuagaggccggcccaaagagaauacgaucuggaccuccgggagcucuauuuccuuuuguggaguuaacagcgauacagugggcuggucuuggcccgacggggcugagcugccuuucaccaucgauaaguga

SEQ ID NO: 213056 - RNA, 1410 nt, Artificial Sequence; identical to SEQ ID NO: 208810
  derived and/or modified CDS sequence (opt5) from neuraminidase__InfluenzaA__AEM62828

SEQ ID NO: 213057 - RNA, 1410 nt, Artificial Sequence; identical to SEQ ID NO: 209393
  derived and/or modified CDS sequence (opt5) from neuraminidase__InfluenzaA__AEM62837

SEQ ID NO: 213058 - RNA, 1410 nt, Artificial Sequence; identical to SEQ ID NO: 208810
  derived and/or modified CDS sequence (opt5) from neuraminidase__InfluenzaA__AEM62846

SEQ ID NO: 213059 - RNA, 1410 nt, Artificial Sequence
  derived and/or modified CDS sequence (opt5) from neuraminidase__InfluenzaA__AEM62855
augaaccccaaucagaagaucauuaccaucggcagcgugugcauuacaaucgggauggccaaccugauucuccaaaucggaaauaucauuuccaucuggauuucucacagcauccagcugggcaaccagaaucagauugagacguguaaccaauccgucaucaccuacgaaaauaacacauggguuaaucagaccuaugugaacauuucuaauacaaacuucgcugccgggcagagcguggucuccgugaaacuugcgggaaauucuagccugugcccuguuuccggcugggcuaucuacagcaaggacaacucugugagaaucggguccaaaggagaugucuuugugauucgggagccguucaucagcuguucuccccucgaaugccgcaccuuuuuccugacacagggcgcccuucugaaugacaagcauuccaacggcaccauuaaagauagaagcccuuaucggacgcucaugucuugucccaucggggagguuccuucccccuacaacagccgcuuugaauccguggccuggucugcuagcgccugccacgacggaauuaauuggcugaccaucggcaucuccgggccugauaacggagcugucgccgugcugaaguauaauggcauuaucacagacaccauuaagagcuggagaaacaauauccuccggacacaagagucugagugugcgugcgugaacggguccuguuucaccgucaugacggauggaccgagcaauggccaggccucuuacaaaauuuuucgcaucgaaaagggcaaaaucguuaagagcguggagaugaacgcucccaauuaucauuacgaagagugcuccuguuacccugacucuggggagauuacaugcgugugcagagauaacuggcacggaagcaaucggcccugggucuccuucaaccagaaucuggaauaucagaucggcuacauuuguagcgggaucuuuggagacaacccucgccccaaugauaaaaccggcucuugcgggccgguguccagcaacggagccaacggcguuaagggcuucucuuuuaaguaugggaauggaguguggauuggcagaacaaaauccaucagcucccggaacggguucgagaugauuugggacccuaauggauggaccggcaccgauaacaauuuuucuaucaagcaagacaucgucgggauuaacgaauggagcggcuacuccggaucuuucgugcagcaucccgagcuuacaggccuggacuguauccgcccuugcuucuggguugaacucauuagagggcggcccaaagagaauacgaucuggaccagcggauccagcauuucuuuuuguggcgugaacuccgauacagucggguggagcuggcccgacggagcugagcugccuuucaccaucgauaaguga

SEQ ID NO: 213060 - RNA, 1410 nt, Artificial Sequence
  derived and/or modified CDS sequence (opt5) from neuraminidase__InfluenzaA__AEM62864
augaaccccaaucagaagaucauuaccaucggcagcgugugcaugacaauugggauggccaaccugauccuccaaauuggaaauaucaucuccauuuggaucucucacagcauucagcugggcaaccagaaucagaucgagacguguaaccaauccgucauuaccuacgaaaauaacacauggguuaaucagaccuaugugaacaucucuaauacaaacuucgcugccgggcagagcguggucuccgugaaacuugcgggaaauucuagccugugcccuguuuccggcugggcuauuuacagcaaggacaacucuaucagaaucggguccaaaggagauguguuugucauucgggagccguucaucagcuguucuccccucgaaugccgcaccuuuuuccugacacagggcgcccuucugaaugacaagcauuccaacggcaccauuaaagauagaagcccuuaucggacgcucaugucuugucccaucggggaggugccuucccccuacaacagccgcuuugaauccguugccuggucugcuagcgccugccacgacggaauuaauuggcugaccaucggcaucuucgggccugauaacggagcuguggccguccugaaguauaauggcauuaucacagacaccauuaaguccuggagaaacaauauccuccggacacaagagagcgagugugcgugcgugaacgggucuuguuuuaccgugaugacggauggaccguccgacggccaggccagcuacaaaauuuuccgcaucgaaaagggcaaaaucgucaagucuguugagaugaaugcucccaacuaucauuacgaagagugcagcuguuacccugauuccucugagauuacaugcgugugcagagacaauuggcacgggagcaaccggcccuggguguccuuuaaucagaaccuggaauaucagaucggauacauuuguagcggcaucuucggggauaauccucgccccaacgacaaaaccggaucuugcggcccggucuccagcaauggggccaacggagugaagggcuuuucuuucaaguauggcaacgggguuuggauuggaagaacaaaauccaucagcucccggaauggcuuugagaugauuugggauccuaacggguggaccggaaccgacaauaacuucucuaucaagcaagacaucgugggcauuaaugaauggagcggguacuccggcucuuucguccagcaucccgagcuuacaggacuggauuguauccgcccuugcuuuuggguggaacucauuagaggccggcccaaagagaacacgaucuggaccagcggguccagcauuucuuucuguggaguuaauuccgacacagugggcuggagcuggcccgauggggcugagcugccuuuuaccaucgacaaguga

SEQ ID NO: 213061 - RNA, 1410 nt, Artificial Sequence
  derived and/or modified CDS sequence (opt5) from neuraminidase__InfluenzaA__AEM62872
augaaccccaaucagaagaucauuaccaucggcagcgugugcaugacaauugggauggccaaccugauccuccaaauuggaaauaucaucuccauuuggaucucucacagcauucagcugggcaaccagaaucagaucgagacguguaaccaauccgucauuaccuacgaaaauaacacauggguuaaucagaccuaugugaacaucucuaauacaaacuucgcugccgggcagagcguggucuccgugaaacuugcgggaaauucuagccugugcccuguuuccggcugggcuauuuacagcaaggacaacucuaucagaaucggguccaaaggagauguguuugucauucgggagccguucaucagcuguucuccccucgaaugccgcaccuuuuuccugacacagggcgcccuucugaaugacaagcauuccaacggcaccauuaaagauagaagcccuuaucggacgcucaugucuugucccaucggggaggugccuucccccuacaacagccgcuuugaauccguugccuggucugcuagcgccugccacgacggaauuaauuggcugaccaucggcaucuccgggccugauaacggagcuguggccguccugaaguauaauggcauuaucacagacaccauuaagagcuggagaaacaauauccuccggacacaagagucugagugugcgugcgugaacggguccuguuucaccgugaugacggauggaccgagcgacggccaggccucuuacaaaauuuuucgcaucgaaaagggcaaaaucgucaagagcguugagaugaaugcucccaacuaucauuacgaagagugcuccuguuacccugauucuagcgagauuacaugcgugugcagagacaauuggcacggguccaaccggcccugggugagcuucaaucagaaccuggaauaucagaucggauacauuuguucuggcaucuuuggggauaauccucgccccaacgacaaaaccggauccugcggcccggucagcuucaauggggccaacggagugaagggcuuuucuuucaaguauggcaacgggguuuggauuggaagaacaaaauccaucagcucccggaauggcuuugagaugauuugggauccuaacggguggaccggaaccgacaauaacuucucuaucaagcaagacaucgugggcauuaaugaauggagcggguacuccggcucuuucguccagcaucccgagcuuacaggacuggauuguauccgcccuugcuuuuggguggaacucauuagaggccggcccaaagagaacacgaucuggaccagcggguccagcauuucuuucuguggaguuaauuccgacacagugggcuggagcuggcccgauggggcugagcugccuuuuaccaucgacaaguga

SEQ ID NO: 213062 - RNA, 1410 nt, Artificial Sequence; identical to SEQ ID NO: 208810
  derived and/or modified CDS sequence (opt5) from neuraminidase__InfluenzaA__AEM92310

SEQ ID NO: 213063 - RNA, 1410 nt, Artificial Sequence; identical to SEQ ID NO: 210272
  derived and/or modified CDS sequence (opt5) from neuraminidase__InfluenzaA__AEM92320

SEQ ID NO: 213064 - RNA, 1410 nt, Artificial Sequence
  derived and/or modified CDS sequence (opt5) from neuraminidase__InfluenzaA__AEM92340
augaaccccaaucagaagaucauuaccaucggcagcgugugcaugacaauugggauggccaaccugauccuccaaauuggaaauaucaucuccauuuggaucucucacagcauucagcugggcaaccagaaucagaucgagacguguaaccaauccgucauuaccuacgaaaauaacacauggguuaaucagaccuaugugaacaucucuaauacaaacuucgcugccgggcagagcguggucuccgugaaacuugcgggaaauucuagccugugcccuguuuccggcugggcuauuuacagcaaggacaacucuaucagaaucggguccaaaggagauguguuugucauucgggagccguucaucagcuguucuccccucgaaugccgcaccuuuuuccugacacagggcgcccuucugaaugacaagcauuccaacggcaccauuaaagauagaagcccuuaucggacgcucaugucuugucccaucggggaggugccuucccccuacaacagccgcuuugaauccguugccuggucugcuagcgccugccacgacggaauuaauuggcugaccaucggcaucuccgggccugauaacggagcuguggccguccugaaguauaauggcauuaucacagacaccauuaagagcuggagaaacaauauccuccggacacaagagucugagugugcgugcgugaacggguccuguuucaccauuaugacggauggaccgagcgacggccaggccucuuacaaaaucuuucgcaucgaaaagggcaaaauugucaagagcguggagaugaaugcucccaacuaucauuacgaagagugcuccuguuacccugauucuagcgagaucacaugcguuugcagagacaauuggcacggguccaaccggcccugggugagcuucaaucagaaccuggaauaucagauuggauacaucuguucuggcauuuuuggggauaauccucgccccaacgacaaaaccggauccugcggcccggugagcucuaauggggccaacggagucaagggcuucuccuuuaaguauggcaacgggguguggaucggaagaacaaaaagcauuuccucucggaagggcuucgagaugaucugggauccuaauggguggacccgcaccgacaacaauuuuagcaucaaacaagacauuguuggaaucaacgaaugguccggcuacucugggagcuucgugcagcaucccgagcuuacaggccuggauuguauuagaccuugcuucugggucgaacucauccggggacgccccaaggagaauacgauuuggaccuccggcagcucuaucuccuuuuguggggugaacagcgacacaguuggauggucuuggcccgauggcgcugagcugccuuucaccaucgacaaauga

SEQ ID NO: 213065 - RNA, 1410 nt, Artificial Sequence; identical to SEQ ID NO: 210272
  derived and/or modified CDS sequence (opt5) from neuraminidase__InfluenzaA__AEM92350

SEQ ID NO: 213066 - RNA, 1410 nt, Artificial Sequence
  derived and/or modified CDS sequence (opt5) from neuraminidase__InfluenzaA__AEM92360
augaaccccaaucagaagaucauuaccaucggcagcgugugcaugacaauugggauggccaaccugauccuccaaauuggaaauaucaucuccauuuggaucucucacagcauucagcugggcaaccagaaucagaucgagacguguaaccaauccgucauuaccuacgaaaauaacacauggguuaaucagaccuaugugaacaucucuaauacaaacuucgcugccgagcagagcguggucuccgugaaacuugcggggaauagcagccugugcccuguuuccggaugggcuauuuacagcaaggacaacucuaucagaaucggcuccaaaggggauguguuugucauucgggaaccguucaucagcuguucuccccucgagugccgcaccuuuuuccugacacagggagcccuucugaaugacaagcauuccaacggcaccauuaaagauagaagcccuuaucggacgcucaugucuugucccaucggcgaagugccuucccccuacaacagccgcuuugaguccguugccuggucugcuagcgccugccacgacgggauuaauuggcugaccaucggaaucuccggcccugauaacggggcuguggccguccugaaguauaauggaauuaucacagacaccauuaagagcuggagaaacaauauccuccggacacaagagucugaaugugcgugcgugaacggcuccuguuucaccauuaugacggaugggccgagcgacggacaggccucuuacaaaaucuuucgcaucgagaagggcaaaauugugaagucugucgaaaugaaugcucccaacuaucauuacgaggagugcuccuguuacccugauucuagcgaaaucacaugcguuugcagagacaauuggcacggcuccaaccggcccugggugagcuucaaucagaaccuggaguaucagauuggguacaucuguucuggaauuuuuggcgauaauccucgccccaacgacaaaaccggguccugcggaccggugagcucuaauggcgccaacggggucaagggauucuccuuuaaguauggcaacggcguguggaucgggagaacaaaaagcauuuccucucggaagggauucgaaaugaucugggauccuaauggcuggaccgggaccgacaacaauuuuagcaucaaacaagacauuguuggaaucaacgagugguccggcuacucugggagcuucgugcagcaucccgaacuuacaggccuggauuguauucgcccuugcuucugggucgagcucaucagaggacggcccaaggagaauacgauuuggaccuccggcagcucuaucuccuuuuguggggugaacagcgacacaguuggauggucuuggcccgauggcgcugaacugccuuucaccaucgacaaauga

SEQ ID NO: 213067 - RNA, 1410 nt, Artificial Sequence; identical to SEQ ID NO: 213064
  derived and/or modified CDS sequence (opt5) from neuraminidase__InfluenzaA__AEM92370

SEQ ID NO: 213068 - RNA, 1410 nt, Artificial Sequence; identical to SEQ ID NO: 213064
  derived and/or modified CDS sequence (opt5) from neuraminidase__InfluenzaA__AEM92380

SEQ ID NO: 213069 - RNA, 1410 nt, Artificial Sequence
  derived and/or modified CDS sequence (opt5) from neuraminidase__InfluenzaA__AEM92399
augaaccccaaucagaagaucauuaccaucggcagcgugugcaugacaauugggauggccaaccugauccuccaaauuggaaauaucaucuccauuuggaucucucacagcauucagcugggcaaccagaaucagaucgagacguguaaccaauccgucauuaccuacgaaaauaacacauggguuaaucagaccuaugugaacaucucuaauacaaacuucgcugccgggcagagcguggucuccgugaaacuugcgggaaauucuagccugugcccuguuuccggcugggcuauuuacagcaaggacaacucuaucagaaucggguccaaaggagauguguuugucauucgggagccguucaucagcuguucuccccucgaaugccgcaccuuuuuccugacacagggcgcccuucugaaugacaagcauuccaacggcaccauuaaagauagaagcccuuaucggacgcucaugucuugucccaucggggaggugccuucccccuacaacagccgcuuugaauccguugccuggucugcuagcgccugccacgacggaaccaauuggcugacaauuggcaucuccgggccugauaacggagcuguggccguccugaaguauaauggcaucauuaccgacacaaucaagagcuggagaaacaauauucuccggacccaagagucugagugugcgugcgugaacggguccuguuucacggugaugacagauggaccgagcgacggccaggccucuuacaaaaucuuucgcauugaaaagggcaaaaucgucaagagcguugagaugaaugcucccaacuaucauuacgaagagugcuccuguuacccugauucuagcgagauuaccugcgugugcagagacaauuggcacggguccaaccggcccugggugagcuucaaucagaaccuggaauaucagaucggauacaucuguucuggcauuuuuggggauaauccucgccccaacgacaaaacaggauccugcggcccgguccuuagcaauggggccaacggagugaagggcuucucuuuuaaguauggcaacgggguuuggaucggaagaaccaaauccauuagcucccggaauggcuucgagaugaucugggauccuaacggguggaccggaacagacaauaacuuuucuauuaagcaagacaucgugggcaucaaugaauggagcggguacuccggcucuuucguccagcaucccgagcugacgggacucgauuguauucgcccuugcuucuggguggaacugaucagaggccggcccaaagagaacaccauuuggacaagcggguccagcaucucuuuuuguggaguuaauuccgacaccgugggcuggagcuggcccgauggggcugagcuuccuuucacaauugacaaguga

SEQ ID NO: 213070 - RNA, 1410 nt, Artificial Sequence; identical to SEQ ID NO: 213069
  derived and/or modified CDS sequence (opt5) from neuraminidase__InfluenzaA__AEM92409

SEQ ID NO: 213071 - RNA, 1410 nt, Artificial Sequence; identical to SEQ ID NO: 209234
  derived and/or modified CDS sequence (opt5) from neuraminidase__InfluenzaA__AEM92419

SEQ ID NO: 213072 - RNA, 1410 nt, Artificial Sequence
  derived and/or modified CDS sequence (opt5) from neuraminidase__InfluenzaA__AEM92430
augaaccccaaucagaagaucaugaccauuggcagcgugugcaugacaaucgggauggccaaccugauucuccaaaucggaaauauuaucuccaucuggauuucucacagcauccagcugggcaaccagaaucagauugagacguguaaccaauccgucaucaccuacgaaaauaacacauggguuaaucagaccuaugugaacauuucuaauacaaacuucgcugccgggcagagcguggucuccgugaaacuugcgggaaauucuagccugugcccuguuuccggcugggcuaucuacagcaaggacaacucuauuagaaucggguccaaaggagauguguuugucauccgggagccguucauuagcuguucuccccucgaaugccgcaccuuuuuccugacacagggcgcccuucugaaugacaagcauuccaacggcaccaucaaagauagaagcccuuaucggacgcucaugucuugucccauuggggaggugccuucccccuacaacagccgcuuugaauccguugccuggucugcuagcgccugccacgacggaaucaauuggcugaccauuggcaucuccgggccugauaacggagcuguggccguccugaaguauaauggcaucauuacagacaccaucaagagcuggagaaacaauauucuccggacacaagagucugagugugcgugcgugaacggguccuguuucaccgugaugacggauggaccgagcgacggccaggccucuuacaaaaucuuucgcauugaaaagggcaaaaucgucaagagcguugagaugaaugcucccaacuaucauuacgaagagugcuccuguuacccugauucuagcgagaucacaugcgugugcagagacaauuggcacggguccaaccggcccugggugagcuucaaucagaaccuggaauaucagauuggauacaucuguucuggcauuuuuggggauaauccucgccccaacgacaaaaccggauccugcggcccggucagcucuaauggggccaacggagugaagggcuucuccuuuaaguauggcaacgggguuuggaucggaagaacaaaaagcauuuccucucggaauggcuucgagaugaucugggauccuaacggguggaccggaaccgacaauaacuuuagcauuaagcaagacaucgugggcaucaaugaaugguccggguacucuggcagcuucguccagcaucccgagcuuacaggacuggauuguauucgcccuugcuucuggguggaacucaucagaggccggcccaaagagaacacgauuuggaccuccgggagcucuaucuccuuuuguggaguuaauagcgacacagugggcuggucuuggcccgauggggcugagcugccuuucaccauugacaaguga

SEQ ID NO: 213073 - RNA, 1410 nt, Artificial Sequence
  derived and/or modified CDS sequence (opt5) from neuraminidase__InfluenzaA__AEM92440
augaaccccaaucagaagaucauuaccaucggcagcgugugcauuacaaucgggauggccaaccugauucuccaaaucggaaauaucauuuccaucuggauuucucacagcauccagcugggcaaccagucccagauugagacguguaaucaaucugucaucaccuacgaaaacaauacauggguuaaccagaccuaugugaauauuagcaacacaaauuucgcugccgggcaguccguggucucugugaaacuugcgggaaacagcucccugugcccuguuagcggcugggcuaucuacucuaaggacaauuccaucagaauugggagcaaaggagauguguuugucauccgggagccguucauuucuuguagcccccucgaaugccgcaccuuuuuccugacacagggcgcccuucugaacgacaagcauuccaauggcaccaucaaagauagaucuccuuaucggacgcucauguccugucccauuggggaggugccuagccccuacaacucccgcuuugaaucuguugccuggagcgcuuccgccugccacgacggaaucaacuggcugaccaucggcauuagcgggccugauaauggagcuguggccguccugaaguauaacggcaucauuacagacaccaucaagucuuggagaaauaacauucuccggacacaagaguccgagugugcgugcgugaaugggagcuguuucaccaucaugacggauggaccgucugacggccaggccagcuacaaaaucuuucgcauugaaaagggcaaaaucgugaaguccgucgagaugauugcucccaacuaucauuacgaagagugcucuuguuacccugauagcuccgagaucacaugcguuugcagagacaauuggcacgggagcaaccggcccugggugucuuucaaucagaaccuggaauaucagauuggauacaucuguuccggcauuuuuggggauaauccucgccccaacgacaaaaccggaagcugcggcccggugucuuccaauggggccaacggagucaagggcuucagcuuuaaguauggcaaugggguguggaucggaagaacaaaauccaucucuagccggaagggcuucgagaugauuugggauccuaacggguggaccggaaccgacaacaauuuuuccaucaaacaagacauuguuggcaucaacgaauggucuggguacagcggcuccuucgugcagcaucccgagcuuacaggacuggauuguauucgcccuugcuucugggucgaacucaucagaggccggcccaaggagaauacgaucuggaccagcgggucuuccauuagcuuuuguggagugaacucugacacaguuggcugguccuggcccgauggggcugagcugccuuucaccaucgacaaauga

SEQ ID NO: 213074 - RNA, 1410 nt, Artificial Sequence; identical to SEQ ID NO: 213030
  derived and/or modified CDS sequence (opt5) from neuraminidase__InfluenzaA__AEM92450

SEQ ID NO: 213075 - RNA, 1410 nt, Artificial Sequence; identical to SEQ ID NO: 213030
  derived and/or modified CDS sequence (opt5) from neuraminidase__InfluenzaA__AEM92460

SEQ ID NO: 213076 - RNA, 1410 nt, Artificial Sequence; identical to SEQ ID NO: 212781
  derived and/or modified CDS sequence (opt5) from neuraminidase__InfluenzaA__AEM92470

SEQ ID NO: 213077 - RNA, 1410 nt, Artificial Sequence; identical to SEQ ID NO: 212781
  derived and/or modified CDS sequence (opt5) from neuraminidase__InfluenzaA__AEM92480

SEQ ID NO: 213078 - RNA, 1410 nt, Artificial Sequence
  derived and/or modified CDS sequence (opt5) from neuraminidase__InfluenzaA__AEM92490
augaaccccaaucagaagaucauuaccaucggcagcgugugcaugauuaucgggauggccaaccugaugcuccaaauuggaaauaucaucuccauuuggaucucucacagcauucagcugggcaaccagaaucagaucgagacauguaaccaauccgucauuacguacgaaaauaacaccuggguuaaucagacauaugugaacaucucuaauaccaacuucgcugccgggcagagcguggucuccgugaaacuugcgggaaauucuagccugugcccuguuuccggcugggcuauuuacagcaaggacaacucuaucagaaucggguccaaaggagauguguuugucauucgggagccguucaucagcuguucuccccucgaaugccgcacauuuuuccugacccagggcgcccuucugaaugacaagcauuccaacggcacaauuaaagauagaagcccuuaucggacccucaugucuugucccaucggggaggugccuucccccuacaacagccgcuuugaauccguugccuggucugcuagcgccugccacgacggaauuaauuggcugacgaucggcaucuccgggccugauaacggagcuguggccguccugaaguauaauggcauuaucaccgacacaauuaagagcuggagaaacaauauccuccggacccaagagucugagugugcgugcgugaacggguccuguuucacaauuaugaccgauggaccgagcgacggccaggccucuuacaaaaucuuucgcaucgaaaagggcaaaauugucaagagcguggagaugaaugcucccaacuaucauuacgaagagugcuccuguuacccugauucuagcgagaucacgugcguuugcagagacaauuggcacggguccaaccggcccugggugagcuucaaucagaaccuggaauaucagauuggauacaucuguucuggcauuuuuggggauaauccucgccccaacgacaaaacaggauccugcggcccggugagcucuaauggggccaacggagucaagggcuucuccuuuaaguauggcaacgggguguggaucggaagaaccaaaagcauuuccucucggaauggcuucgagaugaucugggauccuaacggguggacaggaaccgacaauaacuuuagcaucaagcaagacauuguuggcaucaaugaaugguccggguacucuggcagcuucgugcagcaucccgagcuuaccggacuggauuguauucgcccuugcuucugggucgaacucaucagaggccggcccaaagagaacacaauuuggacguccgggagcucuaucuccuuuuguggagugaauagcgacaccguuggcuggucuuggcccgauggggcugagcugccuuucacaaucgacaaguga

SEQ ID NO: 213079 - RNA, 1410 nt, Artificial Sequence
  derived and/or modified CDS sequence (opt5) from neuraminidase__InfluenzaA__AEM92500
augaaccccaaucagaagaucauuaccaucggcagcgugugcaugauuaucgggauggccaaccugaugcuccaaauuggaaauaucaucuccauuuggaucucucacagcauucagcugggcaaccagaaucagaucgagacauguaaccaauccgucauuacguacgaaaauaacaccuggguuaaucagacauaugugaacaucucuaauaccaacuucgcugccgggcagagcguggucuccgugaaacuugcgggaaauucuagccugugcccuguuuccggcugggcuauuuacagcaaggacaacucuaucagaaucggguccaaaggagauguguuugucauucgggagccguucaucagcuguucuccccucgaaugccgcacauuuuuccugacccagggcgcccuucugaaugacaagcauuccaacggcacaauuaaagauagaagcccuuaucggacccucaugucuugucccaucggggaggugccuucccccuacaacagccgcuuugaauccguugccuggucugcuagcgccugccacgacggaauuaauuggcugacgaucggcaucuccgggccugauaacggagcuguggccguccugaaguauaauggcauuaucaccgacacaauuaagagcuggagaaacaauauccuccggacccaagagucugagugugcgugcgugaacggguccuguuucacaauuaugaccgauggaccgagcgacggccaggccucuuacaaaaucuuucgcaucgaaaagggcaaaauugucaagagcguggagaugaaugcucccaacuaucauuacgaagagugcuccuguuacccugauucuagcgagaucacgugcguuugcagagacaauuggcacggguccaaccggcccugggugagcuucaaucagaaccuggaauaucagaugggauacauuuguucuggcaucuuuggggauaauccucgccccaacgacaaaacaggauccugcggcccggugagcucuaauggggccaacggagucaagggcuucuccuuuaaguauggcaacgggguguggauuggaagaaccaaaagcaucuccucucggaauggcuucgagaugauuugggauccuaacggguggacaggaaccgacaauaaguuuagcaucaaacaagacaucguuggcauuaacgaaugguccggguacucuggcagcuucgugcagcaucccgagcuuaccggacuggauuguauccgcccuugcuucugggucgaacucauuagaggccggcccaaggagaauacaaucuggacguccgggagcucuauuuccuuuuguggagugaacagcgacaccguuggcuggucuuggcccgauggggcugagcugccuuucacaaucgacaaauga

SEQ ID NO: 213080 - RNA, 1410 nt, Artificial Sequence
  derived and/or modified CDS sequence (opt5) from neuraminidase__InfluenzaA__AEM92520
augaaccccaaucagaagaucauuaccaucggcagcgugugcaugacaauugggauggccaaccugaugcuccaaaucggaaauauuaucuccaucuggauuucucacagcauccagcugggcaaccagaaucagauugagacguguaaccaauccgucaucaccuacgaaaauaacacauggguuaaucagaccuaugugaacauuucuaauacaaacuucgcugccgggcagagcguggucuccgugaaacuugcgggaaauucuagccugugcccuguuuccggcugggcuaucuacagcaaggacaacucuauuagaaucggguccaaaggagauguguuugucauccgggagccguucauuagcuguucuccccucgaaugccgcaccuuuuuccugacacagggcgcccuucugaaugacaagcauuccaacggcaccaucaaagauagaagcccuuaucggacgcucaugucuugucccauuggggaggugccuucccccuacaacagccgcuuugaauccguugccuggucugcuagcgccugccacgacggaaucaauuggcugaccauuggcaucuccgggccugauaacggagcuguggccguccugaaguauaauggcaucauuacagacaccaucaagagcuggagaaacaauauucuccggacacaagagucugagugugcgugcgugaacggguccuguuucaccgugaugacggauggaccgagcgacggccaggccucuuacaaaaucuuucgcauugaaaagggcaaaaucgucaagagcguugagaugaaugcucccaacuaucauuacgaagagugcuccuguuacccugauucuagcgagaucacaugcgugugcagagacaauuggcacggguccaaccggcccugggugagcuucaaucagaaccuggaauaucagauuggauacaucuguucuggcauuuuuggggauaauccucgccccaacgacaaaaccggauccugcggcccggucagcucuaauggggccaacggagugaagggcuucuccuuuaaguauggcaacgggguuuggaucggaagaacaaaaagcauuuccucucggaauggcuucgagaugaucugggauccuaacggguggaccggaaccgacaauaacuuuagcauuaagcaagacaucaucggcauuaaugaaugguccggguacucuggcagcuucgugcagcaucccgagcuuacaggacuggauuguauccgcccuugcuucugggucgaacucauuagaggccggcccaaagagaacacgaucuggaccuccgggagcucuauuuccuuuuguggagugaauagcgacacaguuggcuggucuuggcccgauggggcugagcugccuuucaccaucgacaaguga

SEQ ID NO: 213081 - RNA, 1410 nt, Artificial Sequence; identical to SEQ ID NO: 212781
  derived and/or modified CDS sequence (opt5) from neuraminidase__InfluenzaA__AEM92550

SEQ ID NO: 213082 - RNA, 1410 nt, Artificial Sequence
  derived and/or modified CDS sequence (opt5) from neuraminidase__InfluenzaA__AEM92570
augaaccccaaucagaagaucauuaccaucggcagcgugugcaugacaauugggauggccaaccugauccuccaaauuggaaauaucaucuccauuuggaucucucacagcauucagcugggcaaccagaaucagaucgagacguguaaccaauccgucauuaccuacgaaaauaacacauggguuaaucagaccuaugugaacaucucuaauacaaacuucgcugccgggcagagcguggucuccgugaaacuugcgggaaauucuagccugugcccuguuuccggcugggcuauuuacagcaaggacaacucuaucagaaucggguccaaaggaaauguguuugucauucgggagccguucaucagcuguucuccccucgaaugccgcaccuuuuuccugacacagggcgcccuucugaacgauaagcauuccaacggcaccauuaaagacagaagcccuuaucggacgcucaugucuugucccaucggggaggugccuucccccuacaauagccgcuuugaauccguugccuggucugcuagcgccugccacgauggaauuaacuggcugaccaucggcaucuccgggccugacaauggagcuguggccguccugaaguauaacggcauuaucacagauaccauuaagagcuggagaaauaacauccuccggacacaagagucugagugugcgugcgugaauggguccuguuucaccauuaugacggacggaccgagcgauggccaggccucuuacaaaaucuuucgcaucgaaaagggcaaaauugucaagagcguggagaugaacgcucccaauuaucauuacgaagagugcuccuguuacccugacucuagcgagaucacaugcguuugcagagauaacuggcacggguccaaucggcccugggugagcuucaaccagaaucuggaauaucagauuggauacaucuguucuggcauuuuuggggacaacccucgccccaaugauaaaaccggauccugcggcccggugagcucuaacggggccaacggagucaagggcuucuccuuuaaguauggcaaugggguguggaucggaagaacaaaaagcauuuccucucggaagggcuucgagaugaucugggacccuaacggguggaccggaaccgauaauaacuuuagcaucaaacaagacauuguuggcaucaaugaaugguccggguacucuggcagcuucgugcagcaucccgagcuuacaggacuggacuguauucgcccuugcuucugggucgaacucaucagaggccggcccaaggagaacacgauuuggaccuccgggagcucuaucuccuuuuguggagugaauagcgauacaguuggcuggucuuggcccgacggggcugagcugccuuucaccaucgauaaauga

SEQ ID NO: 213083 - RNA, 1410 nt, Artificial Sequence
  derived and/or modified CDS sequence (opt5) from neuraminidase__InfluenzaA__AEM92580
augaaccccaaucagaagaucauuaccaucggcagcgugugcaugacaauugggauggccaaccugauccuccaaauuggaaauaucaucuccauuuggaucucucacagcauucagcugggcaaccagaaucagaucgagacguguaaccaauccgucauuaccuacgaaaauaacacauggguuaaucagaccuaugugaacaucucuaauacaaacuucgcugccgggcagagcguggucuccgugaaacuugcgggaaauucuagccugugcccuguuuccggcugggcuauuuacagcaaggacaacucuaucagaaucggguccaaaggagauguguuugucauucgggagccguucaucagcuguucuccccucgaaugccgcaccuuuuuccugacacagggcgcccuucugaaugacaagcauuccaacggcaccauuaaagauagaagcccuuaucggacgcucaugucuugucccaucggggaggugccuucccccuacaacagccgcuuugaauccguugccuggucugcuagcgccugccacgacggaauuaauuggcugaccaucggcaucuccgggccugauaacggagcuguggccguccugaaguauaauggcauuaucacagacaccauuaagagcuggagaaacaauauccuccggacacaagagucugagugugcgugcgugaacggguccuguuucaccauuaugacggauggaccgagcaauggccaggccucuuacaaaaucuuucgcaucgaaaagggcaaaauugucaagagcguggagaugaacgcucccaauuaucauuacgaagagugcuccuguuacccugacucuagcgagaucacaugcguuugcagagauaacuggcacggguccaaucggcccugggugagcuucaaccagaaucuggaauaucagauuggauacaucuguucuggcauuuuuggggacaacccucgccccaaugauaaaaccggauccugcggcccggugagcucuaacggggccaacggagucaagggcuucuccuuuaaguauggcaaugggguguggaucggaagaacaaaaagcauuuccucucggaagggcuucgagaugaucugggacccuaacggguggaccggaaccgauaauaacuuuagcaucaaacaagacauuguuggcaucaaugaaugguccggguacucuggcagcuucgugcagcaucccgagcuuacaggacuggacuguauucgcccuugcuucugggucgaacucaucagaggccggcccaaggagaacacgauuuggaccuccgggagcucuaucuccuuuuguggagugaauagcgauacaguuggcuggucuuggcccgacggggcugagcugccuuucaccaucgauaaauga

SEQ ID NO: 213084 - RNA, 1410 nt, Artificial Sequence; identical to SEQ ID NO: 212781
  derived and/or modified CDS sequence (opt5) from neuraminidase__InfluenzaA__AEM92590

SEQ ID NO: 213085 - RNA, 1410 nt, Artificial Sequence; identical to SEQ ID NO: 212781
  derived and/or modified CDS sequence (opt5) from neuraminidase__InfluenzaA__AEM92600

SEQ ID NO: 213086 - RNA, 1410 nt, Artificial Sequence
  derived and/or modified CDS sequence (opt5) from neuraminidase__InfluenzaA__AEM92610
augaaccccaaucagaagaucauuaccaucggcagcgugugcaugacaauugggauggccaaccugaugcuccaaaucggaaauauuaucuccaucuggauuucucacagcauccagcugggcaaccagaaucagauugagacguguaaccaauccgucaucaccuacgaaaauaacacauggguuaaucagaccuaugugaacauuucuaauacaaacuucgcugccgggcagagcguggucuccgugaaacuugcgggaaauucuagccugugcccuguuuccggcugggcuaucuacagcaaggacaacucuauuagaaucggguccaaaggagauguguuugucauccgggagccguucauuagcuguucuccccucgaaugccgcaccuuuuuccugacacagggcgcccuucugaaugacaagcauuccaacggcaccaucaaagauagaagcccuuaucggacgcucaugucuugucccauuggggaggugccuucccccuacaacagccgcuuugaauccguugccuggucugcuagcgccugccacgacggaaucaauuggcugaccauuggcaucuccgggccugauaacggagcuguggccguccugaaguauaauggcaucauuacagacaccaucaagagcuggagaaacaauauucuccggacacaagagucugagugugcgugcgugaacggguccuguuucaccgugaugacggauggaccgagcgacggccaggccucuuacaaaaucuuucgcauugaaaagggcaaaaucgucaagagcguugagaugaaugcucccaacuaucauuacgaagagugcuccuguuacccugauucuagcgagaucacaugcgugugcagagacaauuggcacggguccaaccggcccugggugagcuucaaucagaaccuggaauaucagauuggauacaucuguucuggcauuuuuggggauaauccucgccccaacgacaaaaccggauccugcggcccggucagcucuaauggggccaacggagugaagggcuucuccuuuaaguauggcaacgggguuuggaucggaagaacaaaaagcauuuccucucggaauggcuucgagaugaucugggauccuaacggguggaccggaaccgacaauaacuuuagcauuaagcaagacaucgugggcaucaaugaaugguccggguacucuggcagcuucguccagcaucccgagcuuacaggacuggauuguauucgcccuugcuucuggguggaacucaucagaggccggcccaaagagaacacgauuuggaccuccgggagcucuaucuccuuuuguggaguuaauagcgacacagugucuugguccuggcccgauggcgcugagcugccuuucaccauugacaaguga

SEQ ID NO: 213087 - RNA, 1410 nt, Artificial Sequence
  derived and/or modified CDS sequence (opt5) from neuraminidase__InfluenzaA__AEM92620
augaaccccaaucagaagaucauuaccaucggcagcgugugcaugauuaucgggauggccaaccugaugcuccaaauuggaaauaucaucuccauuuggaucucucacagcauucagcugggcaaccagaaucagaucgagacauguaaccaauccgucauuacguacgaaaauaacaccuggguuaaucagacauaugugaacaucucuaauaccaacuucgcugccgggcagagcguggucuccgugaaacuugcgggaaauucuagccugugcccuguuuccggcugggcuauuuacagcaaggacaacucuaucagaaucggguccaaaggagauguguuugucauucgggagccguucaucagcuguucuccccucgaaugccgcacauuuuuccugacccagggcgcccuucuggacgauaagcauuccaauggcacaauuaaagacagaagcccuuaucggacccucaugucuugucccaucggggaggugccuucccccuacaacagccgcuuugaauccguugccuggucugcuagcgccugccacgauggaauuaacuggcugacgaucggcaucuccgggccugacaauggagcuguggccguccugaaguauaacggcauuaucaccgauacaauuaagagcuggagaaauaacauccuccggacccaagagucugagugugcgugcgugaauggguccuguuucacaauuaugaccgacggaccgagcgauggccaggccucuuacaaaaucuuucgcaucgaaaagggcaaaauugucaagagcguggagaugaacgcucccaauuaucauuacgaagagugcuccuguuacccugacucuagcgagaucacgugcguuugcagagauaacuggcacggguccaaucggcccugggugagcuucaaccagaaucuggaauaucagaugggauacauuuguucuggcaucuuuggggacaacccucgccccaaugauaaaacaggauccugcggcccggugagcucuaacggggccaauggagucaagggcuucuccuuuaaguauggcaacgggguguggauuggaagaaccaaaagcaucuccucucggaacggcuucgagaugauuugggacccuaauggguggacaggaaccgacaacaaguuuagcaucaaacaagauaucguuggcauuaaugaaugguccggguacucuggcagcuucgugcagcaucccgagcuuaccggacuggacuguauccgcccuugcuucugggucgaacucauuagaggccggcccaaggagaacacaaucuggacguccgggagcucuauuuccuuuuguggagugaauagcgauaccguuggcuggucuuggcccgacggggcugagcugccuuucacaaucgauaaauga

SEQ ID NO: 213088 - RNA, 1410 nt, Artificial Sequence
  derived and/or modified CDS sequence (opt5) from neuraminidase__InfluenzaA__AEM92650
augaaccccaaucagaagaucauuaccaucggcagcgugugcaugacaauugggauggccaaccugauccuccaaauuggaaauaucaucuccauuuggaucucucacagcauucagcugggcaaccagaaucagaucgagacguguaaccaauccgucauuaccuacgaaaauaacacauggguuaaucagaccuaugugaacaucucuaauacaaacuucgcugccgggcagagcguggucuccgugaaacuugcgggaaauucuagccugugcccuguuuccggcugggcuauuuacagcaaggacaacucugugagaaucggguccaaaggagaugucuuugugauccgggagccguucauuagcuguucuccccucgaaugccgcaccuuuuuccugacacagggcgcccuucugaaugacaagcauuccaacggcaccaucaaagauagaagcccuuaucggacgcucaugucuugucccauuggggagguuccuucccccuacaacagccgcuuugaauccguggccuggucugcuagcgccugccacgacggaaucaauuggcugaccauuggcaucuccgggccugauaacggagcugucgccgugcugaaguauaauggcaucauuacagacaccaucaagagcuggagaaacaauauucuccggacacaagagucugagugugcgugcgugaacggguccuguuucaccgucaugacggauggaccgagcgacggccaggccucuuacaaaaucuuucgcauugaaaagggcaaaaucguuaagagcguggagaugaaugcucccaacuaucauuacgaagagugcuccuguuacccugauucuagcgagaucacaugcgugugcagagacaauuggcacggguccaaccggcccugggucagcuucaaucagaaccuggaauaucagauuggauacaucuguucuggcauuuuuggggauaauccucgccccaacgacaaaaccggauccugcggcccggugagcucuaauggggccaacggaguuaagggcuucuccuuuaaguauggcaacgggguguggaucggaagaacaaaaagcauuuccucucggaauggcuucgagaugaucugggauccuaacggguggaccggaaccgacacaaaguuuagcauuaaacaagacaucgucggcaucaaugaaugguccggguacucuggcagcuucgugcagcaucccgagcuuacgggacuggauuguauucgcccuugcuucuggguugaacucaucagaggccggcccaaggagaacaccauuuggacauccgggagcucuaucuccuuuuguggagugaauagcgacaccgucggcuggucuuggcccgauggggcugagcugccuuucacaauugacaaauga

SEQ ID NO: 213089 - RNA, 1410 nt, Artificial Sequence; identical to SEQ ID NO: 211482
  derived and/or modified CDS sequence (opt5) from neuraminidase__InfluenzaA__AEM98410

SEQ ID NO: 213090 - RNA, 1410 nt, Artificial Sequence; identical to SEQ ID NO: 211482
  derived and/or modified CDS sequence (opt5) from neuraminidase__InfluenzaA__AEM98421

SEQ ID NO: 213091 - RNA, 1410 nt, Artificial Sequence; identical to SEQ ID NO: 211482
  derived and/or modified CDS sequence (opt5) from neuraminidase__InfluenzaA__AEM98432

SEQ ID NO: 213092 - RNA, 1410 nt, Artificial Sequence; identical to SEQ ID NO: 212858
  derived and/or modified CDS sequence (opt5) from neuraminidase__InfluenzaA__AEN55401

SEQ ID NO: 213093 - RNA, 1410 nt, Artificial Sequence; identical to SEQ ID NO: 211085
  derived and/or modified CDS sequence (opt5) from neuraminidase__InfluenzaA__AEN55411

SEQ ID NO: 213094 - RNA, 1410 nt, Artificial Sequence
  derived and/or modified CDS sequence (opt5) from neuraminidase__InfluenzaA__AEN55421
augaaccccaaucagaagaucauuaccaucggcagcgugugcaugacaauugggauggccaaccugauccuccaaauuggaaauaucaucuccauuuggaucucucacagcauucagcugggcaaccagucccagaucgagacguguaaucaaucugucauuaccuacgaaaacaauacauggguuaaccagaccuaugugaauaucagcaacacaaauuucgcugccagacaguccguggucucugugaaacuugcggggaacagcucccugugcccuguuagcggaugggcuauuuacucuaaggacaauuccauccggaucggcagcaaaggggauguguuugucauucgcgagccguucaucucuuguucuccccucgaaugcagaaccuuuuuccugacacagggagcccuucugaacgacaagcauagcaauggcaccauuaaagaucggucuccuuaucgcacgcucauguccugucccaucggcgaggugccuagccccuacaacuccagauuugaaucuguugccuggagcgcuuccgccugccacgacgggauuaacuggcugaccaucggaaucagcggcccugauaauggggcuguggccguccugaaguauaacggaauuaucacagacaccauuaagucuuggcggaauaacauccuccgcacacaagaguccgagugugugugcgugaauggcagcuguuucaccauuaugacggaugggccgucugacggacaggcgagcuacaaaaucuuuagaaucgaaaagggcaaaauugucaaguccguugagaugaacgcccccaauuaucauuacgaagagugcucuuguuacccugauagcuccgagaucacaugcgugugccgggacaacuggcacggcagcaaucgccccugggugucuuucaaccagaaucuggaauaucagauuggguacaucuguuccggaauuuuuggcgauaacccuagacccaaugacaaaaccgggagcugcggaccggucucuuccaacggcgcuaauggggugaagggauucagcuuuaaguauggcaacggcguuuggaucgggcggacaaaauccauuucuagccgcaagggauucgagaugaucugggauccuaacggcuggaccgggaccgacaauaacuuuuccaucaaacaagacauugugggaaucaaugaauggucuggcuacagcggguccuucguccagcaucccgagcuuacaggccuggauuguauuagaccuugcuucuggguggaacucauccggggacgccccaaggagaacacgauuuggaccagcggcuccuccaucagcuuuugugggguuaauucugacacagugggaugguccuggcccgauggcgccgagcugccuuucaccaucgacaaauga

SEQ ID NO: 213095 - RNA, 1410 nt, Artificial Sequence
  derived and/or modified CDS sequence (opt5) from neuraminidase__InfluenzaA__AEN55466
augaaccccaaucagaagaucauuaccaucggcagcgugugcauuacaaucgggauggccaaccugauucuccaaaucggaaauacgaucuccauuuggaucucucacagcauucagcugggcaaccagaaucagaucgagaccuguaaccaauccgucauuacauacgaaaauaacaccuggguuaaucagacauaugugaacaucucuaauaccaacuucgcugccgggcagagcguggucuccgugaaacuugcgggaaauucuagccugugcccuguuuccggcugggcuauuuacagcaaggacaacucuaucagaaucggguccaaaggagauguguuugucauucgggagccguucaucagcuguucuccccucgaaugccgcacauuuuuccugacccagggcgcccuucugaaugacaagcauuccaacggcacgauuaaagauagaagcccuuaucggacccucaugucuugucccaucggggaggugccuucccccuacaacagccgcuuugaauccguugccuggucugcuagcgccugccacgacggaauuuccuggcugacaaucggcaucagcgggccugauaauggagcuguggccguccugaaguauaacggcauuaucaccgacacaauuaagucuuggagaaauaacauccuccggacccaagaguccgagugugcgugcgugaaugggagcuguuucacggugaugacagauggaccgucugacggccaggccagcuacaaaauuuuucgcaucgaaaagggcaaaaucgucaaguccguugagaugaacgcucccaauuaucauuacgaagagugcucuuguuacccugauagcuccgagauuaccugcgugugcagagacaacuggcacgggagcaaucggcccugggugucuuucaaccagaaucuggaauaucagaucggauacauuuguuccggcaucuuuggggauaacccucgccccaaugacaaaacaggaagcugcggcccggucucuuccaacggggccaauggagugaagggcuucagcuuuaaguauggcaacgggguuuggauuggaagaaccaaauccaucucuagccggaacggcuucgagaugauuugggauccuaauggguggaccggaacagacaacaauuuuuccaucaagcaagacaucgugggcauuaacgaauggucuggguacagcggcuccuucguccagcaucccgagcuuacgggacuggauuguauccgcccuugcuucuggguggaacucauuagaggccggcccaaagagaauaccaucuggacaagcgggucuuccauuagcuuuuguggaguuaacucugacaccgugggcugguccuggcccgauggggcugagcugccuuucacaaucgacaaguga

SEQ ID NO: 213096 - RNA, 1410 nt, Artificial Sequence
  derived and/or modified CDS sequence (opt5) from neuraminidase__InfluenzaA__AEN55476
augaaccccaaucagaagaucauuaccaucggcagcgugugcaugacaauugggauggccaaccugauccuccaaauuggaaauaucaucuccauuuggaucucucacagcauucagcugggcaaccagucccagaucgagacguguaaucaaucugucauuaccuacgaaaacaauacauggguuaaccagaccuaugugaauaucagcaacacaaauuucgcugccgggcaguccguggucucugugaaacuugcgggaaacagcucccugugcccuguuagcggcugggcuauuuacucuaaggacaauuccaucagaaucgggagcaaaggagauguguuugucauucgggagccguucaucucuuguagcccccucgaaugccgcaccuuuuuccugacacagggcgcccuucugaacgacaagcauuccaauggcaccauuaaagauagaucuccuuaucggacgcucauguccugucccaucggggaggugccuagccccuacaacucccgcuuugaaucuguugccuggagcgcuuccgccugccacgacggaauuaacuggcugaccaucggcaucagcgggccugauaauggagcuguggccguccugaaguauaacggcauuaucacagacaccauuaagucuuggagaaauaacauccuccggacacaagaguccgagugugcgugcgugaaugggagcuguuucaccauuaugacggauggaccgucugacggccaggccagcuacaaaaucuuucgcaucgaaaagggcaaaauugugaaguccgucgagaugaacgcucccaauuaucauuacgaagagugcucuuguuacccugauagcuccgagaucacaugcguuugcagagacaacuggcacgggagcaaucggcccugggugucuuucaaccagaaucuggaauaucagauuggauacaucuguuccggcauuuuuggggauaacccucgccccaaugacaaaaccggaagcugcggcccggugucuuccaacggggccaauggagucaagggcuucagcuuuaaguauggcaacgggguguggaucggaagaacaaaauccauuucuagccggaagggcuucgagaugaucugggauccuaacggguggaccggaaccgacaauaacuuuuccaucaaacaagacauuguuggcaucaaugaauggucuggguacagcggcuccuucgugcagcaucccgagcuuacaggacuggauuguauucgcccuugcuucugggucgaacucaucagaggccggcccaaggagaacacgauuuggaccagcgggucuuccaucagcuuuuguggaguuaauucugacacaguguccuggagcuggcccgauggcgcugagcugccuuucaccaucgacaaauga

SEQ ID NO: 213097 - RNA, 1410 nt, Artificial Sequence; identical to SEQ ID NO: 212329
  derived and/or modified CDS sequence (opt5) from neuraminidase__InfluenzaA__AEN55486

SEQ ID NO: 213098 - RNA, 1410 nt, Artificial Sequence; identical to SEQ ID NO: 212329
  derived and/or modified CDS sequence (opt5) from neuraminidase__InfluenzaA__AEN55506

SEQ ID NO: 213099 - RNA, 1410 nt, Artificial Sequence
  derived and/or modified CDS sequence (opt5) from neuraminidase__InfluenzaA__AEN55516
augaaccccaaucagaagaucauuaccaucggcagcgugugcaugacaauugggauggccaaccugauccuccaaauuggaaauaucaucuccauuuggaucucucacagcauucagcugggcaaccagucccagaucgagacguguaaucaaucugucauuaccuacgaaaacaauacauggguuaaccagaccuaugugaauaucagcaacacaaauuucgcugccgggcaguccguggucucugugaaacuugcgggaaacagcucccugugcccuguuagcggcugggcuauuuacucuaaggacaauuccaucagaaucgggagccggggagauguguuugucauucgcgagccguucaucucuuguagcccccucgaaugcagaaccuuuuuccugacacagggcgcccuucugaacgacaaacauuccaauggcaccauuaaggaucggucuccuuaucgcacgcucauguccugucccaucggggaggugccuagccccuacaacuccagauuugaaucuguugccuggagcgcuuccgccugccacgacggaauuaacuggcugaccaucggcaucagcgggccugauaauggagcuguggccguccugaaauauaacggcauuaucacagacaccauuaagucuuggcggaauaacauccuccgcacacaagaguccgagugugcgugcgugaaugggagcuguuucaccauuaugacggauggaccgucugacggccaggccagcuacaagaucuuuagaaucgaaaaaggcaagauugugaaauccgucgagaugaacgcucccaauuaucauuacgaagagugcucuuguuacccugauagcuccgagaucacaugcguuugccgggacaacuggcacgggagcaaucgccccugggugucuuucaaccagaaucuggaauaucagauuggauacaucuguuccggcauuuuuggggauaacccuagacccaaugacaagaccggaagcugcggcccggugucuuccaacggggccaauggagucaaaggcuucagcuuuaaguauggcaacgggguguggaucggacggacaaaguccauuucuagccgcaaaggcuucgagaugaucugggauccuaacggguggaccggaaccgacaauaacuuuuccaucaagcaagacauuguuggcaucaaugaauggucuggguacagcggcuccuucgugcagcaucccgagcuuacaggacuggauuguauuagaccuugcuucugggucgaacucauccggggccgccccaaagagaacacgauuuggaccagcgggucuuccaucagcuuuuguggaguuaauucugacacagugggcugguccuggcccgauggggcugagcugccuuucaccaucgacaaguga

SEQ ID NO: 213100 - RNA, 1410 nt, Artificial Sequence; identical to SEQ ID NO: 212329
  derived and/or modified CDS sequence (opt5) from neuraminidase__InfluenzaA__AEN55526

SEQ ID NO: 213101 - RNA, 1410 nt, Artificial Sequence; identical to SEQ ID NO: 212858
  derived and/or modified CDS sequence (opt5) from neuraminidase__InfluenzaA__AEN69429

SEQ ID NO: 213102 - RNA, 1410 nt, Artificial Sequence; identical to SEQ ID NO: 212855
  derived and/or modified CDS sequence (opt5) from neuraminidase__InfluenzaA__AEN69438

SEQ ID NO: 213103 - RNA, 1410 nt, Artificial Sequence; identical to SEQ ID NO: 211085
  derived and/or modified CDS sequence (opt5) from neuraminidase__InfluenzaA__AEN69484

SEQ ID NO: 213104 - RNA, 1410 nt, Artificial Sequence; identical to SEQ ID NO: 208757
  derived and/or modified CDS sequence (opt5) from neuraminidase__InfluenzaA__AEO01627

SEQ ID NO: 213105 - RNA, 1410 nt, Artificial Sequence; identical to SEQ ID NO: 208757
  derived and/or modified CDS sequence (opt5) from neuraminidase__InfluenzaA__AEO01638

SEQ ID NO: 213106 - RNA, 1410 nt, Artificial Sequence
  derived and/or modified CDS sequence (opt5) from neuraminidase__InfluenzaA__AEO01644
augaaccccaaucagaagaucauuaccaucggcagcgugucccugacaauuucuacgaucugcuucuuuaugcaaauugccauccucaucaccacagucacccugcacuucaaacaguacgaguuuaacagcccuccgaauaaccagguuaugcuuugugaacccacaauuaucgagagaaauauuaccgaaaucguguaucugacaaacaccacgauugagaaggaaaucugcccuaaacucgcugaguaccggaauugguccaagccccagugugacauuaccggguucgccccuuuuucuaaagauaacagcauccgccuguccgcgggaggcgacaucugggugacaagagagcccuaugucucuugcgauccugacaaguguuaccaauucgcucuugggcagggaaccacacugaauaacgugcauagcaaugauaccguucgggaccgcacgccguauagaacacuccugaugaacgaacugggcgugcccuuucaccucgggaccaagcaggucugcauugccugguccagcagcuccugucaugauggaaaagccuggcugcacgugugcaucacaggcgacgauaagaaugcuaccgccagcuucauuuacaacggccggcuuguugacucuaucguguccuggagcaaagagauucugcgcacccaggaaucugagugugucugcaucaaugggacauguacgguggugaugaccgauggauccgcuagcggcaaggccgacacaaaaauccucuuuauugaggaagggaagaucguccauaccuccacacugucuggaagcgcgcaacacguugaggaaugcuccugcuauccuagauaccccggcgugcggugugugugccgcgauaacuggaaggggagcaacagaccuauugucgacaucaauauuaaagaccacucuaucguguccagcuacguuuguucuggacuugugggcgauacgccccggaagaccgacagcuccucuagcggccauugccuggauccgaacaaugaggaagggggacacggcgucaaagggugggccuucgacgauggaaacgacguguggaugggccgcacaaucuccgagaagucuagacucggguaugagaccuuuaaaguuauugaaggauggucuaauccuaaguccaaacugcagaucaaccgccaggugauugucgaucggggcaauagaagcggcuacucugggaucuucuccguggagggaaagagcuguauuaaccggugcuuuuaugucgaacugaucagaggccgcaaggaggaaaccgaggugcucuggacauccaauucuauuguuguguucugugggaccagcggaacauacggcacgggguccuggcccgacggcgcugauaucaaccugaugccuaucuga

SEQ ID NO: 213107 - RNA, 1410 nt, Artificial Sequence
  derived and/or modified CDS sequence (opt5) from neuraminidase__InfluenzaA__AEO01654
augaaccccaaucagaagaucauuaccaucggcagcgugucccugacaauuucuacgaucugcuucuuuaugcaaauugccauccucaucaccacagucacccugcacuucaaacaguacgaguuuaacagcccuccgaauaaccagguuaugcuuugugaacccacaauuaucgagagaaauauuaccgaaaucguguaucugacaaacaccacgauugagaaggaaaucugcccuaaacucgcugaguaccggaauugguccaagccccagugugacauuaccggguucgccccuuuuucuaaagauaacagcauccgccuguccgcgggaggcgacaucugggugacaagagagcccuaugucucuugcgauccugacaaguguuaccaauucgcucuugggcagggaaccacacugaauaacgugcauagcaaugauaccguucgggaccgcacgccguauagaacacuccugaugaacgaacugggcgugcccuuucaccucgggaccaagcaggucugcauugccugguccucuagcuccugucaugauggaaaagccuggcugcacgugugcaucacaggcgacgauaagaaugcuaccgccagcuucauuuacaacggccggcuuguugacucuaucguguccuggagcaaagauauucugcgcacccaggagucugaaugugucugcaucaaugggacauguacgguggugaugaccgacggauccgcuagcggcaaggccgauacaaaaauccucuuuauugaggaggggaagaucguccauaccuccacacugucuggaagcgcgcaacacguugaagagugcuccugcuauccuagauaccccggcgugcggugugugugccgcgacaacuggaaggggagcaacagaccuauugucgacaucaauauuaaagaucacucuaucguguccagcuacguuuguucuggacuugugggcgacacgccccggaagaacgauagcuccucuagcggccauugccuggacccgaauaacgaagagggagggcacggcgucaaagggugggccuucgaugacggaaaugauguguggaugggccgcaccaucuccgaaaagagcagacucggguaugagacauuuaaaguuauugagggauggucuaacccuaaguccaaacugcagaucaaucgccaggugauugucgaccggggcaacagaagcggcuacucugggaucuucuccguggaaggaaagagcuguauuaaucggugcuuuuaugucgagcugaucagaggccgcaaggaagagaccaaagugcucuggaccuccaacucuauuguuguguucugugggacaagcggaaccuacggcacaggguccuggcccgauggcgcugaaaucaaucugaugccuaucuga

SEQ ID NO: 213108 - RNA, 1413 nt, Artificial Sequence; identical to SEQ ID NO: 208704
  derived and/or modified CDS sequence (opt5) from neuraminidase__InfluenzaA__AEO01665

SEQ ID NO: 213109 - RNA, 1413 nt, Artificial Sequence
  derived and/or modified CDS sequence (opt5) from neuraminidase__InfluenzaA__AEO01676
augaaccccaaucagaagaucauuaccaucggcagcauuuccaucgccauugggaucaucucucugaugcuccaaauuggaaacaucauuagcaucugggcuucccacucuauucagacaggcagccagaauaacacggggaucugcaaucagagaauuaucaccuacgagaacuccacaugggugaaucauaccuaugucaacaucaauaacacaaauguuguggccggagaagacaaaaccucugugacacuggcgggcaacagcucccuuuguagcauuucugggugggcuaucuacaccaaggauaauuccauucggaucggaagcaaaggcgacgucuucgugauucgcgagccuuuuaucucuugcucccaccuggaauguagaacguucuuucucacccaaggcgcccugcuuaacgauaagcauagcaaugggacaguuaaagaccggucuccguaucgcgcccugauguccugcccccucggagaggcuccuagccccuacaacuccaaguucgaaucuguggccuggagcgcuuccgccugucacgauggcaugggguggcugaccaucggaauuagcggcccugacaacggggcggucgccgugcugaaguauaauggaaucauuacaggcaccaucaaaucuuggaagaaacagauucucagaacgcaggaguccgagugcguuuguaugaacggcagcugcuuuacaaucaugaccgaugggcccucuaauaaggcugccagcuacaaaaucuucaagauugaaaagggaaaagugacaaaguccaucgagcugaacgcuccuaauuuucauuaugaagaguguucuugcuacccggacaccggcauugucaugugugugugccgggauaacuggcacgggagcaaucgccccuggguguccuucaaccagaaucuugacuaccaaaucggauauauuugcagcggcgucuuuggggauaacccuagacccgaggacggagaaggcucuuguaauccuguuaccguggauggcgccaacggggugaaaggauucuccuacaaguaugacaauggcgucuggaucgggcggacaaaaagcaaccgccugagaaagggauuugagaugauuugggaccccaauggcuggacgaacaccgauucugacuucuccgugaaacaggauguuguggcgaucacagacuggagcggguacuccggcucuuuuguccagcacccggaacucaccggacuggauugcauccggccuuguuucuggguggagcuuguucgcggccugcccagagaaaacacaaccauuuggacgagcggguccucuaucuucuuucggggagacaauagcgauacagccaacugguccuggccugacggcgcugagaugaccuucaccauugauaaguga

SEQ ID NO: 213110 - RNA, 1410 nt, Artificial Sequence; identical to SEQ ID NO: 208757
  derived and/or modified CDS sequence (opt5) from neuraminidase__InfluenzaA__AEO01693

SEQ ID NO: 213111 - RNA, 1413 nt, Artificial Sequence; identical to SEQ ID NO: 208704
  derived and/or modified CDS sequence (opt5) from neuraminidase__InfluenzaA__AEO01711

SEQ ID NO: 213112 - RNA, 1410 nt, Artificial Sequence; identical to SEQ ID NO: 212880
  derived and/or modified CDS sequence (opt5) from neuraminidase__InfluenzaA__AEO37533

SEQ ID NO: 213113 - RNA, 1410 nt, Artificial Sequence
  derived and/or modified CDS sequence (opt5) from neuraminidase__InfluenzaA__AEO37543
augaaccccaaucagaagaucauuaccaucggcagcgugugcaugacaauugggauggccaaccugauccuccaaauuggaaauaucaucuccauuuggaucucucacagcauucagcugggcaaccagaaucagaucgagccuuguaaccaauccgucauuacguacgaaaauaacaccuggguuaaucagacauaugugaacaucucuaauaccaacuucgcugccgggcagagcguggucuccgugaaacuugcgggaaauucuagccugugcccgguuuccggcugggcuauuuacagcaaggacaacucuaucagaaucggguccaaaggagauguguuugucauucgggagcccuucaucagcuguucuccucucgaaugccgcacauuuuuccugacccagggcgcccuucugaaugacaagcauuccaacggcacaauuaaagauagaagccccuaucggacccucaugucuuguccuaucggggaggugcccuccccuuacaacagccgcuuugaauccguugccuggucugcuagcgccugccacgacggaauuaauuggcugacgaucggcaucuccgggccggauaacggagcuguggccguccugaaguauaauggcauuaucaccgacacaauuaagagcuggagaaacaauauccuccggacccaagagucugagugugcgugcgugaacggguccuguuucacagugaugaccgauggacccagcgacggccaggccucuuacaaaauuuuucgcaucgaaaagggcaaaaucgucaagagcguugagaugaaugcuccuaacuaucauuacgaagagugcuccuguuaccccgauucuagcgagauuacgugcgugugcagagacaauuggcacggguccaaccggccuugggugagcuucaaucagaaccuggaauaucagaucggauacauuuguucuggcaucuuuggggauaauccccgcccgaacgacaaaacaggauccugcggcccugucagcucuaauggggccaacggagugaagggcuucuccuuuaaguauggcaacgggguuuggauuggaagaaccaaaagcaucuccucucggaauggcuucgagaugauuugggaucccaacggguggacaggaaccgacaauaacuuuagcgugaagcaagacaucaucggcauuaaugaaugguccggguacucuggcagcuucguccagcauccugagcuuaccggacuggauuguauccgccccugcuucuggguggaacucauuagaggccggcccaaagagaacacaaucuggacguccgggagcucuauuuccuuuuguggaguuaauagcgacaccgugggcuggucuuggccugauggggcugagcugccguucacaaucgacaaguga

SEQ ID NO: 213114 - RNA, 1410 nt, Artificial Sequence; identical to SEQ ID NO: 212329
  derived and/or modified CDS sequence (opt5) from neuraminidase__InfluenzaA__AEO72179

SEQ ID NO: 213115 - RNA, 1350 nt, Artificial Sequence
  derived and/or modified CDS sequence (opt5) from neuraminidase__InfluenzaA__AEO88957
augaaccccaaucagaagaucauuaccaucggcagcauuugcauggugaucgggauugucucccugaugcuccaaaucggaaacaugaucucuauuuggguuagccacuccacacagacgggcaaucagcaucaggccgagccuaucagaaacaccaauuuccugacagaaaacgcuguggccucugugacccuugcggggaauagcucccuguguccgauucggggaugggcuguccacucuaaagacaacagcauccgcauuggcuccaagggggauguguuuguuaucagagagcccuucauuagcugcucucaucucgaaugucggacauuuuuccugacccaaggagcccuucugaaugacaaacacuccaacggcacagugaaggaucgcagcccucauagaacccucaugucuugccccgucggcgaggccccuucccccuacaauagccgguuugaaucuguggcuugguccgccagcgcuugucacgacgggacguccuggcugaccaucggaaucucuggcccugauaacggggccguugcggugcugaaauauaauggaauuaucacagacaccauuaagagcuggcgcaacaauauccucagaacacaggaguccgagugcgccugugucaacggcagcugcuucaccgugaugacggaugggccgucuaacggacaggcuuccuacaagauuuuuaaaauggaaaagggcaaaguggucaagagcguugagcugaaugcccccaacuaucacuacgaagaguguucuugcuauccugacgcuggcgagaucaucugugugugccgggauaauuggcaugggagcaaccgccccuggguguccuucaaucagaaccuugaauaccaaauuggauauaucugcucuggcgucuuuggggacaauccuagacccaacgauggaacaggcagcugugggccgguguccccuaauggagccuacggcauuaaaggcuucagcuuuaaguacgggaacggaguuuggaucggccggaccaagucuacaaauucccgcagcggguucgagaugauuugggaccccaacggauggaccggcaccgauucuaauuuuuccgugaaacaggacaucgucgcgaucacagacuggagcggguauuccggcucuuucgugcagcacccugaacugacgggacucgauugcauuagacccuguuucuggguugagcugauccggggccgccccaaggaaagcaccauuuggacauccgggucuagcaucuccuuuugcggagugaacagcgacaccgucucuugguccuggccugauggcgccgagcuuccguucacaauugacaaauga

SEQ ID NO: 213116 - RNA, 1350 nt, Artificial Sequence
  derived and/or modified CDS sequence (opt5) from neuraminidase__InfluenzaA__AEO88965
augaaccccaaucagaagaucauuaccaucggcagcauuugcauggugaucgagauugucucccugaugcuccaaaucgggaacaugaucucuauuuggguuagccacuccauccagacgaaaaaucagagacaggccgaaccuauuucuaacacaaaguuccugaccgagaaagcuguggccagcgugacacuugcgggaaauuccucucuguguccgaucagcggcugggcuguccauuccaaggacaacagcauucggaucgggucuaaaggagauguguuuguuauucgcgaacccuucaucuccugcagccaccucgaguguagaaccuuuuuccugacacaaggcgcccuucugaaugacaagcauucuaacgggaccgugaaggaucgguccccucaccgcacacucaugagcugccccgucggagaagccccuucucccuacaauuccagauuugagagcguggcuugguccgccucugcuugucaugacggcaccagcuggcugacgaucggcauuuccgggccugauaacggagccguugcggugcugaaauauaauggcaucauuaccgacacaaucaagagcuggcggaacaauauucuccgcacccaggagucugaaugcgccugugucaacggguccugcuucacagugaugaccgauggaccgagcaauggccaggcuucuuacaaaaucuuuaagauggagaaagggaagguggucaagagcguugaacuggacgcccccaacuaucacuacgaggaguguuccugcuauccugaugcuggagaaaucacgugugugugcagagacaacuggcacggcucuaaucggcccugggugagcuucaaccagaaucuugaguaccaaauuggcuauaucugcuccggggucuuuggagauaacccucgccccaaugacggcacagggagcuguggaccggugucuccuaacggcgccuacgggguuaaaggauucuccuuuaaguacggcaauggcguguggauugggagaaccaaaagcacaaacucucgguccggauucgaaaugaucugggaucccaauggcuggaccgggaccgacagcuccuuuucugucaagcaggacauuguggcgaucacagauuggagcggauauuccggcucuuucguucagcauccugagcugacggggcucaacugcauccgccccuguuucuggguggaacuggucagaggccggcccaaagagagcaccauuuggacauccggaagcucuaucuccuuuugcggcgugaauagcgacaccgucggguggucuuggccugauggagccgagcuuccguucacaauugacaaguga

SEQ ID NO: 213117 - RNA, 1350 nt, Artificial Sequence
  derived and/or modified CDS sequence (opt5) from neuraminidase__InfluenzaA__AEO88973
augaaccccaaucagaagaucauuaccaucggcagcauuugcauggugaucgggauugucucccugaugcuccaaaucggaaacaugaucucucuguggguuagccacuccauucagacaggcaaucagcaucagguggagccuaucucuaacacgaauuuccuuaccgaaaaagccguggcuagcgucacacuggccgggaacuccucucucuguccgauuagaggaugggcggugcacagcaaggacaauuccauccggauuggcagcaaaggggauguuuuugugauccgcgagcccuucauuucuugcucccaucuggaauguagaaccuuuuuccuuacacaaggagcucugcucaacgacaagcacagcaauggcaccgucaaagaucggucuccucaucgcacacugauguccugccccgugggcgaggccccuagccccuacaacucuagauuugaauccguugccuggagcgcuuccgccugucacgacgggaccucuuggcugacgaucggaaucagcggcccugauaauggggcuguggccguccucaaguauaacggaaugauuaccgacacaaucaaguccuggcggaauaacauucugcgcacccaggagagcgagugcgcgugugugaauggcucuugcuucacagugaugaccgaugggccguccaacggacaggccagcuacaaaaucuuuaagauggaaaaaggcagagucguuaagucuguggagcuugacgcucccaacuaucacuacgaagaguguagcugcuauccugaugccggcgagauuacgugugugugccgggacaauuggcauggguccaaccgccccugggucucuuucaaucagaaccuggaauaccaaaucggauauaucugcagcggcguguuuggggauaauccuagacccaacgacggaacaggcuccugugggccgguuagcccuaauggagcuuacggcgugaaaggcuucucuuuuaaguacgggaacggagucuggauuggccggaccaagucccccaauagccgcucuggguucgagaugaucugggauccuaacggauggauugaaacagacuccagcuuuuccgugaaacaggacaucguugccauuaccgauuggucuggcuauagcggguccuucgugcagcaccccgagcucaccggccuggacugcaucagacccuguuucugggucgaacuuauccggggacgcccuaaggagucuacaauuuggacgagcggcuccagcaucucuuuuugcggggucaauuccgauaccgugagcuggucuuggccggacggagcggagcugcccuucacaauugauaaauga

SEQ ID NO: 213118 - RNA, 1350 nt, Artificial Sequence
  derived and/or modified CDS sequence (opt5) from neuraminidase__InfluenzaA__AEO88982
augaaccccaaucagaagaucauuaccaucggcagcauuugcauggugaucgggauugucucccugaugcuccaaaucggaaacaugaucucuauuuggguuagccacuccauccagacaggcaaucagcaucaggccgagccuauuagaaacacgaauuuccugaccgaaaacgcuguggccucugugacacuugcggggaauagcucccuguguccgguccggggaugggcugugcacucuaaagacaacagcauccgcauuggcuccaagggggauguuuuugugaucagagagcccuucauuagcugcucucaucucgaaugucggaccuuuuuccugacacaaggagcccuucugaaugacaaacacuccaacggcaccgucaaggaucgcagcccucauagaacacucaugucuugccccgugggcgaggccccuucccccuacaauagccgguuugaaucuguugcuugguccgccagcgcuugucacgacgggaccuccuggcugacgaucggaaucucuggcccugauaacggggccguggcgguccugaaauauaauggaauuaucaccgacacaauuaagagcuggcgcaacaauauccucagaacccaggaguccgagugcgccugugugaacggcagcugcuucacagugaugaccgaugggccgucuaacggacaggcuuccuacaagauuuuuaaaauggaaaagggcaaagucguuaagagcguggagcugaaugcccccaacuaucacuacgaagaguguucuugcuauccugacgcuggcgagaucacgugugugugccgggauaauuggcaugggagcaaccgccccugggucuccuucaaucagaaccuugaauaccaaaucggauauauuugcucuggcaucuuuggggacaauccuagaccccacgauggaacaggcagcugugggccgguguccccuaacggagccuacggcauuaaaggcuucagcuuuaaguacgggaauggaguuuggaucggccggaccaagucuacaaacucccgcagcggguucgagaugauuugggaccccaauggauggaccggcaccgauucuaacuuuuccgugaaacaggacaucgucgcgaucacagacuggagcggguauuccggcucuuucgugcagcauccugaacugacgggacucgauugcauuagacccuguuucuggguugagcugauccggggccgccccaaggaaagcaccauuuggacauccgggucuagcaucuccuuuugcggagugaauagcgacaccgucucuugguccuggccugaugacgccgagcuuccguucacaauugauaaauga

SEQ ID NO: 213119 - RNA, 1350 nt, Artificial Sequence
  derived and/or modified CDS sequence (opt5) from neuraminidase__InfluenzaA__AEO88990
augaaccccaaucagaagaucauuaccaucggcagcauuugcauggugaucgggauugucucccugaugcuccaaaucggaaacaugaucucuauuuggguuagccacuccauccagacaggcaaucagcaucaggccgagccuauuagaaacacgaauuuccugaccgaaaacgcuguggccucugugacacuugcggggaauagcucccuguguccgguccggggaugggcugugcacucuaaagacaacagcauccgcauuggcuccaagggggauguuuuugugaucagagagcccuucauuagcugcucucaucucgaaugucggaccuuuuuccugacacaaggagcccuucugaaugacaaacacuccaacggcaccgucaaggaucgcagcccucauagaacacucaugucuugccccgugggcgaggccccuucccccuacaauagccgguuugaaucuguugcuugguccgccagcgcuugucacgacgggaccuccuggcugacgaucggaaucucuggcccugauaacggggccguggcgguccugaaauauaauggaauuaucaccgacacaauuaagagcuggcgcaacaauauccucagaacccaggaguccgagugcgccugugugaacggcagcugcuucacagugaugaccgaugggccgucuaacggacaggcuuccuacaagauuuuuaaaauggaaaagggcaaagucguuaagagcguggagcugaaugcccccaacuaucacuacgaagaguguucuugcuauccugacgcuggcgagaucacgugugugugccgggauaauuggcaugggagcaaccgccccugggucuccuucaaucagaaccuugaauaccaaaucggauauauuugcucuggcguguuuggggacaauccuagacccaacgauggaacaggcagcugugggccgguuuccccuaauggagccuacggcaucaaaggcuucagcuuuaaguacgggaacggaguguggauuggccggaccaagucuacaaauucccgcagcggguucgagaugaucugggaccccaacggauggaccggcaccgauucuaauuuuuccgucaaacaggacauuguggcgaucacagacuggagcggguauuccggcucuuucguucagcacccugaacugacgggacucgauugcaucagacccuguuucuggguggagcugauucggggccgccccaaggaaagcaccaucuggacauccgggucuagcauuuccuuuugcggagucaacagcgacaccgugucuugguccuggccugaugacgccgagcuuccguucacaaucgauaaauga

SEQ ID NO: 213120 - RNA, 1350 nt, Artificial Sequence
  derived and/or modified CDS sequence (opt5) from neuraminidase__InfluenzaA__AEO88998
augaaccccaaucagaagaucauuaccaucggcagcauuugcauggugaucgggauugucucccugaugcuccaaaucggaaacaugaucucuauuuggguuagccacuccauccagacaggcaaucagcaucaggccgagccuauuagaaacacgaauuuccugaccgaaaacgcuguggccucugugacacuugcggggaauagcucccuguguccgauccggggaugggcuguccacucuaaagacaacagcauucgcaucggcuccaagggggauguguuuguuauuagagagcccuucaucagcugcucucaucucgaaugucggaccuuuuuccugacacaaggagcccuucugaaugacaaacacuccaacggcaccgugaaggaucgcagcccucauagaacacucaugucuugccccgucggcgaggccccuucccccuacaauagccgguuugaaucuguggcuugguccgccagcgcuugucacgacgggaccuccuggcugacgaucggaauuucuggcccugauaacggggccguugcggugcugaaauauaauggaaucauuaccgacacaaucaagagcuggcgcaacaauauucucagaacccaggaguccgagugcgccugugucaacggcagcugcuucacagugaugaccgaugggccgucuaacgaacaggcuuccuacaagaucuuuaaaauggagaagggaaaaguggucaagagcguugaacugaaugcccccaacuaucacuacgaggaguguucuugcuauccugacgcuggcgaaaucauuugugugugccgggauaauuggcauggcagcaaccgccccuggguguccuucaaucagaaccuugaguaccaaaucggguauauuugcucuggagucuuuggcgacaauccuagacccaacgaugggacgggaagcuguggcccgguguccccuaauggggccuacggaaucaaaggcuucagcuuuaaguacggcaacgggguuuggauuggacggacaaagucuaccaauucccgcagcggcuucgaaaugaucugggaccccaacggguggacaggaaccgauucuaauuuuuccgugaaacaggacaucgucgcgauuaccgacuggagcggcuauuccgggucuuucgugcagcacccugagcugacaggccucgauugcaucagacccuguuucuggguugaacugauucggggacgccccaaggagagcacgaucuggaccuccggcucuagcauuuccuuuugcggggugaacagcgacacagucucuugguccuggccugauggagccgagcuuccguucaccaucgacaaauga

SEQ ID NO: 213121 - RNA, 1350 nt, Artificial Sequence
  derived and/or modified CDS sequence (opt5) from neuraminidase__InfluenzaA__AEO89006
augaaccccaaucagaagaucauuaccaucggcagcauuugcauggugaucgggauugucucccugaugcuccaaaucggaaacaugaucucuauuuggguuagccacuccauccagacaggcaaucagcaucaggccgagccuauuagaaacacgaauuuccugaccgaaaacgcuguggccucugugacacuugcggggaauagcucccuguguccgguccggggaugggcugugcacucuaaagacaacagcauccgcauuggcuccaagggggauguuuuugugaucagagagcccuucauuagcugcucucaucucgaaugucggaccuuuuuccugacacaaggagcccuucugaaugacaaacacuccaacggcaccgucaaggaucgcagcccucauagaacacucaugucuugccccgugggcgaggccccuucccccuacaauagccgguuugaaucuguugcuugguccgccagcgcuugucacgacgggaccuccuggcugacgaucggaaucucuggcccugauaacggggccguggcgguccugaaauauaauggaauuaucaccgacacaauuaagagcuggcgcaacaauauccucagaacccaggaguccgagugcgccugugugaacggcagcugcuucacagugaugaccgaugggccgucuaacggacaggcuuccuacaagauuuuuaaaauggaaaagggcaaagucguuaagagcguggagcugaaugcccccaacuaucacuacgaagaguguucuugcuauccugacgcuggcgagaucacgugugugugccgggauaauuggcaugggagcaaccgccccugggucuccuucaaucagaaccuugaauaccaaaucggauauauuugcucuggcguguuuggggacaauccuagacccaacgauggaacaggcagcugugggccgguuuccccuaauggagccuacggcaucaaaggcuucagcuuuaaguacgggaacggaguguggauuggccggaccaagucuacaaauucccgcagcggguucgagaugaucugggaccccaacggauggaccggcaccgauucugacuuuuccgucaaacaggacauuaucgcgaucacagauuggagcggguauuccggcucuuucgugcagcacccugaacugacgggacucgacugcauuagacccuguuucuggguugagcugauccggggccgccccaaggaaagcaccauuuggacauccgggucuagcaucuccuuuugcggagugaauagcgauaccgucucuugguccuggccugacggcgccgagcuuccguucacaauugauaaauga

SEQ ID NO: 213122 - RNA, 1350 nt, Artificial Sequence
  derived and/or modified CDS sequence (opt5) from neuraminidase__InfluenzaA__AEO89023
augaaccccaaucagaagaucauuaccaucggcagcauuugcauggugaucgggauugucucccugaugcuccaaaucggaaacaugguuucucugugggugagccacuccauccagacaggcaaucagcaucagguggagccuauuucuaacacgaauuuccuuaccgaaaaagccgucgcuagcgugacacuggccgggaacuccucucucuguccgaucagaggaugggcgguucacagcaaggacaauuccauucggaucggcagcaaaggggauguguuugucauucgcgagcccuucaucucuugcucccaucuggaauguagaaccuuuuuccuuacacaaggagcucugcucaacgacaagcacagcaauggcaccgugaaagaucggucuccucaucgcacacugauguccugccccguuggcgaggccccuagccccuacaacucuagauuugaauccguggccuggagcgcuuccgccugucacgacgggaccucuuggcugacgauuggaaucagcggcccugauaauggggcugucgccgugcucaaguauaacggaaugaucaccgacacaauuaaguccuggcggaauaacauccugcgcacccaggagagcgagugcgcgugugugaauggcucuugcuucacagucaugaccgaugggccguccaacggacaggccagcuacaaaauuuuuaagauggaaaaaggcaagguugugaaaucuguggagcuugacgcucccaacuaucacuacgaagaguguagcugcuauccugaugccggcgagaucacgugugucugcagagacaauuggcauggguccaaccggcccugggugucuuucaaucagaaccuggaauaccaaauuggauauaucugcagcggcguuuuuggggauaauccucgccccaacgacggaacaggcuccugugggccggugagcccuaauggagcuuacggcgucaagggcuucucuuuuaaguacgggaacggaguguggaucggcagaaccaaaucccccagcucucgguccggguucgagaugauuugggauccuaauggauggacagaaaccgacagcuccuuuucuguuaagcaggacaucguggccauuaccgauuggagcggcuauuccgggucuuucguccagcaccccgagcucacaggccuggacugcauccgccccuguuucuggguggaacuuauuagaggacggccuaaagagagcacgaucuggaccuccggcagcucuaucuccuuuugcggggucaacagcgauacagugucuugguccuggccggacggagcggagcugcccuucaccauugauaaguga

SEQ ID NO: 213123 - RNA, 1350 nt, Artificial Sequence
  derived and/or modified CDS sequence (opt5) from neuraminidase__InfluenzaA__AEO89032
augaaccccaaucagaagaucauuaccaucggcagcauuugcauggugaucgggauugucucccugaugcuccaaaucggaaacaugaucucuauuuggguuagccacuccauccagacaggcaaucagcaucaggccgagccuauuagaaacacgaauuuccugaccgaaaacgcuguggccucugugacacuugcggggaauagcucccuguguccgguccggggaugggcugugcacucuaaagacaacagcauccgcauuggcuccaagggggauguuuuugugaucagagagcccuucauuagcugcucucaucucgaaugucggaccuuuuuccugacacaaggagcccuucugaaugacaaacacuccaacggcaccgucaaggaucgcagcccucauagaacacucaugucuugccccgugggcgaggccccuucccccuacaauagccgguuugaaucuguugcuugguccgccagcgcuugucacgacgggaccuccuggcugacgaucggaaucucuggcccugauaacggggccguggcgguccugaaauauaauggaauuaucaccgacacaauuaagagcuggcgcaacaauauccucagaacccaggaguccgagugcgccugugugaacggcagcugcuucacagugaugaccgaugggccgucuaacggacaggcuuccuacaagauuuuuaaaauggaaaagggcaaagucguuaagagcguggagcugaaugcccccaacuaucacuacgaagaguguucuugcuauccugacgcuggcgagaucacgugugugugccgggauaauuggcaugggagcaaccgccccugggucuccuucaaucagaaccuugaauaccaaaucggauauauuugcucuggcguguuuggggacaauccuagacccaacgauggaacaggcagcugugggccgguuuccccuaauggagccuacggcaucaaaggcuucagcuuuaaguacgggaacggaguguggauuggccggaccaagucuacaaauucccgcagcggguucgagaugaucugggaccccaacggauggaccggcaccgauucuaauuuuuccgucaaacaggacauuguggcgaucacagacuggagcggguauuccggcucuuucguucagcacccugaacugacgggacucgauugcaucagacccuguuucuggguggagcugauucggggccgccccaaggaaagcaccaucuggacauccgggucuagcauuuccuuuugcggagucaacagcgacaccgugucuugguccuggccugauggcgccgagcuuccguucacaaucgacaaauga

SEQ ID NO: 213124 - RNA, 1350 nt, Artificial Sequence
  derived and/or modified CDS sequence (opt5) from neuraminidase__InfluenzaA__AEO89041
augaaccccaaucagaagaucauuaccaucggcagcauuugcauggugaucgggcuggucucccucaugcugcaaauuggaaacaugaucucuaucuggguuagccacuccauucagacaggcaaucagcaucaggccgagccuaucagaaacacgaauuuccuuaccgaaaacgcuguggccucugugacacuggcggggaauagcucccucuguccgguccggggaugggcugugcacucuaaagacaacagcauucgcaucggcuccaagggggauguuuuugugauuagagagcccuucaucagcugcucucaucuggaaugucggaccuuuuuccuuacacaaggagcccugcucaaugacaaacacuccaacggcaccgucaaggaucgcagcccucauagaacacugaugucuugccccgugggcgaggccccuucccccuacaauagccgguuugaaucuguugcuugguccgccagcgcuugucacgacgggaccuccuggcugacgauuggaaucucuggcccugauaacggggccguggcgguccucaaauauaauggaaucauuaccgacacaaucaagagcuggcgcaacaauauucugagaacccaggaguccgagugcgccugugugaacggcagcugcuucacagugaugaccgaugggccgucuaacggacaggcuuccuacaagaucuuuaaaauggaaaagggcaaagucguuaagagcguggagcuuaaugcccccaacuaucacuacgaagaguguucuugcuauccugacgcuggcgagauuacgugugugugccgggauaauuggcaugggagcaaccgccccugggucuccuucaaucagaaccuggaauaccaaaucggauauaucugcucuggcguguuuggggacaauccuagacccaacgauggaacaggcagcugugggccgguuuccccuaauggagccuacggcauuaaaggcuucagcuuuaaguacgggaacggaguguggaucggccggaccaagucuacaaauucccgcagcggguucgagaugauuugggaccccaacggauggaccggcaccgauucuaauuuuuccgucaaacaggacaucguggcgauuacagacuggagcggguauuccggcucuuucguucagcacccugaacucacgggacuggauugcaucagacccuguuucuggaucgagcuuauucggggccgccccaaggaaagcaccaucuggacauccgggucuagcauuuccuuuugcggagugaacagcgacaccgucucuugguccuggccugauggcgccgagcugccguucacaaucgacaaauga

SEQ ID NO: 213125 - RNA, 1350 nt, Artificial Sequence
  derived and/or modified CDS sequence (opt5) from neuraminidase__InfluenzaA__AEO89050
augaaccccaaucagaagaucauuaccaucggcagcauuugcauggugaucgggauugucucccugaugcuccaaaucggaaacaugaucucuauuuggguuagccacuccauccagacaggcaaucagcaucaggccgagccuauuagaaacacgaauuuccugaccgaaaacgcuguggccucugugacacuugcggggaauagcucccuguguccgauccggggaugggcuguccacucuaaagacaacagcauucgcaucggcuccaagggggauguguuuguuauuagagagcccuucaucagcugcucucaucucgaaugucggaccuuuuuccugacacaaggagcccuucugaaugacaaacacuccaacggcaccgugaaggaucgcagcccucauagaacacucaugucuugccccaugggcgaggccccuucccccuacaauagccgguuugaaucugucgcuugguccgccagcgcuugucacgacgggaccuccuggcugacgaucggaauuucuggcccugauaacggggccguggcgguucugaaauauaauggaaucauuaccgacacaaucaagagcuggcgcaacaauauucucagaacccaggaguccgagugcgccugugugaacggcagcugcuucacagucaugaccgaugggccgucuaacggacaggcuuccuacaagaucuuuaaaauggaaaagggcaaaguggucaagagcguggagcugaaugcccccaacuaucacuacgaagaguguucuugcuauccugacgcuggcgagaucauuuguguuugccgggauaauuggcaugggagcaaccgccccuggguguccuucaaucagaaccuugaauaccaaaucggauauauuugcucuggcguguuuggggacaauccuagacccaacgauggaacgggcagcugugggccggucuccccuaauggagccuacggcaucaaaggcuucagcuuuaaguacgggaacggaguguggauuggccggacaaagucuaccaauucccgcagcggguucgagaugaucugggaccccaacggauggacaggcaccgauucugacuuuuccguuaaacaggacaucguggcgauuaccgauuggagcggguauuccggcucuuucguccagcacccugaacugacaggacucgacugcaucagacccuguuucuggguggagcugauucggggccgccccaaggaaagcacgaucuggaccuccgggucuagcauuuccuuuugcggaguuaauagcgauacagugucuugguccuggccugacggcgccgagcuuccguucaccaucgauaaauga

SEQ ID NO: 213126 - RNA, 1350 nt, Artificial Sequence
  derived and/or modified CDS sequence (opt5) from neuraminidase__InfluenzaA__AEO89058
augaaccccaaucagaagaucauuaccaucggcagcauuugcauggugaucgggauugucucccugaugcuccaaaucggaaacaugaucucuauuuggguuagccacuccauccagacaggcaaucagagacaggccgagccuauuucuaacacgaaauuccugaccgaaaaggcuguggccagcgugacacuugcgggaaauuccucucuguguccgaucagcgggugggcugucuacuccaaagacaacagcauucggaucggcucucgcggggauguguuuguuauuagagagcccuucaucuccugcagccaucucgaaugucggaccuuuuuccugacacaaggagcccuucugaaugacaagcacucuaacggcaccgugaaagaucgcuccccucauagaacacucaugagcugccccgucggcgaggccccuucucccuauaauucccgguuugaaagcguggcuugguccgccucugcuugucacgacgggaccagcuggcugacgaucggaauuuccggcccugauaacggggccguugcggugcugaaguacaauggaaucauuaccgacacaaucaagagcuggcgcaacaauauucucagaacccaggagucugagugcgccugugucaacggcuccugcuucacagugaugaccgaugggccgagcaauggacaggcuucuuauaaaaucuuuaagauggaaaaaggcaagguggucaaaagcguugagcuggacgcccccaacuaccauuaugaagaguguuccugcuacccugaugcuggcgagaucacgugugugugccgggacaacuggcacgggucuaaucgccccugggugagcuucaaccagaaucuugauuaucaaauuggauacaucugcuccggcgucuuuggggacaacccuagacccaaugauggaacaggcagcugugggccggugucuccuaacggagccuacggcguuaagggcuucuccuuuaaguaugggaauggaguguggauuggccggaccaaaagcacaaacucucgcuccggguucgaaaugaucugggaccccaauggauggaccggcaccgacagcuccuuuucugucaagcaggauauuguggcgaucacagacuggagcggguacuccggcucuuucguucagcacccugagcugacgggacucgauugcaucagacccuguuucuggguggaacugauucggggccgccccaaagagagcaccaucuggacauccgggagcucuauuuccuuuugcggagucaacagcgacaccgugucuugguccuggccugauggcgccgaacuuccguucacaaucgacaaguga

SEQ ID NO: 213127 - RNA, 1350 nt, Artificial Sequence
  derived and/or modified CDS sequence (opt5) from neuraminidase__InfluenzaA__AEO89075
augaaccccaaucagaagaucauuaccaucggcagcauuugcauggugaucgggauugucucccugaugcuccaaaucggaaacaugaucucuauuuggguuagccacuccauccagagaggcaaucugaaccagguggagccuauuucuaauacaaacuuccuuacggaaaaagccguggcuagcgucacccuggccggaaauuccucucucuguccgauccgggggugggcgauucauagcaaggacaacuccauccgcauuggcagcaaaggggauguguuuguuaucagagagcccuucaucucuugcucccaccuggaaugucggacauuuuuccuuacccagggagcucugcucaaugacaagcauagcaacggcacagugaaagaucgcucuccucacagaacccugauguccugccccgucggcgaggugccuagccccuacaauucucgguuugaauccguugccuggagcgccuccgcuugucaugacgggacaucuuggcugaccauuggaaucagcggcccugauaacggggccguggcugucgugaaguauaauggaauuaucacggacaccauuaaguccuggcgcaacaauauccucagaacacaagagagcgagugcgccugugugaacggcucuugcuucaccgucaugacagaugggccguccaacggacaggcgagcuacaaaaucuuuaagauggaaaaaggcaagguuauuaaaucuguggagcuggacgcccccaauuaucacuacgaagaguguagcugcuauccugaugcuggcgagaucaccugugugugccgggacaacuggcacggguccaaucgccccugggucucuuucaaccagaaucuugaauaccagauuggauauaucugcagcggcguguuuggggauaacccuagacccaaugacggaacgggcuccugugggccgguuagcccuaacggagccuacggcgugaagggcuucucuuuuaaguacgggaauggagucuggauuggccggacaaaaucccccaacagccgcucuggguucgagaugaucugggauccuaauggaugguccgaaaccgacagcuccuuuucugugaagcaagacaucguugcuauuacagauuggagcggcuauuccgggucuuucgugcagcaucccgagcugaccggccucgacugcaucagacccuguuucugggucgaacugauucggggacgcccuaaagagagcaccaucuggacauccggcagcucuauuuccuuuugcggggugaacagcgauacggucucuugguccuggccggacggagccgagcuucccuucaccaucgauaaguga

SEQ ID NO: 213128 - RNA, 1350 nt, Artificial Sequence
  derived and/or modified CDS sequence (opt5) from neuraminidase__InfluenzaA__AEO89084
augaaccccaaucagaagaucauuaccaucggcagcauuugcauggugaucgggauugucucccugaugcuccaaaucggaaacaugaucucuauuuggaucagcuacuccauucagacaggcaaucagcaccaggccgagccuacgagaaacgcuaccuuccugacagaaaaugccguugcgucugugacccuugcugggaacagcucccuguguccggugcggggaugggccguccauucuaaagacaauagcauccgcauuggcuccaagggggauguguuuguuaucagagagcccuucauuagcugcucucaccucgaaugucggacauuuuuccugacccaaggagcccuucugaacgacaaacauuccaauggcacagugaaggaucgcagcccucacagaacccucaugucuugccccgucggcgaggcuccuucccccuauaacagccgguuugaaucuguggccugguccgcuagcgccugucaugacgggacguccuggcugaccaucggaaucucuggcccugauaauggggcgguugccgugcugaaauacaacggaauuaucacagacaccauuaagagcuggcgcaauaacauccucagaacacaggaguccgagugcgcuugugucaauggcagcugcuucaccgugaugacggaugggccgucugacggacaggccuccuauaagauuuuuaaaauggaaaagggcaaaguggucaagagcguugagcugaucgcucccaacuaccacuaugaagaguguucuugcuacccugaugccggcgagaucacaugugugugccgggacaacuggcacgggagcaaucgccccuggguguccuucaaccagaaucuugaauaucaaauuggauacaucugcucuggcgucuuuggggauaacccuagacccaaugacggaaccggcagcugugggccgguguccccuaacggagcguacggcauuaaaggcuucagcuuuaaguaugggaauggaguuuggaucggccggacaaagucuaccaacucccgcagcggguucgagaugauuugggaucccaauggauggaccgaaacagacucuaacuuuuccgugaaacaggacaucgucgccaucacggauuggagcggcuacuccgggucuuucgugcagcauccugagcugaccggccucgacugcauuagacccuguuucuggguugaacugauccggggacgccccaaggagagcacaauuuggaccuccggcucuagcaucuccuuuugcggggugaauagcgauacagucucuugguccuggccugacggagcugagcuuccguucaccauugauaaauga

SEQ ID NO: 213129 - RNA, 1350 nt, Artificial Sequence
  derived and/or modified CDS sequence (opt5) from neuraminidase__InfluenzaA__AEO89093
augaaccccaaucagaagaucauuaccaucggcagcauuugcauggugaucgggauugucucccugaugcuccaaaucggaaacaugaucucucuguggguuagccacuccauucagacaggcaaucagcaucagguggagccuaucucuaacacgaauuuccuuguggaaaaagccgucgcuagcgugacccuggccgggaacuccucucucuguccgauuagaggaugggcgguucacagcaaggacaauuccauccggauuggcagcaaaggggauguguuugucauccgcgagcccuucauuucuugcucccaucuggaauguagaacauuuuuccuuacccaaggagcucugcucaacgacaagcacagcaauggcacagugaaagaucggucuccucaucgcacccugauguccugccccguuggcgaggccccuagccccuacaacucuagauuugaauccguggccuggagcgcuuccgccugucacgacgggacaucuuggcugaccaucggaaucagcggcccugauaauggggcugucgccgugcucaaguauaacggaaugauuacggacaccaucaaguccuggcggaauaacauucugcgcacacaggagagcgagugcgcgugugugaauggcucuugcuucaccgucaugacagaugggccguccaacggacaggccagcuacaaaaucuuuaagauggaaaaaggcagaguugugaagucuguggagcuugacgcucccaacuaucacuacgaagaguguagcugcuauccugaugccggcgagauuaccugugucugccgggacaauuggcauggguccaaccgccccugggugucuuucaaucagaaccuggaauaccaaaucggauauaucugcagcggcguuuuuggggauaauccuagacccaacgacggaacgggcuccugugggccggugagcucuaauggagcuuacggcgucaaaggcuucuccuuuaaguacgggaacggaguguggauuggccggacaaagagcccuaauucucgcuccggguucgagaugaucugggaucccaacggauggaccgaaacagacagcuccuuuucuguuaaacaggacauuguggccaucaccgauuggagcggcuauuccgggucuuucguccagcacccugagcucaccggccuggacugcauuagacccuguuucuggguggaacuuauccggggacgccccaaggagagcacaaucuggacguccggcagcucuauuuccuuuugcggggucaauagcgauaccgugucuugguccuggccugacggagcggagcugccguucacaaucgauaaauga

SEQ ID NO: 213130 - RNA, 1350 nt, Artificial Sequence
  derived and/or modified CDS sequence (opt5) from neuraminidase__InfluenzaA__AEO89102
augaaccccaaucagaagaucauuaccaucggcagcauuugcauggugaucgggauugucucccugaugcuccaaaucggaaacaugaucucuauuuggaucagccacuccauucagacaggcaaucagaaccagguugagccuaucucuaauacgaacuuccugaccgaaaaagccguggcuagcgugauucuugccggcaauuccucucuguguccgaucagaggaugggcgauucauagcaaggacaacuccauccggaucggcagcaaaggggaugucuuugugauucgcgagcccuucaucucuugcucccaccucgaauguagaacauuuuuccugacccaaggagcccuucugaaugacaagcauagcaacggcacaguuaaagaucggucuccucaccgcacccucauguccugccccgugggcgaggcuccuagccccuacaauucuagauuugaauccgucgccuggagcgcuuccgccugucaugacgggacaucuuggcugaccauuggaaucagcggcccugauuccggggcuguggccguucugaaguauaacggaauuaucacggacaccaucaagagcuggcggaauaacauucuccgcacacaggagucugagugcgcgugugugaauggcuccugcuucaccgucaugacagaugggccgagcaacggacaggccucuuacaaaaucuuuaagauggaaaaaggcaaggugauuaaaagcguggagcuggacgcucccaacuaucacuacgaagaguguuccugcuauccugaugccggcgagaucaccugugucugcagagacaauuggcacgggucuaaccggcccuggguuagcuucaaucagaaccuugaauaccaaauuggauauaucugcuccggcguguuuggggauaauccucgccccaacgacggaacgggcagcugugggccggugucucauaauggagcuuacggcgucaagggcuucuccuuuaaguacgggaacggaguguggaucggcagaacaaaaagcccuaauucucgguccggguucgagaugauuugggaucccaacggauggagcgaaaccgacuccucuuuuagcguuaagcaggacaucguggccauuacagauugguccggcuauucugggagcuucguccagcacccugagcugaccggccucgacugcauccgccccuguuucuggguggaacugauuagaggacggcccaaagaguccaccguuuggacaagcgggucuuccaucagcuuuugcggggucaauucugauacgguguccuggagcuggccugacggagcggagcuuccguucaccauugauaaguga

SEQ ID NO: 213131 - RNA, 1350 nt, Artificial Sequence
  derived and/or modified CDS sequence (opt5) from neuraminidase__InfluenzaA__AEO89111
augaaccccaaucagaagaucauuaccaucggcagcauuugcauggugaucgggauugucucccugaugcuccaaaucggaaacaucauuucuaucuggguuagccacuccauucagacaggcaaucagcaucaggacgagccuaucagaaacgccaaugugcugacggaaaacgcuguggccucugucacccuugcggggaauagcucccuguguccggugcggggaugggcuguucacucuaaagauaacagcauucgcaucggcuccaagggggacguguucgucauuagagagcccuuuaucagcugcucucaucucgaaugucggacauucuuucugacccaaggagcccuucugaaugauaaacacuccaacggcacagugaaggaccgcagcccucauagaacccucaugucuugccccguuggcgaggccccuucccccuacaauagccgguucgaaucuguggcuugguccgccagcgcuugucacgaugggacauccuggcugaccaucggaauuucuggcccugacaacggggccgucgcggugcugaaauauaauggaaucauuacggauaccaucaagagcuggcgcaacaauauucucagaacacaggaguccgagugcgccugugugaacggcagcugcuuuaccgucaugacagacgggccgucuaacggacaggcuuccuacaagaucuucaaaauggaaaagggcaaaguugucaagagcguggagcugaaugcccccaacuaucacuacgaagaguguucuugcuauccugaugcuggcgagaucaccugugugugccgggacaauuggcaugggagcaaccgccccuggguguccuuuaaucagaaccuugaauaccaaauuggauauaucugcucuggcguuuucggggauaauccuagacccaacgacggaacgggcagcugugauccgguguccccuaauggggccuacggaauuaaaggcuuuagcuucaaguacggcaacggggucuggaucggacggacaaagucuaccaauucccgcagcggcuuugagaugauuugggaccccaacggguggacagaaaccgacucuaauuucuccgugaaacaggauaucguugcgaucaccgacuggagcggauauuccggcucuuuugugcagcacccugagcugacagggcucgauugcauuagacccuguuucugggucgaacugauccggggccgccccaaggagagcacgauuuggaccuccggaucuagcaucuccuucugcggcgugaacagcgacacagucucuugguccuggccugauggggccgagcuuccguuuaccauugacaaauga

SEQ ID NO: 213132 - RNA, 1350 nt, Artificial Sequence
  derived and/or modified CDS sequence (opt5) from neuraminidase__InfluenzaA__AEO89120
augaaccccaaucagaagaucauuaccaucggcagcauuugcauggugaucgggauugucucccugaugcuccaaaucggaaacaugaucucuauuuggguuagccacuccauccagacaggcaaucagcaucaggccgagccuauuagaaacgcuucuuuccugacggaaaaugccguggcgagcgugacccuugcugggaacuccucucuguguccgguccggggaugggccgugcacagcaaagacaauuccauccgcauuggcagcaagggggauguuuuugugaucagagagcccuucauuucuugcucccaucucgaaugucggacauuuuuccugacccaaggagcccuucugaacgacaaacacagcaauggcacagucaaggaucgcucuccucauagaacccucauguccugccccgugggcgaggcuccuagccccuacaacucucgguuugaauccguugccuggagcgcuuccgccugucacgacgggaucucuuggcugacaaucggaauuagcggcccugauaauggggcgguggccguccugaaauauaacggaaucauuaccgacacgaucaaguccuggcgcaauaacauucucagaacccaggagagcgagugcgcuugugugaauggcucuugcuucacagugaugaccgaugggccguccaacggacaggccagcuacaagaucuuuaaaauggaaaagggcaaagucguuaagucuguggagcugaacgcucccaauuaucacuacgaagaguguagcugcuauccugacgccggcgagaucacaugugugugccgggauaacuggcauggguccaaucgccccugggucucuuucaaccagaaucuugaauaccaaauuggauauaucugcagcggcguguuuggggacaacccuagacccaaugauggaaccggcuccugugggccgguuagcccuaacggagcguacggcauuaaaggcuucucuuuuaaguacgggaauggaguguggaucggccggacgaaguccacaaacagccgcucuggguucgagaugauuugggaccccaauggaugggccgaaaccgauuccaacuuuagcgucaaacaggacaucguggcuaucacagacugguccggcuauucugggagcuucguucagcacccugagcugaccggccucgauugcauuagacccuguuucuggguggaacugauccggggacgccccaaggagggcaccauuuggacauccgggucuagcaucuccuuuugcggagucaauagcgacacggugucuugguccuggccugauggcgccgagcuuccguucaccauugacaaauga

SEQ ID NO: 213133 - RNA, 1350 nt, Artificial Sequence
  derived and/or modified CDS sequence (opt5) from neuraminidase__InfluenzaA__AEO89129
augaaccccaaucagaagaucauuaccaucggcagcauuugcauggugaucgggauugucucccugaugcuccaaaucggaaacaucauuucuaucuggguuagccacuccacacagacgggcaaucagcaucaggacgagccuauuagaaacgccaauuuccugaccgaaaacgcuguggccucugugacacuugcggggaauagcucccuguguccgguccggggaugggcugugcacucuaaagauaacagcauccgcguuggcuccaagggggacguguuugucauuagagagcccuucaucagcugcucucaucucgaaugucggaccuuuuuccugacacaaggagcccuucugaaugauaaacacuccaacggcaccgugaaggaccgcagcccucauagaacacucaugucuugccccguuggcgaggccccuucccccuacaauagccgguuugaaucuguggcuugguccgccagcgcuugucacgaugggaccuccuggcugacgauuggaaucucuggcccugacaacggggccgucgcggugcugaaauauaauggaaucauuaccgauacaaucaagagcuggcgcaacaauauucucagaacccaggaguccgagugcgccugugugaacggcagcugcuucacagucaugaccgacgggccgucuaacggacaggcuuccuacaagaucuuuaaaauggaaaagggcaaaguugucaagagcguggagcugaaugcccccaacuaucacuacgaagaguguucuugcuauccugaugcuggcgagauuacgugugugugccgggacaauuggcaugggagcaaccgccccuggguguccuucaaucagaaccuugaauaccaaaucggauauaucugcucuggcguuuuuggggauaauccuagacccaacgacggaacaggcagcugugauccgguguccccuaauggggccuacggaauuaaaggcuucagcuuuaaguacggcaacggggucuggaucggacggaccaagucuacaaauucccgcagcggcuucgagaugauuugggaccccaacggguggaccgaaaccgacucuaauuuuuccgugaaacaggauaucguugcgauuacagacuggagcggauauuccggcucuuucgugcagcacccugagcugacggggcucgauugcaucagacccuguuucugggucgaacugauccggggccgccccaaggagagcaccauuuggacauccggaucuagcaucuccuuuugcggcgugaacagcgacaccgucucuugguccuggccugauggggccgagcuuccguucacaauugacaaauga

SEQ ID NO: 213134 - RNA, 1350 nt, Artificial Sequence
  derived and/or modified CDS sequence (opt5) from neuraminidase__InfluenzaA__AEO89138
augaaccccaaucagaagaucauuaccaucggcagcauuugcauggugacagggaucgucucccugaugcuccaaauuggaaacaucaucucuauguggguuagccacuccauucagacgagaaaucagcaucaggccgagccuauccggaacaccaauuuccugacagaaaacgcuguggccucugugacccuuacaggcaauagcucccuguguccgauucgcgggugggcgguccacucuaaagacaacagcaucagaauuggauccaagggcgauguguuuguuauccgggagcccuucauuagcugcucucaucucgaaugucgcaccuuuuuccugacacaaggggcccuucugaaugacaaacacuccaacggaaccgugaaggauagaagcccucaucggacgcucaugucuugccccgucggcgaggcuccuucccccuacaauagccgcuuugaaucuguggccugguccgcuagcgccugucacgacggcaccuccuggcugacaaucgggaucucuggaccugauaacggcgcuguugccgugcugaaauauaaugggauuaucaccgacacaauuaagagcuggagaaacaauauccuccggacccaggaguccgagugcgcgugugucaacggaagcugcuucacggugaugacagauggcccgucuaacgggcaggccuccuacaagauuuuuaaaauggaaaagggaaaaguggucaagagcguugagcugaaugcucccaacuaucacuacgaagaguguucuugcuauccugacgccggcgagaucaucugugugugccgcgauaauuggcauggcagcaacagacccuggguguccuucaaucagaaccuugaauaccaaauuggguauaucugcucuggagucuuuggcgacaauccucggcccaacgaugggaccggaagcuguggcccgguguccccuaauggggcuuacggaauuaaaggcuucagcuuuaaguacggcaacgggguuuggaucggacgcacaaagucuaccaauuccagaagcggcuucgagaugauuugggaccccaacggguggaccggaacagauaaugacuuuucugugaaacaggacaucgucgccaucacggauugguccggcuauagcggguccuucgugcagcacccugaacugaccggccucgacugcauucggcccuguuucuggguugagcugauccgcggaagacccaaggaaucuacaguguggaccagcggcuccucuauuagcuuuugcggggucaacuccgauacagugagcuggucuuggccugacggagcggagcuuccguucaccaucgauaaauga

SEQ ID NO: 213135 - RNA, 1350 nt, Artificial Sequence
  derived and/or modified CDS sequence (opt5) from neuraminidase__InfluenzaA__AEO89156
augaaccccaaucagaagaucauuaccaucggcagcauuugcauggugacagggaucgucucccugaugcuccaaauuggaaacaucacgucuauguggguuagccacuccauccagaccagaaaucagcaucaggccgagccuauucggaacacaaauuuccugaccgaaaacgcuguggccucugugacacuugcgggcaauagcucccuguguccgauccgcgggugggcuguccacucuaaagacaacagcauuagaaucggauccaagggcgauguguuuguuauucgggagcccuucaucagcugcucucaucucgaaugucgcaccuuuuuccugacacaaggggcccuucugaaugacaaacacuccaacggaaccgugaaggauagaagcccucaucggacgcucaugucuugccccgucggcgaggccccuucccccuacaauagccgcuuugaaucuguggcuugguccgccagcgcuugucacgacggcaccuccuggcugacaauugggaucucuggaccugauaacggcgccguugcggugcugaaauauaaugggaucauuaccgacacaaucaagagcuggagaaacaauauucuccggacccaggaguccgagugcgccugugucaacggaagcugcuucacggugaugacagauggcccgucuaacgggcaggcuuccuacaagaucuuuaaaauggaaaagggaaaaguggucaagagcguugagcugaaugcccccaacuaucacuacgaagaguguucuugcuauccugacgcuggcgagauuaucugugugugccgcgauaauuggcauggcagcaacagacccuggguguccuucaaucagaaccuugaauaccaaaucggguauauuugcucuggagucuuuggcgacaauccucggcccaacgaugggaccggaagcuguggcccgguguccccuaauggggccuacggaaucaaaggcuucagcuuuaaguacggcaacgggguuuggauuggacgcacaaagucuaccaauuccagaagcggcuucgagaugaucugggaccccaacggguggaccggaacagauucugacuuuuccgugaaacaggacauugucgcgaucacggauuggagcggcuauuccgggucuuucgugcagcacccugaacugaccggccucgacugcauccggcccuguuucuggguugagcugauucgcggaagacccaaggaaagcacaaucuggaccuccggcucuagcauuuccuuuugcggggugaauagcgauacagucucuugguccuggccugacggagccgagcuuccguucaccaucgauaaauga

SEQ ID NO: 213136 - RNA, 1350 nt, Artificial Sequence
  derived and/or modified CDS sequence (opt5) from neuraminidase__InfluenzaA__AEO89174
augaaccccaaucagaagaucauuaccaucggcagcauuugcauggugacagggaucgucucccugaugcuccaaauuggaaacaucaucucuauguggguuagccacuccauucagacgagaaaucagcaucaggccgagccuauccggaacaccaauuuccugacagaaaacgcuguggccucugugacccuugcgggcaauagcucccuguguccgauucgcgggugggcuguccacucuaaagacaacagcaucagaauuggauccaagggcgauguguuuguuauccgggagcccuucauuagcugcucucaucucgaaugucgcacauuuuuccugacccaaggggcccuucugaaugacaaacacuccaacggaacagugaaggauagaagcccucaucggacccucaugucuugccccgucggcgaggccccuucccccuacaauagccgcuuugaaucuguggcuugguccgccagcgcuugucacgacggcacguccuggcugaccaucgggaucucuggaccugauaacggcgccguugcggugcugaaauauaaugggauuaucacagacaccauuaagagcuggagaaacaauauccuccggacacaggaguccgagugcgccugugucaacggaagcugcuucaccgugaugacggauggcccgucuaacgggcaggcuuccuacaagauuuuuaaaauggaaaagggaaaaguggucaagagcguugagcugaaugcccccaacuaucacuacgaagaguguucuugcuauccugacgcuggcgagaucaucugugugugccgcgauaauuggcauggcagcaacagacccuggguguccuucaaucagaaccuugaauaccaaauuggguauaucugcucuggagucuuuggcgacaauccucggcccaacgaugggacaggaagcuguggcccgguguccccuaauggggccuacggaauuaaaggcuucagcuuuaaguacggcaacgggguuuggaucggacgcaccaagucuacaaauuccagaagcggcuucgagaugauuugggaccccaacggguggaccggaaccgauucugacuuuuccgugaaacaggacaucgucgcgaucacagauuggagcggcuauuccgggucuuucgugcagcacccugaacugacgggccucgacugcauucggcccuguuucuggguugagcugauccgcggaagacccaaggaaagcaccauuuggacauccggcucuagcaucuccuuuugcggggugaauagcgauaccgucucuugguccuggccugacggagccgagcuuccguucacaauugauaaauga

SEQ ID NO: 213137 - RNA, 1350 nt, Artificial Sequence
  derived and/or modified CDS sequence (opt5) from neuraminidase__InfluenzaA__AEO89183
augaaccccaaucagaagaucgugaccauuggcagcaucugcauggucauugggaucguuucccugaugcuccaaauuggaaacaugaucucuaucugggugagccacuccauucagacaggcaaucagcaucagacggagccuaucagaaacaccaauuuccugacagaaaacaccguggccucugucacacuugcugggaauagcucccuguguccgauucggggaugggccgugcacucuaaagacaacagcauccgcauuggcuccaagggggauguuuuugugaucagagagcccuucauuagcugcucucaucucgaaugucggaccuuuuuccugacacaaggagcgcuucugaaugacaaacacuccaacggcaccgucaaggaucgcagcccucauagaacgcucaugucuugccccaucggcgaggcuccuucccccuacaauagccgguuugaaucuguggccugguccgccagcgcuugucacgacgggaccuccuggcugacaaucggaauuucuggcccugauaacggggccguugcugugcugaaauauaauggaaucauuaccgacacaaucaagagcuggcgcaacaauauucucagaacccaggaguccgagugcgccugugucaacggcagcugcuucacggugaugacagaugggccgucuaacggacaggcguccuacaagaucuuuaaaauggaaaagggcaaaguggucaagagcguugagcugaaugcccccaacuaucacuacgaagaguguucuugcuauccugacgcuggcgagaucauuugugugugccgggauaauuggcaugggagcaaccgccccuggguguccuucaaucagaaccuugaauaccaaaucggauauauuugcucuggcgucuuuggggacaauccuagacccaacgauggaaaaggcagcugugggccgguguccccuaauggagccuacggcguuaagggcuucagcuuuaaguacgggaacggaguguggaucggccggaccaaaucuacacacucccgcagcggguucgagaugauuugggaccccaauggauggaccggcaccgauucugaauuuuccaugaagcaggacaucgucgcuaucacagacuggagcggguauuccggcucuuucgugcagcauccugagcugacgggacucgauugcauuagacccuguuucuggguugaacugauccggggccgccccaaagagagcaccauuuggacauccgggucuagcaucuccuuuugcggagugaacagcgacaccgucucuugguccuggccugauggcgccgagcuuccguucacaauugacaaguga

SEQ ID NO: 213138 - RNA, 1350 nt, Artificial Sequence
  derived and/or modified CDS sequence (opt5) from neuraminidase__InfluenzaA__AEO89205
augaaccccacccagaagaucauuacaaucggcagcauuugcauggugaucgggauugucucccugaugcuccaaaucggaaauaugaucucuauuuggguuagccacuccauccagacgggcaaccagcaucaggccgagccuauuagaaaugcuucuuuccugaccgaaaacgccguggcgagcgugacacuugcuggaaauuccucucuguguccgguccgggggugggccgugcacagcaaagacaacuccauccgcauuggcagcaagggggauguuuuugugaucagagagcccuucauuucuugcucccaucucgaaugucggaccuuuuuccugacacaaggagcccuucugaaugacaaacacagcaacggcaccgucaaggaucgcucuccucauagaacacucauguccugccccgugggcgaggcuccuagccccuacaauucucgguuugaauccguugccuggagcgcuuccgccugucacgacgggaucucuuggcugaccaucggaauuagcggcccugauaacggggcgguggccguccugaaauauaauggaaucauuacggacaccaucaaguccuggcgcaacaauauucucagaacacaggagagcgagugcgcuugugugaacggcucuugcuucaccgugaugacagaugggccguccaauggacaggccagcuacaagaucuuuaaaauggaaaagggcaaagucguuaagucuguggagcugaacgcucccaacuaucacuacgaagaguguagcugcuauccugacgccggcgagaucaccugugugugccgggauaauuggcauggguccaaccgccccugggucucuuucaaucagaaccuugaauaccaaauuggauauaucugcagcggcguguuuggggacaauccuagacccaacgauggaacgggcuccugugggccgguuagcccuaauggagcguacggcauuaaaggcuucucuuuuaaguacgggaacggaguguggaucggccggacaaaguccaccaauagccgcucuggguucgagaugauuugggaccccaacggaugggccgaaacagauuccaauuuuagcgucaaacaggacaucguggcuaucaccgacugguccggcuauucugggagcuucguucagcacccugagcugaccggccucgauugcauuagacccuguuucuggguggaacugauccggggacgccccaaggagggcacaauuuggacguccgggucuagcaucuccuuuugcggagucaacagcgacaccgugucuugguccuggccugauggcgccgagcuuccguucacaauugacaaauga

SEQ ID NO: 213139 - RNA, 1350 nt, Artificial Sequence
  derived and/or modified CDS sequence (opt5) from neuraminidase__InfluenzaA__AEO89215
augaaccccaaucagaagaucauuaccaucggcagcauuugcauggccaucgggauugugucccugaugcuccaaaucggaaacaugaucucuauuugggucagccacuccauccagacaggcaaucagcaucaggcugagccuauuagaaacgccucuuuccugacggaaaaugcgguugcuagcgugacccuugccgggaacuccucucuguguccggugcggggaugggccguccacagcaaagacaauuccauccgcauuggcagcaagggggauguguuuguuaucagagagcccuucauuucuugcucccaucucgaaugucggacauuuuuccugacccaaggagcccuucugaacgacaaacacagcaauggcacagugaaggaucgcucuccucauagaacccucauguccugccccgucggcgaggcuccuagccccuacaacucucgguuugaauccguggcuuggagcgccuccgcgugucacgacgggaucucuuggcugacaaucggaauuagcggcccugauaauggggccguugcugugcugaaauauaacggaaucauuaccgacacgaucaaguccuggcgcaauaacauucucagaacccaggagagcgagugcgccugugucaauggcucuugcuucacagugaugaccgaugggccguccaacggacaggcuagcuacaagaucuuuaaaauggaaaagggcaaaguggucaagucuguugagcugaacgcccccaauuaucacuacgaagaguguagcugcuauccugacgcgggcgagaucacaugugugugccgggauaacuggcauggguccaaucgccccugggugucuuucaaccagaaucuugaauaccaaauuggauauaucugcagcggcgucuuuggggacaacccuagacccaaugauggaaccggcuccugugggccggugagcccuaacggagccuacggcauuaaaggcuucucuuuuaaguacgggaauggaguuuggaucggccggacgaaguccacaaacagccgcucuggguucgagaugauuugggaccccaauggaugggcugaaaccgauuccaacuuuagcgugaaacaggacaucgucgccaucacagacugguccggcuauucugggagcuucgugcagcacccugagcugaccggccucgauugcauuagacccuguuucuggguugaacugauccggggacgccccaaggagggcaccauuuggacauccgggucuagcaucuccuuuugcggagugaauagcgacacggucucuugguccuggccugauggcgcugagcuuccguucaccauugacaaauga

SEQ ID NO: 213140 - RNA, 1350 nt, Artificial Sequence
  derived and/or modified CDS sequence (opt5) from neuraminidase__InfluenzaA__AEO89226
augaaccccacccagaagaucauuacaaucggcagcauuugcauggccaucgggauugugucccugaugcuccaaaucggaaauaugaucucuauuugggucagccacuccauccagacgggcaaccagcaucaggcugagccuauuagaaaugccucuuuccugaccgaaaacgcgguugcuagcgugacacuugccggaaauuccucucuguguccggugcgggggugggccguccacagcaaagacaacuccauccgcauuggcagcaagggggauguguuuguuaucagagagcccuucauuucuugcucccaucucgaaugucggaccuuuuuccugacacaaggagcccuucugaaugacaaacacagcaacggcaccgugaaggaucgcucuccucauagaacacucauguccugccccgucggcgaggcuccuagccccuacaauucucgguuugaauccguggcuuggagcgccuccgcgugucacgacgggaucucuuggcugaccaucggaauuagcggcccugauaacggggccguugcugugcugaaauauaauggaaucauuacggacaccaucaaguccuggcgcaacaauauucucagaacacaggagagcgagugcgccugugucaacggcucuugcuucaccgugaugacagaugggccguccaauggacaggcuagcuacaagaucuuuaaaauggaaaagggcaaaguggucaagucuguugagcugaacgcccccaacuaucacuacgaagaguguagcugcuauccugacgcgggcgagaucaccugugugugccgggauaauuggcauggguccaaccgccccugggugucuuucaaucagaaccuugaauaccaaauuggauauaucugcagcggcgucuuuggggacaauccuagacccaacgauggaacgggcuccugugggccggugagcccuaauggagccuacggcauuaaaggcuucucuuuuaaguacgggaacggaguuuggaucggccggacaaaguccaccaauagccgcucuggguucgagaugauuugggaccccaacggaugggcugaaacagauuccaauuuuagcgugaaacaggacaucgucgccaucaccgacugguccggcuauucugggagcuucgugcagcacccugagcugaccggccucgauugcauuagacccuguuucuggguugaacugauccggggacgccccaaggagggcacaauuuggacguccgggucuagcaucuccuuuugcggagugaacagcgacaccgucucuugguccuggccugauggcgcugagcuuccguucacaauugacaaauga

SEQ ID NO: 213141 - RNA, 1350 nt, Artificial Sequence
  derived and/or modified CDS sequence (opt5) from neuraminidase__InfluenzaA__AEO89237
augaaccccaaucagaagaucauuaccaucggcagcauuugcauggugaucgggauugucucccugaugcuccaaaucggaaacaucauuucuauguggguuagccacuccauccagacaagaaaucagcaucaggccgagccuauucggaacacgaauuuccugaccgaaaacgcuguggccucugugacacuugcgggcaauagcucccuguguccgauccgcgggugggcuguccacucuaaagacaacagcauuagaaucggauccaagggcgauguguuuguuauucgggagcccuucaucagcugcucucaucucgaaugucgcaccuuuuuccugacacaaggggcccuucugaaugacaaacacuccaacggaaccgugaaggauagaagcccucaucggacacucaugucuugccccgucggcgaggccccuucccccuacaauagccgcuuugaaucuguggcuugguccgccagcgcuugucacgacggcaccuccuggcugacgaucgggauuucuggaccugauaacggcgccguugcggugcugaaauauaaugggaucauuaccgacacaaucaagagcuggagaaacaauauucuccggacccaggaguccgagugcgccugugucaacggaagcugcuucacagugaugaccgauggcccgucuaacgggcaggcuuccuacaagaucuuuaaaauggaaaagggaaaaguggucaagagcguugagcugaaugcccccaacuaucacuacgaagaguguucuugcuauccugacgcuggcgagaucauuugugugugccgcgauaauuggcauggcagcaacagacccuggguguccuucaaucagaaccuugaauaccaaaucggguauauuugcucuggagucuuuggcgacaauccucggcccaacgaugggacgggaagcuguggcccgguguccccuaauggggccuacggaaucaaaggcuucagcuuuaaguacggcaacgggguuuggauuggacgcacaaagucuaccaauuccagaagcggcuucgagaugaucugggaccccaacggguggacaggaaccgauucugacuuuuccgugaaacaggacaucgucgcgauuaccgauuggagcggcuauuccgggucuuucgugcagcacccugaacugacaggccucgacugcauccggcccuguuucuggguugagcugauucgcggaagacccaaggaaagcacgaucuggaccuccggcucuagcauuuccuuuugcggggugaauagcgauacagucucuugguccuggccugacggagccgagcuuccguucaccaucgauaaauga

SEQ ID NO: 213142 - RNA, 1350 nt, Artificial Sequence
  derived and/or modified CDS sequence (opt5) from neuraminidase__InfluenzaA__AEO89248
augaaccccaaucagaagaucauuaccaucggcagcauuugcauggugaucgggauugucucccugaugcuccaaaucggaaacaucauuucuaucuggguuagccacuccuuccagacaagagugcagcaucaggccgagccuauucggaauacgaacuuucugaccgaaaaugcuguggccucugucacacuugcgggcaacagcucccuguguccgauccgcgggugggcugugcacucuaaagacaauagcauuagaaucggauccaagggcgauguuuucgugauucgggagcccuuuaucagcugcucucaucucgaaugucgcaccuucuuucugacacaaggggcccuucugaacgacaaacacuccaauggaaccgucaaggauagaagcccucaucggacacucaugucuugccccgugggcgaggccccuucccccuacaacagccgcuucgaaucuguugcuugguccgccagcgcuugucacgacggcaccuccuggcugacgaucgggauuucuggaccugauaauggcgccguggcgguccugaaauauaacgggaucauuaccgacacaaucaagagcuggagaaauaacauucuccggacccaggaguccgagugcgccugugugaauggaagcugcuuuacagugaugaccgauggcccgucuaacgggcaggcuuccuacaagaucuucaaaaugaagaaaggaaaggucguuaaaagcguggaacugaacgcccccaauuaucacuacgaggaauguucuugcuauccugacgcuggcgagaucauuugugugugccgcgauaacuggcauggcagcaauagacccugggucuccuuuaaccagaaucuugaguaccaaaucggguauauuugcucuggaguguucggcgacaacccucggcccaaugaugggacgggaagcuguggcccgguuuccccuaacggggccuacggaaucaagggcuuuagcuucaaguacggcaaugggguguggauuggacgcacaaaaucuaccaacuccagaagcggcuuugaaaugaucugggaccccaauggguggacaggaaccgauucugacuucuccaugaagcaggacaucgucgcgauuaccgauuggagcggcuauuccgggucuuucgugcagcacccugagcugacaggccucgacugcauccggcccuguuuuuggguugaacugauucgcggaagacccaaagagagcacgaucuggaccuccggcucuagcauuuccuucugcggggugaacagcgauacagucucuugguccuggccugacggagccgaacuuccguuuaccaucgauaaguga

SEQ ID NO: 213143 - RNA, 1350 nt, Artificial Sequence
  derived and/or modified CDS sequence (opt5) from neuraminidase__InfluenzaA__AEO89270
augaaccccaaucagaagaucauuaccaucggcagcauuugcauggugacagggaucgucucccugaugcuccaaauuggaaacaucacgucuauguggguuagccacuccauccagaccagaaaucagcaucaggccgagccuauucggaacacaaauuuccugaccgaaaacgcuguggccucugugacacuugcgggcaauagcucccuguguccgauccgcgggugggcuguccacucuaaagacaacagcauuagaaucggauccaagggcgauguguuuguuauucgggagcccuucaucagcugcucucaucucgaaugucgcaccuuuuuccugacacaaggggcccuucugaaugacaaacacuccaacggaaccgugaaggauagaagcccucaucggacgcucaugucuugccccgucggcgaggccccuucccccuacaauagccgcuuugaaucuguggcuugguccgccagcgcuugucacgacggcaccuccuggcugacaauugggaucucuggaccugauaacggcgccguugcggugcugaaauauaaugggaucauuaccgacacaaucaagagcuggagaaacaauauucuccggacccaggaguccgagugcgccugugucaacggaagcugcuucacggugaugacagauggcccgucuaacgggcaggcuuccuacaagaucuuuaaaauggaaaagggaaaaguggucaagagcguugagcugaaugcccccaacuaucacuacgaagaguguucuugcuauccugacgcuggcgagauuaucugugugugccgcgauaauuggcauggcagcaacagacccuggguguccuucaaucagaaccuugaauaccaaaucggguauauuugcucuggagucuuuggcgacaauccucggcccaacgaugggaccggaagcuguggcccgguguccccuaauggggccuacggaaucaaaggcuucagcuuuaaguacggcaacgggguuuggauuggacgcacaaagucuaccaauuccagaagcggcuucgagaugaucugggaccccaacggguggaccggaacagauucugacuuuuccgugaaacaggacauugucgcgaucacggauuggagcggcuauuccgggucuuucgugcagcacccugaacugaccggccucgacugcauccggcccuguuucuggguugagcugauucgcggaagacccaaggaaagcacaaucuggaccuccggcucuagcauuuccuuuugcggggugaauagcgauacagucggauggucuuggccugacggcgccgagcuuccguucaccaucgauaaauga

SEQ ID NO: 213144 - RNA, 1350 nt, Artificial Sequence
  derived and/or modified CDS sequence (opt5) from neuraminidase__InfluenzaA__AEO89281
augaaccccaaucagaagaucauuaccaucggcagcauuugcaugguggucgggaucguuucccugaugcuccaaauuggaaacaucgugucuaucugggugagccacuccauucagacaggccaucagcagcaagccgagccuaucaaaaauacgaacuuccugaccaagaaugcugucgccucugugacacuugcggggaacagcucccuguguccgauuagaggaugggcuguucacucuaaagacaauagcauccggauuggcuccaagggggauguguuugucauccgcgaacccuucauuagcugcucucaucucgaguguagaaccuuuuuccugacacagggagcccuucugaacgacaaacacuccaauggcaccgugaaggaucggagcccucaucgcacacucaugucuugccccguuggcgaagccccuucccccuacaacagcagauuugagucuguggcuugguccgccagcgcuugucacgacgggaccuccuggcugacgaucggaaucucuggcccugauaauggggccgucgcggugcugaaguauaacggaauuaucaccgacacaauuaaaagcuggcggaauaacacccuccgcacacaggaauccgagugcgccugugugaauggcagcugcuucaccgucaugacggaugggccgucuaacggacaggcuuccuacaagaucuuuaaaauggagaagggcaaaguugucaagagcgccgaacugaacgcucccaauuaucacuacgaggaauguucuugcuauccugacgccggcgagauuaucugugugugcagagauaacuggcaugggagcaaucggcccuggguguccuucaaccaaaaucuugaguaccagaucggauauauuugcucuggcguguuuggggacaacccucgccccaaugauggaacaggcagcugugggccgguuuccccuaacggagcguacggcaucaagggcuucagcuuuaaauacgggaauggaguguggauuggcagaaccaagucuacaaacucccggagcggguucgaaaugaucugggaccccaauggauggaccggcaccgauucuaacuuuuccaugaaacaggacauugucgccaucacagaguggagcggguauuccggcucuuucgugcagcacccugaacugacgggacucgacugcauccgccccuguuucuggguugagcugauuagaggccggcccaaggaaagcaccaucuggacauccgggucuagcauuuccuuuugcggagugaauagcgauaccgucucuugguccuggccugacggcgcugagcuuccguucacaaucgauaaauga

SEQ ID NO: 213145 - RNA, 1350 nt, Artificial Sequence
  derived and/or modified CDS sequence (opt5) from neuraminidase__InfluenzaA__AEO89291
augaaccccaaucagaagaucauuaccaucggcagcauuugcaugguggucgggaucguuucccugaugcuccaaauuggaaacaucgugucuaucugggugagccacuccauucagacaggccaucagcagcaagccgagccuaucaaaaauacgaacuuccugaccgaaaaugcugucgccucugugacacuugcggggaacagcucccuguguccgauuagaggaugggcuguucacucuaaggacaauagcauccggauuggcuccaaaggggauguguuugucauccgcgagcccuucauuagcugcucucaucucgaauguagaaccuuuuuccugacacagggagcccuucugaacgacaagcacuccaauggcaccgugaaagaucggagcccucaucgcacacucaugucuugccccguuggcgaggccccuucccccuacaacagcagauuugaaucuguggcuugguccgccagcgcuugucacgacgggaccuccuggcugacgaucggaaucucuggcccugauaauggggccgucgcggugcugaaguauaacggaauuaucaccgacacaauuaagagcuggcggaauaacauccuccgcacccaggaguccgagugcgccugugugaauggcagcugcuucacagucaugaccgaugggccgucuaacggacaggcuuccuacaaaauuuuuaagauggaaaaaggcaagguugugaaaagcgccgagcugaacgcucccaauuaucacuacgaagaguguucuugcuauccugacgccggcgagaucaucugugugugcagagauaacuggcaugggagcaaucggcccugggucuccuucaaccaaaaucuugaauaccagauuggauauaucugcucuggcguguuuggggacaacccucgccccaaugauggaacgggcagcugugggccgguuuccccuaacggagcguacggcauuaagggcuucagcuuuaaguacgggaauggaguguggaucggcagaacaaaaucuaccaacucccggagcggguucgagaugauuugggaccccaauggauggacaggcaccgauucuaacuuuuccaugaagcaggacaucgucgccaucaccgaauggagcggguauuccggcucuuucgugcagcacccugagcugacaggacucgacugcauucgccccuguuucuggguugaacugaucagaggccggcccaaagagagcacgauuuggaccuccgggucuagcaucuccuuuugcggagugaauagcgauacagucucuugguccuggccugacggcgcugagcuuccguucaccauugauaaguga

SEQ ID NO: 213146 - RNA, 1350 nt, Artificial Sequence
  derived and/or modified CDS sequence (opt5) from neuraminidase__InfluenzaA__AEO89302
augaaccccaaucagaagaucauuaccaucggcagcauuugcauggugaucgggauugucucccugaugcuccaaaucggaaacaucauuucuaucuggguuagccacuccauucagacaggcaaucagcaucaggacgagccuaucagaaacgccaauuuccugacggaaaacgcuguggccucugugacccuugcggggaauagcucccuguguccgguccggggaugggcugugcacucuaaagauaacagcauucgcaucggcuccaagggggacguuuuugugauuagagagcccuucaucagcugcucucaucucgaaugucggacauuuuuccugacccaaggagcccuucugaaugauaaacacuccaacggcacagucaaggaccgcagcccucauagaacccucaugucuugccccgugggcgaggccccuucccccuacaauagccgguuugaaucuguugcuugguccgccagcgcuugucacgaugggacauccuggcugaccaucggaauuucuggcccugacaacggggccguggcgguccugaaauauaauggaaucauuacggauaccaucaagagcuggcgcaacaauauucucagaacacaggaguccgagugcgccugugugaacggcagcugcuucaccgugaugacagacgggccgucuaacggacaggcuuccuacaagaucuuuaaaauggaaaagggcaaagucguucggagcguggagcugaaugcccccaacuaucacuacgaagaguguucuugcuauccugaugcuggcgagaucaccugugugugccgcgacaauuggcaugggagcaacagacccugggucuccuucaaucagaaccuugaauaccaaauuggauauaucugcucuggcguguuuggggauaauccucggcccaacgacggaacgggcagcugugauccgguuuccccuaauggggccuacggaauuaagggcuucagcuuuaaauacggcaacgggguguggaucggacgcacaaagucuaccaauuccagaagcggcuucgagaugauuugggaccccaacggguggacagaaaccgacucugauuuuuccgucaagcaggacaucguggcgaucaccgauuggagcggauauuccggcucuuucguucagcacccugagcugacagggcucgacugcauucggcccuguuucuggguggaacugauccgcggcagacccaaagagagcacgauuuggaccuccggaucuagcaucuccuuuugcggcgucagcucugauacaguguccuggagcuggccugacggggccgagcuuccguucaccauugauaaguga

SEQ ID NO: 213147 - RNA, 1410 nt, Artificial Sequence; identical to SEQ ID NO: 208129
  derived and/or modified CDS sequence (opt5) from neuraminidase__InfluenzaA__AEO99218

SEQ ID NO: 213148 - RNA, 1410 nt, Artificial Sequence
  derived and/or modified CDS sequence (opt5) from neuraminidase__InfluenzaA__AEQ49739
augaaccccaaucagaagaucauuaccaucggcagcgugugcaugacaauugggauggccaaccugauccuccaaauuggaaauaucaucuccauuuggaucucucacagcauucagcugggcaaccagucccagaucgagacguguaaucaaucugucauuaccuacgaaaacaauacauggguuaaccagaccuaugugaauaucagcaacacaaauuucgcugccgggcaguccguggucucugugaaacuugcgggaaacagcucccugugcccuguuagcggcugggcuauuuacucuaaggacaauuccaucagaaucgggagcaaaggagauguguuugucauucgggagccguucaucucuuguagcccccucgaaugccgcaccuuuuuccugacacagggcgcccuucugaacgacaagcauuccaauggcaccauuaaagauagaucuccuuaucggacgcucauguccugucccaucggggaggugccuagccccuacaacucccgcuuugaaucuguugccuggagcgcuuccgccugccacgacggaauuaacuggcugaccaucggcaucagcgggccugauaauggagcuguggccguccugaaguauaacggcauuaucacagacaccauuaagucuuggagaaauaacauccuccggacacaagaguccgagugugcgugcgugaaugggagcuguuucaccauuaugacggauggaccgucugacggccaggccagcuacaaaaucuuucgcaucgaaaagggcaaaauugugaaguccgucgagaugaacgcucccaauuaucauuacgaagagugcucuuguuacccugauagcuccgagguuacaugcgugugcagagacaacuggcacgggagcaaucggcccugggugucuuucaaccagaaucuggaauaucagaucggauacauuuguuccggcaucuuuggggauaacccucgccccaaugacaaaaccggaagcugcggcccggucucuuccaacggggccaauggagugaagggcuucagcuuuaaguauggcaacgggguuuggauuggaagaacaaaauccaucucuagccggaagggcuucgagaugauuugggauccuaacggguggaccggaaccgacaauaacuuuuccaucaaacaagacaucgugggcauuaaugaauggucuggguacagcggcuccuucguccagcaucccgagcuuacaggaauggauuguauccgcccuugcuucuggguggaacugauuagaggccggcccaaggagaacacgaucuggaccagcgggucuuccauuagcuuuuguggaguuaauucugacacagugggcugguccuggcccgauggggcugagcucccuuucaccaucgacaaauga

SEQ ID NO: 213149 - RNA, 1410 nt, Artificial Sequence; identical to SEQ ID NO: 212329
  derived and/or modified CDS sequence (opt5) from neuraminidase__InfluenzaA__AEQ49740

SEQ ID NO: 213150 - RNA, 1410 nt, Artificial Sequence
  derived and/or modified CDS sequence (opt5) from neuraminidase__InfluenzaA__AEQ49741
augaaccccaaucagaagaucauuaccaucggcagcgugugcaugacaauugggauggccaaccugauccuccaaauuggaaauaucaucuccauuuggaucucucacagcauucagcugggcaaccagucccagaucgagacguguaaucaaucugucauuaccuacgaaaacaauacauggguuaaccagaccuaugugaauaucagcaacacaaauuucgcugccgggcaguccguggucucugugaaacuugcgggaaacagcucccugugcccuguuagcggcugggcuauuuacucuaaggacaauuccaucagaaucgggagcaaaggagauguguuugucauucgggagccguucaucucuuguagcccccucgaaugccgcaccuuuuuccugacacagggcgcccuucugaacgacaagcauuccaauggcaccauuaaagauagaucuccuuaucggacgcucauguccugucccaucggggaggugccuagccccuacaacucccgcuuugaaucuguugccuggagcgcuuccgccugccacgacggaauuaacuggcugaccaucggcaucagcgggccugauaauggagcuguggccguccugaaguauaacggcauuaucacagacaccauuaagucuuggagaaauaacauccuccggacacaagaguccgagugugcgugcgugaaugggagcuguuucaccauuaugacggauggaccgucugacggccaggccagcuacaaaaucuuucgcaucgaaaagggcaaaauugugaaguccgucgagaugaacgcucccaauuaucauuacgaagagugcucuuguuacccugauagcuccgagaucacaugcguuugcagagacaacuggcacgggagcaaucggcccugggugucuuucaaccagaaucuggaauaucagauuggauacaucuguuccggcauuuuuggggauaacccucgccccaaugacaaaaccggaagcugcggcccggugucuuccaacggggccaauggagucaagggcuucagcuuuaaguauggcaacgggguguggaucggaagaacaaaauccauuucuagccggaagggcuucgagaugaucugggauccuaacggguggaccggaaccgacaauaacuuuuccaucaaacaagacauuguuggcaucaaugaauggucuggguacagcggcuccuucgugcagcaucccgagcuuacaggaauggauuguauucgcccuugcuucugggucgaacugaucagaggccggcccaaggagaacacgauuuggaccagcgggucuuccaucagcuuuuguggaguuaauucugacacagugggcugguccuggcccgauggggcugagcucccuuucaccaucgacaaauga

SEQ ID NO: 213151 - RNA, 1410 nt, Artificial Sequence
  derived and/or modified CDS sequence (opt5) from neuraminidase__InfluenzaA__AEQ49742
augaaccccaaucagaagaucauuaccaucggcagcgugugcaugacaauugggauggccaaccugauccuccaaauuggaaauaucaucuccauuuggaucucucacagcauucagcugggcaaccagucccagaucgagacguguaaucaaucugucauuaccuacgaaaacaauacauggguuaaccagaccuaugugaauaucagcaacacaaauuucgcugccgggcaguccguggucucugugaaacuugcgggaaacagcucccugugcccuguuagcggcugggcuauucauucuaaggacaauuccaucagaaucgggagcaaaggagauguguuugucauucgggagccguucaucucuuguagcccccucgaaugccgcaccuuuuuccugacacagggcgcccuucugaacgacaagcacuccaauggcaccauuaaagauagaucuccuuaccggacgcucauguccugucccaucggggaggugccuagccccuauaacucccgcuuugaaucuguugccuggagcgcuuccgccugccaugacggaauuaacuggcugaccaucggcaucagcgggccugauaauggagcuguggccguccugaaguacaacggcauuaucacagacaccauuaagucuuggagaaauaacauccuccggacacaagaguccgagugugcgugcgugaaugggagcuguuucaccauuaugacggauggaccgucugacggccaggccagcuauaaaaucuuucgcaucgaaaagggcaaaauugugaaguccgucgagaugaacgcucccaauuaccacuaugaagagugcucuuguuacccugauagcuccgagaucacaugcguuugcagagacaacuggcaugggagcaaucggcccugggugucuuucaaccagaaucuggaauaccagauuggauauaucuguuccggcauuuuuggggauaacccucgccccaaugacaaaaccggaagcugcggcccggugucuuccaacggggccaauggagucaagggcuucagcuuuaaguacggcaacgggguguggaucggaagaacaaaauccauuucuagccggaagggcuucgagaugaucugggauccuaacggguggaccggaaccgacaauaacuuuuccaucaaacaagacauuguuggcaucaaugaauggucuggguauagcggcuccuucgugcagcaccccgagcuuacaggaauggauuguauucgcccuugcuucugggucgaacugaucagaggccggcccaaggagaacacgauuuggaccagcgggucuuccaucagcuuuuguggaguuaauucugacacagugggcugguccuggcccgauggggcugagcucccuuucaccaucgacaaauga

SEQ ID NO: 213152 - RNA, 1410 nt, Artificial Sequence
  derived and/or modified CDS sequence (opt5) from neuraminidase__InfluenzaA__AEQ49743
augaaccccaaucagaagaucauuaccaucggcagcgugugcaugacaauugggauggccaaccugauccuccaaauuggaaauaucaucuccauuuggaucucucacagcauucagcugggcaaccagucccagaucgagacguguaaucaaucugucauuaccuacgaaaacaauacauggguuaaccagaccuaugugaauaucagcaacacaaauuucgcugccgggcaguccguggucucugugaaacuugcgggaaacagcucccugugcccuguuagcggcugggcuauuuacucuaaggacaauuccaucagaaucgggagcaaaggagauguguuugucauucgggagccguucaucucuuguagcccccucgaaugccgcaccuuuuuccugacacagggcgcccuucugaacgacaagcauuccaauggcaccauuaaagauagaucuccuuaucggacgcucauguccugucccaucggggaggugccuagccccuacaacucccgcuuugaaucuguugccuggagcgcuuccgccugccacgacggaauuaacuggcugaccaucggcaucagcgggccugauaauggagcuguggccguccugaaguauaacggcauuaucacagacaccauuaagucuuggagaaauaacauccuccggacacaagaguccgagugugcgugcgugaaugggagcuguuucaccauuaugacggauggaccgucugacggccaggccagcuacaaaaucuuucgcaucgaaaagggcaaaauugugaaguccgucgagaugaacgcucccaauuaucauuacgaagagugcucuuguuacccugauagcuccgagaucacaugcguuugcagagacaacuggcacgggagcaaucggcccugggugucuuucaaccagaaucuggaauaucagauuggauacaucuguuccggcauuuuuggggauaacccucgccccaaugacaaaaccggaagcugcggcccggugucuuccaacggggccaauggagucaagggcuucagcuuuaaguauggcaacgggguguggaucggaagaacaaaauccauuucuagccggaagggcuucgagaugaucugggauccuaacggguggaccggaaccgacaauaacuuuuccaucaaacaagacauuguuggcacaaaugaauggucuggguacagcggcuccuucgugcagcaucccgagcuuacgggacuggauuguauccgcccuugcuucugggucgaacucauuagaggccggcccaaggagaacaccaucuggacaagcgggucuuccauuagcuuuuguggaguuaauucugacaccgugggcugguccuggcccgauggggcugagcugccuuucacaaucgacaacuga

SEQ ID NO: 213153 - RNA, 1410 nt, Artificial Sequence
  derived and/or modified CDS sequence (opt5) from neuraminidase__InfluenzaA__AEQ49744
augaaccccaaucagaagaucauuaccaucggcagcgugugcaugacaauugggauggccaaccugauccuccaaauuggaaauaucaucuccauuuggaucucucacagcauucagcugggcaaccagucccagaucgagacguguaaucaaucugucauuaccuacgaaaacaauacauggguuaaccagaccuaugugaauaucagcaacacaaauuucgcugccgggcaguccguggucucugugaaacuugcgggaaacagcucccugugcccuguuagcggcugggcuauuuacucuaaggacaauuccaucagaaucgggagcaaaggagauguguuugucauucgggagccguucaucucuuguagcccccucgaaugccgcaccuuuuuccugacacagggcgcccuugugaacgacaagcauuccaauggcaccauuaaagauagaucuccuuaucggacgcugauguccugucccaucggggagguuccuagccccuacaacucccgcuuugaaucuguggccuggagcgcuuccgccugccacgacggaauuaacuggcucaccaucggcaucagcgggccugauaauggagcugucgccgugcugaaguauaacggcauuaucacagacaccauuaagucuuggagaaauaacaucuuccggacacaagaguccgagugugcgugcgugaaugggagcuguuuuaccauuaugacggauggaccgucugacggccaggccagcuacaaaaucuuccgcaucgaaaagggcaaaauugucaaguccguugagaugaacgcucccaauuaucauuacgaagagugcucuuguuacccugauagcuccgagaucacaugcgugugcagagacaacuggcacgggagcaaucggcccugggugucuuuuaaccaggaucuggaauaucagauuggauacaucuguuccggcauuuucggggacaauccucgccccaacgauaaaaccggaagcugcggcccggucucuuccaauggggccaacggagugaagggcuuuagcuucaaguauggcaaugggguuuggaucggaagaacaaaauccauuucuagccggaagggcuuugagaugaucugggacccuaacggguggaccggaaccgacaacaauuucuccaucaaacaaaacauugugggcaucaaugaauggucuggguacagcggcuccuucguccagcaucccgagcucacaggacuggauuguauucgcccuugcuuuuggguggaacuuaucagaggccggcccaaggagaacacgauuuggaccagcgggucuuccaucagcuucuguggaguuaauucugacacagugggcugguccuggcccgauggggcugagcugccuuuuaccaucgacaaauga

SEQ ID NO: 213154 - RNA, 1410 nt, Artificial Sequence; identical to SEQ ID NO: 213150
  derived and/or modified CDS sequence (opt5) from neuraminidase__InfluenzaA__AEQ49745

SEQ ID NO: 213155 - RNA, 1410 nt, Artificial Sequence; identical to SEQ ID NO: 213150
  derived and/or modified CDS sequence (opt5) from neuraminidase__InfluenzaA__AEQ49746

SEQ ID NO: 213156 - RNA, 1410 nt, Artificial Sequence; identical to SEQ ID NO: 213150
  derived and/or modified CDS sequence (opt5) from neuraminidase__InfluenzaA__AEQ49747

SEQ ID NO: 213157 - RNA, 1410 nt, Artificial Sequence; identical to SEQ ID NO: 212329
  derived and/or modified CDS sequence (opt5) from neuraminidase__InfluenzaA__AEQ49748

SEQ ID NO: 213158 - RNA, 1410 nt, Artificial Sequence; identical to SEQ ID NO: 213150
  derived and/or modified CDS sequence (opt5) from neuraminidase__InfluenzaA__AEQ49749

SEQ ID NO: 213159 - RNA, 1410 nt, Artificial Sequence
  derived and/or modified CDS sequence (opt5) from neuraminidase__InfluenzaA__AEQ49750
augaaccccaaucagaagaucauuaccaucggcagcgugugcaugacaauugggauggccaaccugauccuccaaauuggaaauaucaucuccauuuggaucucucacagcauucagcugggcaaccagucccagaucgagacguguaaucaaucugucauuaccuacgaaaacaauacauggguuaaccagaccuaugugaauaucagcaacacaaauuucgcugccgggcaguccguggucucugugaaacuugcgggaaacagcucccugugcccuguuagcggcugggcuauuuacucuaaggacaauuccaucagaaucgggagcaaaggagauguguuugucauucgggagccguucaucucuuguagcccccucgaaugccgcaccuuuuuccugacacagggcgcccuucugaacgacaaucauuccaacggcaccauuaaggauagaucuccuuaucggacgcucauguccugucccaucggggaggugccuagccccuacaacucccgcuuugaaucuguugccuggagcgcuuccgccugccacgacggaauuaauuggcugaccaucggcaucagcgggccugauaacggagcuguggccguccugaaauauaauggcauuaucacagacaccauuaagucuuggagaaacaauauccuccggacacaagaguccgagugugcgugcgugaacgggagcuguuucaccauuaugacggauggaccgucugacggccaggccagcuacaagaucuuucgcaucgaaaaaggcaagauugugaaauccgucgagaugaaugcucccaacuaucauuacgaagagugcucuuguuacccugauagcuccgagaucacaugcguuugcagagacaauuggcacgggagcaaccggcccugggugucuuucaaucagaaccuggaauaucagauuggauacaucuguuccggcauuuuuggggauaauccucgccccaacgacaagaccggaagcugcggcccggugucuuccaauggggccaacggagucaaaggcuucagcuuuaaguauggcaacgggguguggaucggaagaacaaagaauauuuccucucggaaaggcuucgagaugaucugggauccuaacggguggaccggaaccgacaauaacuuuagcaucaagcaagacauuguuggcaucaaugaaugguccggguacucuggcagcuucgugcagcaucccgagcuuacaggacuggauuguauucgcccuugcuucugggucgaacucaucagaggccggcccaaagagaacacgauuuggaccuccgggagcucuaucuccuuuuguggagugaauagcgacacaguuggcuggucuuggcccgauggggcugagcugccuuucaccaucgacaaguga

SEQ ID NO: 213160 - RNA, 1410 nt, Artificial Sequence
  derived and/or modified CDS sequence (opt5) from neuraminidase__InfluenzaA__AEQ49751
augaaccccaaucagaagaucauuaccaucggcagcgugugcaugacaauugggauggccaaccugauccuccaaauuggaaauaucaucuccauuuggaucucucacagcuuccagcugggcaaccagucccagauugagacguguaaucaaucugucaucaccuacgaaaacaauacauggguuaaccagaccuaugugaauauuagcaacacaaauuuugcugccgggcaguccguggucucugugaaacuugcgggaaacagcucccugugcccuguuagcggcugggcuaucuacucuaaggacaauuccauuagaaucgggagcaaaggagauguguucgucauccgggagccguuuauuucuuguagcccccucgaaugccgcaccuucuuucugacacagggcgcccuucugaacgacaaucauuccaacggcaccaucaaggauagaucuccuuaucggacgcucauguccugucccauuggggaggugccuagccccuacaacucccgcuucgaaucuguugccuggagcgcuuccgccugccacgacggaaucaauuggcugaccauuggcaucagcgggccugauaacggagcuguggccguccugaaauauaauggcaucauuacagacaccaucaagucuuggagaaacaauauucuccggacacaagaguccgagugugcgugcgugaacgggagcuguuuuaccaucaugacggauggaccgucugacggccaggccagcuacaagauuuuccgcaucgaaaaaggcaagaucgugaaauccgucgagaugaaugcucccaacuaucauuacgaagagugcucuuguuacccugauagcuccgagauuacaugcguuugcagagacaauuggcacgggagcaaccggcccugggugucuuuuaaucagaaccuggaauaucagaucggauacauuuguuccggcaucuucggggauaauccucgccccaacgacaagaccggaagcugcggcccggugucuuccaauggggccaacggagucaaaggcuuuagcuucaaguauggcaacgggguguggauuggaagaacaaaguccaucucuagccggaaaggcuuugagaugauuugggauccuaauggguggaccggaaccgacaacaauuucuccaucaagcaagacaucguuggcauuaacgaauggucuggguacagcggcuccuucgugcagcaucccgagcuuacaggaauggauuguauccgcccuugcuuuugggucgaacugauuagaggccggcccaaagagaauacgaucuggaccagcgggucuuccauuagcuucuguggagugaacucugacacaguuggcugguccuggcccgauggggcugagcucccuuuuaccaucgacaaguga

SEQ ID NO: 213161 - RNA, 1410 nt, Artificial Sequence
  derived and/or modified CDS sequence (opt5) from neuraminidase__InfluenzaA__AEQ49752
augaaccccaaucagaagaucauuaccaucggcagcgugugcaugacaauugggauggccaaccugauccuccaaauuggaaauaucaucuccauuuggaucucucacagcauucagcugggcaaccagucccagaucgggacguguaaucaaucugucauuaccuacgagaacaauacauggguuaaccagaccuaugugaauaucagcaacacaaauuucgcugccggacaguccguggucucugugaaacuugcgggcaacagcucccugugcccuguuagcgggugggcuauuuacucuaaggacaauuccaucagaaucggaagcaaaggcgauguguuugucauucgggaaccguucaucucuuguagcccccucgagugccgcaccuuuuuccugacacagggcgcccuucugaacgacaagcauuccaaugggaccauuaaagauagaucuccuuaucggacgcucauguccugucccaucggagaagugccuagccccuacaacucccgcuuugagucuguugccuggagcgcuuccgccugccacgacggcauuaacuggcugaccaucgggaucagcggaccugauaauggcgcuguggccguccugaaguauaacgggauuaucacagacaccauuaagucuuggagaaauaacauccuccggacacaagaauccgagugugcgugcgugaauggaagcuguuucaccauuaugacggauggcccgucugacggccaggccagcuacaaaaucuuucgcaucgagaaggggaaaauugugaaguccgucgaaaugaacgcucccaauuauuacuacgaggaaugcucuuguuauccugauagcuccgagaucacaugcguuugcagagacaacuggcauggaagcaaucggcccugggugucuuucaaccagaaucuggaguaccagauuggcuauaucuguuccgggauuuuuggagauaacccucgccccaaugacaaaaccggcagcugcgggccggugucuuccaacggagccaauggcgucaagggcuucagcuuuaaguacgggaacggaguguggaucggcagaacaaaauccauuucuagccggaagggguucgaaaugaucugggauccuaacggauggaccggcaccgacaauaacuuuuccaucaaacaagacauuguugggaucaaugaguggucuggcuauagcggauccuucgugcagcaccccgaacuuacaggcauggauuguauucgcccuugcuucugggucgagcugaucagagggcggcccaaggaaaacacgauuuggaccagcggaucuuccaucagcuuuuguggcguuaauucugacacaguggggugguccuggcccgauggagcugagcucccuuucaccaucgacaaauga

SEQ ID NO: 213162 - RNA, 1410 nt, Artificial Sequence
  derived and/or modified CDS sequence (opt5) from neuraminidase__InfluenzaA__AEQ49753
augaaccccaaucagaagaucauuaccaucggcagcgugugcaugacaauugggauggccaaccugauccuccaaauuggaaauaucaucuccauuuggaucucucacagcauucagcugggcaaccagucccagaucgagacguguaaucaaucugucauuaccuacgaaaacaauacauggguuaaccagaccuaugugaauaucagcaacacaaauuucgcugccgggcaguccguggucucugugaaacuugcgggaaacagcucccugugcccuguuagcggcugggcuauuuacucuaaggacaauuccaucagaaucgggagcaaaggagauguguuugucauucgggagccguucaucucuuguagcccccucgaaugccgcaccuuuuuccugacacagggcgcccuucugaacgacaagcauuccaauggcaccauuaaagauagaucuccuuaucggacgcucauguccugucccaucggggaggugccuagccccuacaacucccgcuuugaaucuguugccuggagcgcuuccgccugccacgacggaauuaacuggcugaccaucggcaucagcgggccugauaauggagcuguggccguccugaaguauaacggcauuaucacagacaccauuaagucuuggagaaauaacauccuccggacacaagaguccgagugugcgugcgugaaugggagcuguuucaccauuaugacggauggaccgucugacggccaggccagcuacaaaaucuuucgcaucgaaaagggcaaaauugugaaguccgucgagaugaacgcucccaauuaucauuacgaagagugcucuuguuacccugauagcuccgagaucacaugcguuugcagagacaacuggcacgggagcaaucggcccugggugucuuucaaccagaaucuggaauaucagauuggauacaucuguuccggcauuuuuggggauaacccucgccccaaugacaaaaccggaagcugcggcccggugucuuccaacggggccaauggagucaagggcuucagcuuuaaguauggcaacgggguguggaucggaagaacaaaauccauuucuagccggaagggcuucgagaugaucugggauccuaacggguggaccggaaccgacaauaacuuuuccaucaaacaagacauuguuggcaucaaugaauggucuggguacagcggcuccuucgugcagcaucccgagcuuacaggaauggauuguauucgcccuugcuucugggucgaacugaucagaggccggcccaaggagaacacgauuuggaccagcgggucuuccaucagcuuuuguggaguuaauucugacacaguggauugguccuggcccgacggcgcugagcucccuuucaccaucgauaaauga

SEQ ID NO: 213163 - RNA, 1410 nt, Artificial Sequence
  derived and/or modified CDS sequence (opt5) from neuraminidase__InfluenzaA__AEQ49754
augaaccccaaucagaagaucauuaccaucggcagcgugugcaugacaauugggauggccaaccugauccuccaaauuggaaauaucaucuccauuuggaucucucacagcauucagcugggcaaccagucccagaucgagacguguaaucaaucugucauuaccuacgaaaacaauacauggguuaaccagaccuaugugaauaucagcaacacaaauuucgcugccgggcaguccguggucucugugaaacuugcgggaaacagcucccugugcccuguuagcggcugggcuauuuacucuaaggacaauuccaucagaaucgggagcaaaggagauguguuugucauucgggagccguucaucucuuguagcccccucgaaugccgcaccuuuuuccugacacagggcgcccuucugaacgacaagcauuccaauggcaccauuaaagauagaucuccuuaucggacgcucauguccugucccaucggggaggugccuagccccuacaacucccgcuuugaaucuguugccuggagcgcuuccgccugccacgacggaauuaacuggcugaccaucggcaucagcgggccugauaauggagcuguggccguccugaaguauaacggcauuaucacagacaccauuaagucuuggagaaauaacauccuccggacacaagaguccgagugugcgugcgugaaugggagcuguuucaccauuaugacggauggaccgucugacggccaggccagcuacaaaaucuuucgcaucgaaaagggcaaaauugugaaguccgucgagaugaacgcucccaauuaucauuacgaagagugcucuuguuacccugauagcuccgagaucacaugcguuugcagagacaacuggcacgggagcaaucggcccugggugucuuucaaccagaaucuggaauaucagauuggauacaucuguuccggcauuuuuggggauaacccucgccccaaugacaaaaccggaagcugcggcccggugucuuccaacggggccaauggagucaagggcuucagcuuuaaguauggcaacgggguguggaucggaagaacaaaauccauuucuagccggaagggcuucgagaugaucugggauccuaacggguggaccggaaccgacaauaacuuuuccaucaaacaagacauuguuggcaucaaugaauggucuggguacagcggcuccuucgugcagcaucccgagcuuacaggacuggauuguauucgcccuugcuucugggucgaacucaucagaggccggcccaaggagaacacgauuuggaccagcgggucuuccaucagcuuuuguggaguuaauucuaacacagugggcugguccuggcccgacggggcugagcugccuuucaccaucgauaaauga

SEQ ID NO: 213164 - RNA, 1410 nt, Artificial Sequence; identical to SEQ ID NO: 213150
  derived and/or modified CDS sequence (opt5) from neuraminidase__InfluenzaA__AEQ49755

SEQ ID NO: 213165 - RNA, 1410 nt, Artificial Sequence
  derived and/or modified CDS sequence (opt5) from neuraminidase__InfluenzaA__AEQ49756
augaaccccaaucagaagaucauuaccaucggcagcgugugcaugacaauugggauggccaaccugauccuccaaauuggaaauaucaucuccauuuggaucucucacagcauucagcugggcaaccagucccaggucgagacguguaaucaaucuguuaucaccuacgaaaacaauacaugggugaaccagaccuaugugaauauuagcaacacaaauuucgcugccgggcaguccgucgugucuguuaaacuugcgggaaacagcucccugugcccugugagcggcugggcuaucuacucuaaggacaauuccauuagaaucgggagcaaaggagaugucuuugugauccgggagccguucauuucuuguagcccccucgaaugccgcaccuuuuuccugacacagggcgcccuucugaacgacaagcauuccaauggcaccaucaaagauagaucuccuuaucggacgcucauguccugucccauuggggagguuccuagccccuacaacucccgcuuugaaucuguggccuggagcgcuuccgccugccacgacggaaucaacuggcugaccauuggcaucagcgggccugauaauggagcugucgccgugcugaaguauaacggcaucauuacagacaccaucaagucuuggagaaauaacauucuccggacacaagaguccgagugugcgugcgugaaugggagcuguuucaccaucaugacggauggaccgucugacggccaggccagcuacaaaauuuuucgcaucgaaaagggcaaaaucgucaaguccguugagaugaacgcucccaauuaucauuacgaagagugcucuuguuacccugauagcuccgagauuacaugcgugugcagagacaacuggcacgggagcaaucggcccugggugucuuucaaccagaaucuggaauaucagaucggauacauuuguuccggcaucuuuggggauaacccucgccccaaugacaaaaccggaagcugcggcccggucucuuccaacggggccaauggagugaagggcuucagcuuuaaguauggcaacgggguuuggauuggaagaacaaaauccaucucuagccggaagggcuucgagaugauuugggauccuaacggguggaccggaaccgacaauaacuuuuccaucaaacaagacaucgugggcauuaaugaauggucuggguacagcggcuccuucguccagcaucccgagcuuacaggacuggauuguauccgcccuugcuucuggguggaacucauuagaggccggcccaaggagaacacgaucuggaccagcgggucuuccauuagcuuuuguggaguuaauucugacacagugggcugguccuggcccgauggggcugagcugccuuucaccaucgacaaauga

SEQ ID NO: 213166 - RNA, 1410 nt, Artificial Sequence; identical to SEQ ID NO: 213150
  derived and/or modified CDS sequence (opt5) from neuraminidase__InfluenzaA__AEQ49757

SEQ ID NO: 213167 - RNA, 1410 nt, Artificial Sequence
  derived and/or modified CDS sequence (opt5) from neuraminidase__InfluenzaA__AEQ49758
augaaccccaaucagaagaucauuaccaucggcagcgugugcaugacaauugggauggccaaccugauccuccaaauuggaaauaucaucuccauuuggaucucucacagcauucagcugggcaaccauucccagaucgagacguguaaucagucugucauuaccuacgaaaacaauacauggguuaaccaaaccuaugugaauaucagcaacacaaauuucgcugccgggcaguccguggucucugugaaacuugcgggaaacagcucccugugcccuguuagcggcugggcuauuuacucuaaggacaauuccaucagaaucgggagcaaaggagauguguuugucauucgggagccguucaucucuuguagcccccucgaaugccgcaccuuuuuccugacacagggcgcccuucugaacgacaagcacuccaauggcaccauuaaagauagaucuccuuaucggacgcucauguccugucccaucggggaggugccuagccccuacaacucccgcuuugaaucuguugccuggagcgcuuccgccugccaugacggaauuaacuggcugaccaucggcaucagcgggccugauaauggagcuguggccguccugaaguauaacggcauuaucacagacaccauuaagucuuggagaaauaacauccuccggacacaggaguccgagugugcgugcgugaaugggagcuguuucaccauuaugacggauggaccgucugacggccaagccagcuacaaaaucuuucgcaucgaaaagggcaaaauugugaaguccgucgagaugaacgcucccaauuauuacuacgaagagugcucuuguuauccugauagcuccgagaucacaugcguuugcagagacaacuggcacgggagcaaucggcccugggugucuuucaaccagaaucuggaauaccagauuggauauaucuguuccggcauuuuuggggauaacccucgccccaaugacaaaaccggaagcugcggcccggugucuuccaacggggccaauggagucaagggcuucagcuuuaaguacggcaacgggguguggaucggaagaacaaaauccauuucuagccggaagggcuucgagaugaucugggauccuaacgggugggcuggaaccgacaauaacuuuuccaucaaacaggacauuguuggcaucaaugaauggucuggguauagcggcuccuucgugcaacaucccgagcuuaccggacuggauuguauucgcccuugcuucugggucgaacucaucagaggccggcccaaggagaacacaauuuggacgagcgggucuuccaucagcuuuuguggaguuaauucugacaccgugggcugguccuggcccgauggggccgagcugccuuucacaaucgacaaauga

SEQ ID NO: 213168 - RNA, 1410 nt, Artificial Sequence; identical to SEQ ID NO: 213150
  derived and/or modified CDS sequence (opt5) from neuraminidase__InfluenzaA__AEQ49759

SEQ ID NO: 213169 - RNA, 1410 nt, Artificial Sequence; identical to SEQ ID NO: 213150
  derived and/or modified CDS sequence (opt5) from neuraminidase__InfluenzaA__AEQ49760

SEQ ID NO: 213170 - RNA, 1410 nt, Artificial Sequence
  derived and/or modified CDS sequence (opt5) from neuraminidase__InfluenzaA__AEQ49761
augaaccccaaucagaagaucauuaccaucggcagcgugugcaugacaauugggauggccaaccugauccuccaaauuggaaauaucaucuccauuuggaucucucacagcauucagcugggcaaccagucccagaucgagacguguaaucaaucugucauuaccuacgaaaacaauacauggcuuaaccagaccuauguuaauaucagcaacacaaauuucgcugccgggcaguccguggugucugucaaacuggcgggaaacagcucccucugcccugugagcggcugggcuauuuacucuaaggacaauuccaucagaaucgggagcaaaggagauguuuuugugauucgggagccguucaucucuuguucccccagcgaaugccgcaccuuuuuccugacacagggcgcccuucugaacgacaagcauucuaauggcaccauuaaagauagauccccuuaucggacgcucaugagcugucccaucggggaggucccuucccccuacaacucucgcuuugaaagcguggccugguccgcuagcgccugccacgacggaauuaacuggcugaccaucggcaucucugggccugauaauggagcuguugccgugcugaaguauaacggcauuaucacagacaccauuaaguccuggagaaauaacauccuccggacacaagagagcgagugugcgugcgucaaugggucuuguuucaccauuaugacggauggaccgagcgacggccaggccuccuacaaaaucuuucgcaucgaaaagggcaaaauugugaagucuguggagaugaacgcucccaauuaucauuacgaagagugcagcuguuacccugauuccagcgagaucacaugcgucugcagagacaacuggcacgggucuaaucggcccuggguuuccuucaaccagaaucuggaauaucagauuggauacaucuguagcggcauuuuuggggauaacccucgccccaaugacaaaaccggaucuugcggcccgguguccagcaacggggccaauggagugaagggcuucuccuuuaaguauggcaacggggucuggaucggaagaacaaaaucuauuagcucccggaagggcuucgagaugaucugggauccuaacggguggaccggaaccgacaauaacuuuucuaucaaacaagacauugugggcaucaaugaauggagcggguacuccggcagcuucguucagcaucccgagcuuacaggacuggauuguauucgcccuugcuucuggguggaacucaucagaggccggucuaaggagaacacgauuuggaccuccgggagcucuaucuccuuuuguggagucaauagcgacacagugggcuggucuuggcccgauggggcugagcugcccuucaccaucgacaaauga

SEQ ID NO: 213171 - RNA, 1410 nt, Artificial Sequence
  derived and/or modified CDS sequence (opt5) from neuraminidase__InfluenzaA__AEQ49762
augaaccccaaucagaagaucauuaccaucggcagcgugugcaugacaauugggauggccaaccugauccuccaaauuggaaauaucaucuccauuuggaucucucacagcauucagcugggcaaccagucccagaucgagacguguaaucaaucugucauuaccuacgaaaacaauacauggaucaaccagaccuauguuaauauuagcaacacaaauuucgcugccgggcaguccguggugucugucaaacuugcgggaaacagcucccugugcccugugagcggcugggcuaucuacucuaaggacaauuccaucagaauugggagcaaaggagauguuuuugugauccgggagccguucauuucuuguagcccccucgaaugccgcaccuuuuuccugacacagggcgcccuucugaacgacaagcauuccaauggcaccaucaaagauagaucuccuuaucggacgcucauguccugucccauuggggaggucccuagccccuacaacucccgcuuugaaucuguggccuggagcgcuuccgccugccacgacggaaucaacuggcugaccaucggcauuagcgggccugauaauggagcuguugccgugcugaaguauaacggcaucauuacagacaccaucaagucuuggagaaauaacauucuccggacacaagaguccgagugugcgugcgucaaugggagcuguuucaucaucaugaccgauggaccgucugacggccaggccagcuacaaaauuuuucgcaucgaaaagggcaaaauugugaaguccguggagaugaacgcucccaauuaucauuacgaagagugcucuuguuacccugauagcuccgagaucacgugcgucugcagagacaacuggcacgggagcaaucggcccuggguuucuuucaaccagaaucuggaauaucagauuggauacaucuguuccggcauuuuuggggauaacccucgccccaaugacaaaacaggaagcugcggcccggugucuuccaacggggccaauggagugaagggcuucagcuuuaaguauggcaacggggucuggaucggaagaaccaaauccaucucuagccggaagggcuucgagaugauuugggauccuaacggguggacaggaaccgacaauaacuuuuccaucaaacaagacauugugggcaucaaugaauggucuggguacagcggcuccuucguucagcaucccgagcuuaccggacuggauuguauucgcccuugcuucuggguggaacucaucagaggccggcccaaggagaacacaaucuggacgagcgggucuuccauuagcuuuuguggagucaauucugacaccgugggcugguccuggcccgauggggcugagcugccuuucacaaucgacaaauga

SEQ ID NO: 213172 - RNA, 1410 nt, Artificial Sequence; identical to SEQ ID NO: 213150
  derived and/or modified CDS sequence (opt5) from neuraminidase__InfluenzaA__AEQ49763

SEQ ID NO: 213173 - RNA, 1410 nt, Artificial Sequence; identical to SEQ ID NO: 213150
  derived and/or modified CDS sequence (opt5) from neuraminidase__InfluenzaA__AEQ49764

SEQ ID NO: 213174 - RNA, 1410 nt, Artificial Sequence; identical to SEQ ID NO: 213150
  derived and/or modified CDS sequence (opt5) from neuraminidase__InfluenzaA__AEQ49765

SEQ ID NO: 213175 - RNA, 1410 nt, Artificial Sequence
  derived and/or modified CDS sequence (opt5) from neuraminidase__InfluenzaA__AEQ49766
augaaccccaaucagaagaucauuaccaucggcagcgugugcaugacaauugggauggccaaccugauccuccaaauuggaaauaucaucuccauuuggaucucucacagcauucagcugggcaaccagucccagaucgagacguguaaucaaucugucauuaccuacgaaaacaauacauggguuaaccagaccuaugugaauaucagcaacacaaauuucgcugccgggcaguccguggucucugugaaacuuaccggaaacagcucccugugcccuguuagcggcugggcgauuuacucuaaggacaauuccaucagaaucgggagcaaaggagauguguuugucauucgggagccguucaucucuuguagcccccucgaaugccgcacauuuuuccugacccagggcgcccuucugaacgacaagcauuccaauggcacgauuaaagauagaucuccuuaucggacccucauguccugucccaucggggaggugccuagccccuacaacucccgcuuugaaucuguugcuuggagcgccuccgcuugccacgacggaauuaacuggcugacaaucggcaucagcgggccugauaauggagccguggcuguccugaaguauaacggcauuaucaccgacacaauuaagucuuggagaaauaacauccuccggacccaagaguccgagugugccugcgugaaugggagcuguuucacgauuaugacagauggaccgucugacggccaggcgagcuacaaaaucuuucgcaucgaaaagggcaaaauugugaaguccgucgagaugaacgcccccaauuaucauuacgaagagugcucuuguuacccugauagcuccgagauuaccugcguuugcagagacaacuggcacgggagcaaucggcccugggugucuuucaaccagaaucuggaauaucagaucggauacaucuguuccggcauuuuuggggauaacccucgccccaaugacaaaacaggaagcugcggcccggugucuuccaacggggcuaauggagucaagggcuucagcuuuaaguauggcaacgggguguggaucggaagaaccaaauccauuucuagccggaagggcuucgagaugaucugggauccuaacggguggaccggaacagacaauaacuuuuccaucaaacaagacauuguuggcaucaaugaauggucuggguacagcggcuccuucgugcagcaucccgagcuuacgggacuggauuguauucgcccuugcuucugggucgaacucaucagaggccggcccaaggagaacaccauuuggacaagcgggucuuccaucagcuuuuguggaguuaauucugacaccgugggcugguccuggcccgauggggccgagcugccuuucacaaucgacaaauga

SEQ ID NO: 213176 - RNA, 1410 nt, Artificial Sequence
  derived and/or modified CDS sequence (opt5) from neuraminidase__InfluenzaA__AEQ49767
augaaccccaaucagaagaucauuaccaucggcagcgugugcaugacaauugggauggccaaccugauccuccaaauuggaaauaucaucuccauuuggaucucucacagcauucagcugggcaaccagucccagaucgagacguguaaucaaucugucauuaccuacgaaaacaauacauggguuaaccagaccuaugugaauaucagcaacacaaauuucgcugccgggcaguccguggucucugugaaacuugcgggaaacagcucccugugcccuguuagcggcugggcuauuuacucuaaggacaauuccaucagaaucgggagcaaaggagauguguuugucauucgggagccguucaucucuuguagcccccucgaaugccgcaccuuuuuccugacacagggcgcccuucugaacgacaagcauuccaauggcaccauuaaagauagaucuccuuaucggacgcucauguccugucccaucggggaggugccuagccccuacaacucccgcuuugaaucuguugccuggagcgcuuccgccugccacgacggaauuaacuggcugaccaucggcaucagcgggccugauaauggagcuguggccguccugaaguauaacggcauuaucacagacaccauuaagucuuggagaaauaacauccuccggacacaagaguccgagugugcgugcgugaaugggagcuguuucaccauuaugacggauggaccgucugacggccaggccagcuacaaaaucuuuaagaucgaaaaaggcaagauugugaaauccgucgagaugaacgcucccaauuaucauuacgaagagugcucuuguuacccugauagcuccgagaucacaugcguuugccgcgacaacuggcacgggagcaauagacccugggugucuuucaaccagaaucuggaauaucagauuggauacaucuguuccggcauuuuuggggauaacccucggcccaaugacaagaccggaagcugcggcccggugucuuccaacggggccaauggagucaagggcuucagcuauaaauacggcaacgggguguggaucggacgcacaaaguccauuucuagcagaaaaggcuuugagaugaucugggauccuaacggguggaccggaaccgacaauaacuucuccaucaagcaagacauuguuggcaucaaugaauggucuggguauagcggcuccuuugugcagcaucccgagcuuacaggaaugggcuguauucggccuugcuucugggucgaacugauccgcgggagacccaaagagaacacgauuuggaccagcggaucuuccaucagcuucuguggcguuaauucugauacaguggggugguccuggcccgacggagcugagcucccuuuuaccaucgauaaguga

SEQ ID NO: 213177 - RNA, 1410 nt, Artificial Sequence; identical to SEQ ID NO: 212329
  derived and/or modified CDS sequence (opt5) from neuraminidase__InfluenzaA__AEQ49768

SEQ ID NO: 213178 - RNA, 1410 nt, Artificial Sequence; identical to SEQ ID NO: 213150
  derived and/or modified CDS sequence (opt5) from neuraminidase__InfluenzaA__AEQ49769

SEQ ID NO: 213179 - RNA, 1410 nt, Artificial Sequence
  derived and/or modified CDS sequence (opt5) from neuraminidase__InfluenzaA__AEQ49770
augaaccccaaucagaagaucauuaccaucggcagcgugugcaugacaauugggauggccaaccugauccuccaaauuggaaauaucaucuccgucuggauuucucacagcauccagcugggcaaccagaaucagacggagaccuguaaccaauccguuauuacauacgaaaauaacaccugggugaaucagacauaugugaacaucucuaauaccaacuucgcugccgggcagagcgucguguccguuaaacuugcgggaaauucuagccugugcccuguguccggcugggcuauuuacagcaaggacaacucuaucagaauuggguccaaaggagaugucuuugugauccgggagccguucaucagcuguucuccccucgaaugccgcacauuuuuccugacccagggcgcccuucugaaugacaagcauuccaacggcacgauuaaagauagaagcccuuaucggacccucaugucuugucccaucggggagguuccuucccccuacaacagccgcuuugaauccguggccuggucugcuagcgccugccacgacggaauuaauuggcugacaaucggcauuuccgggccugauaacggagcugucgccgugcugaaguauaauggcaucaucaccgacacaauuaagagcuggagaaacaauauccuccggacccaagagucugagugugcgugcgugaacggguccuguuucacggucaugacagauggaccgagcgacggccaggccucuuacaaaauuuuucgcaucgaaaagggcaaaauuguuaagagcguggagaugaaugcucccaacuaucauuacgaagagugcuccuguuacccugauucuagcgagauuaccugcgugugcagagacaauuggcacggguccaaccggcccugggucagcuucaaucagaaccuggaauaucgcaucggauacaucuguucuggcaucuuuggggauaauccuagacccaacgacaaaacaggauccugcggcccggugagcucuaauggggccaacggaguuaagggcuucuccuuuaaguauggcaacgggguguggauuggacggaccaaaagcaucuccucucgcaauggcuucgagaugauuugggauccuaacggguggaccggaacagacaauaacuuuagcaucaagcaggacauuaucggcaucaaugaaugguccggguacucuggcagcuucguccaacaucccgagcuuacgggacuggauuguauuagaccuugcuucuggguggaacucauccggggccgccccaaagagaacaccauuuggacauccgggagcucuaucuccuuuuguggaguuaauagcgacaccgugggcuggucuuggcccgauggggcugagcugccuuucacagucgacaaguga

SEQ ID NO: 213180 - RNA, 1410 nt, Artificial Sequence; identical to SEQ ID NO: 213163
  derived and/or modified CDS sequence (opt5) from neuraminidase__InfluenzaA__AEQ49771

SEQ ID NO: 213181 - RNA, 1410 nt, Artificial Sequence; identical to SEQ ID NO: 212329
  derived and/or modified CDS sequence (opt5) from neuraminidase__InfluenzaA__AEQ49772

SEQ ID NO: 213182 - RNA, 1410 nt, Artificial Sequence
  derived and/or modified CDS sequence (opt5) from neuraminidase__InfluenzaA__AEQ49773
augaaccccaaucagaagaucauuaccaucggcagcauuugcaugacaaucgggauggccaaccugauucuccaaaucggaaauaucauuuccaucuggauuucucacagcauccagcugggcaaccagucccagauugagacguguaaucaaucugugaucaccuacgaaaacaauacaugggucaaccagaccuauguuaauauuagcaacacaaauuucgcugccgggcaguccguggugucugucaaacuugcgggaaacagcucccugugcccugugagcggcugggcuaucuacucuaaggacaauuccaucagaauugggagcaaaggagauguuuuugugauccgggagccguucauuucuuguagcccccucgaaugccgcaccuuuuuccugacacagggcgcccuucugaacgacaagcauuccaauggcaccaucaaagauagaucuccuuaucggacgcucauguccugucccauuggggaggucccuagccccuacaacucccgcuuugaaucuguggccuggagcgcuuccgccugccacgacggaaucaacuggcugaccaucggcauuagcgggccugauaauggagcuguugccgugcugaaguauaacggcaucauuacagacaccaucaagucuuggagaaauaacauucuccggacacaagaguccgagugugcgugcgucaaugggagcuguuucaccaucaugacggauggaccgucugacggccaggccagcuacaaaaucuuucgcauugaaaagggcaaaaucgugaaguccguggagaugaacgcucccaauuaucauuacgaagagugcucuuguuacccugauagcuccgagauuacaugcgucugcagagacaacuggcacgggagcaaucggcccuggguuucuuucaaccagaaucuggaauaucagaucggauacauuuguuccggcaucuuuggggauaacccucgccccaaugacaaaaccggaagcugcggcccggugucuuccaacggggccaauggagugaagggcuucagcuuuaaguauggcaacggggucuggauuggaagaacaaaauccaucucuagccggaagggcuucgagaugaucugggauccuaacggguggaccggaaccgacaauaacuuuuccauuaaacaagacaucgugggcauuaaugaauggucuggguacagcggcuccuucguucagcaucccgagcuuacaggacuggauuguauccgcccuugcuucuggguggaacucauuagaggccggcccaaggagaacacgaucuggaccagcgggucuuccaucagcuuuuguggagucaauucuaacacagugggcugguccuggcccgacggggcugagcugccuuucaccauugauaaauga

SEQ ID NO: 213183 - RNA, 1410 nt, Artificial Sequence
  derived and/or modified CDS sequence (opt5) from neuraminidase__InfluenzaA__AEQ49774
augaaccccaaucagaagaucauuaccaucggcagcgugugcaugacaauugggauggccaaccugauccuccaaauuggaaauaucaucuccauuuggaucucucacagcauucagcugggcaaccagucccagaucgagacguguaaucaaucugucauuaccuacgaauauaacacauggguuaaucagaccuacaucaacauuagcaauacaaacuucgcugccgggcaguccguggugucugucaaacuugugggaaauagcucccugugcccuguuagcggcugggcgaucuauucuaaggacaacuccaucagaauugggagcaaaggagauguguuugucauccgggagccguucauuucuuguagcccccucgaaugccgcaccuuuuuccugacacagggcgcccuucugaaugacaagcauuccaacggcaccaucaaagauagaucuccuuaccggacgcucauguccugucccauuggggaggugccuagccccuauaauucccgcuuugaaucuguugcuuggagcgccuccgcuugccacgacggaaucaacuggcugaccaucggcauuagcgggccugauaacggagccguggcuguccugaaguacaauggcaucauuacagacaccaucaagucuuggagaaacaauauucuccggacacaagaguccgagugugccugcgugaacgggagcuguuucaccaucaugacggauggaccgucugacggccaggcgagcuauaaaaucuuucgcauugaaaagggcaaaaucgugaaguccgucgagaugaaugcccccaacuaccauuacgaagagugcucuuguuauccugauagcuccgagauuacaugcguuugcagagacaauuggcacgggagcaaccggcccugggugucuuucaaucagaaccuggaauaccagaucggauauauuuguuccggcaucuuuggggauaauccucgccccaacgacaaaaccggaagcugcggcccggugucuuccaauggggcuaacggagucaagggcuucagcuuuaaguacggcaaugggguguggauuggaagaacaaaauccaucucuagccggaagggcuaugagaugaucugggauccuaacggguggaccggaaccgacaacaauuucuccauuaaacaagacaucguuggcauuaacgaauggucuggguacagcggcuccuuugugcagcaucccgagcuuacaggaauggauuguauccgcccuugcuucugggucgaacugauuagaggccggcccaaggagaauacgaucuggaccagcgggucuuccaucagcuucuguggagugaacucugacacaguuggcugguccuggcccgauggggccgagcucccuuuuaccauugacaaauga

SEQ ID NO: 213184 - RNA, 1410 nt, Artificial Sequence; identical to SEQ ID NO: 212329
  derived and/or modified CDS sequence (opt5) from neuraminidase__InfluenzaA__AEQ49775

SEQ ID NO: 213185 - RNA, 1410 nt, Artificial Sequence
  derived and/or modified CDS sequence (opt5) from neuraminidase__InfluenzaA__AEQ49776
augaaccccaaucagaagaucauuaccaucggcagcgugugcaugacaauugggauggccaaccugauccuccaaauuggaaauaucaucuccauuuggaucucucacagcauucagcugggcaaccagucccagaucgagacguguaaucaaucugucauuaccuacgaaaacaauacauggguuaaccagaccuaugugaauaucagcaacacaaauuucgcugccgggcaguccguggucucugugaaacuugcgggaaacagcucccugugcccuguuagcggcugggcuauuuacucuaaggacaauuccaucagaaucgggagcaaaggagauguguuugucauucgggagccguucaucucuuguucccccagcgaaugccgcaccuuuuuccucacacagggcgcccugcuuaacgacaagcauucuaauggcaccauuaaagauagauccccuuaucggacgcugaugagcugucccaucggggaggugccuucccccuacaacucucgcuuugaaagcguugccugguccgcuagcgccugccacgacggaauuaacuggcucaccaucggcaucucugggccugauaauggagcuguggccguccugaaguauaacggcauuaucacagacaccauuaaguccuggagaaauaacauccugcggacacaagagagcgagugugcgugcgugaaugggucuuguuucaccauuaugacggauggaccgagcgacggccaggccuccuacaaaaucuuucgcaucgaaaagggcaaaauugugaagucugucgagaugaacgcucccaauuaucauuacgaagagugcagcuguuacccugauuccagcgagaucacaugcguuugcagagacaacuggcacgggucuaaucggcccuggguguccuucaaccagaaucucgaauaucagauuggauacaucuguagcggcauuuuuggggauaacccucgccccaaugacaaaaccggaucuugcggcccgguguccagcaacggggccaauggagucaagggcuucuccuuuaaguauggcaacgggguguggaucggaagaacaaaaucuauuagcucccggaagggcuucgagaugaucugggauccuaacggguggaccggaaccgacaauaacuuuucuaucaaacaagacauuguuggcaucaaugaauggagcggguacuccggcagcuucgugcagcaucccgagcugacaggacuugauuguauucgcccuugcuucugggucgaacugaucagaggccggcccacggagaacaccauuuggacaucuggguccagcaucucuuuuuguggaguuaauuccgacaccgugggcuggagcuggcccgauggggcugagcucccuuucacaaucgacaaguga

SEQ ID NO: 213186 - RNA, 1410 nt, Artificial Sequence; identical to SEQ ID NO: 213150
  derived and/or modified CDS sequence (opt5) from neuraminidase__InfluenzaA__AEQ49777

SEQ ID NO: 213187 - RNA, 1410 nt, Artificial Sequence
  derived and/or modified CDS sequence (opt5) from neuraminidase__InfluenzaA__AEQ49778
augaaccccaaucagaagaucauuaccaucggcagcgugugcaugacaauugggauggccaaccugauccuccaaauuggaaauaucaucuccauuuggaucucucacagcauucagcugggcaaccagucccagaucgagacguguaaucaaucugucauuaccuacgaaaacaauacauggaucaaccagaccuauguuaauauuagcaacacaaauuucgcugccgugcaguccguggucucugugaaacuugcggggaacagcacccugugcccuguuuccggaugggcuaucuacagcaaggacaauucuaucagaauuggcuccaaaggggauguguuugucauccgggagccguucauuagcuguucuccccucgaaugccgcacauuuuuccugacccagggagcccuucugaacgacaagcauuccaauggcacgaucaaagauagaagcccuuaucggacccucaugucuugucccauuggcgaggugccuucccccuacaacagccgcuuugaauccguugccuggucugcuagcgccugccacgacgggaucaacuggcugacaaucggaauuuccggcccugauaauggggcuguggccguccugaaguauaacggaaucauuaccgacacaaucaagagcuggagaaauaacauucuccggacccaagagucugagugugcgugcgugaauggcuccuguuucacgaucaugacagaugggccgagcgacggacaggccucuuacaaaaucuuucgcauugaaaagggcaaaaucgucaagagcguggagaugaacgcucccaauuaucauuacgaagagugcuccuguuacccugauucuagcgagauuaccugcguuugcagagacaacuggcacggcuccaaucggcccugggugagcuucaaccagaaucuggaauaucagaucggguacauuuguucuggaaucuuuggcgauaacccucgccccaaugacaaaacaggguccugcggaccggugagcucuaacggcgccaauggggucaagggauucuccuuuaaguauggcaacggcguguggauugggagaaccaaaagcaucuccucucggaagggauucgagaugaucugggauccuaacggcuggaccgggacagacaauaacuuuagcauuaaacaagacaucguuggaauuaaugaaugguccggcuacucugggagcuucgugcagcaucccgagcuuacgggccuggauuguauccgcccuugcuucugggucgaacucauuagaggacggcccaaggagaacaccaucuggacauccggcagcucuaucuccuuuuguggggugaauagcgacaccguuggauggucuuggcccgauggcgcugagcugccuuucacaauugacaaauga

SEQ ID NO: 213188 - RNA, 1410 nt, Artificial Sequence
  derived and/or modified CDS sequence (opt5) from neuraminidase__InfluenzaA__AEQ49779
augaaccccaaucagaagaucauuaccaucggcagcgugugcaugacaauugggauggccaaccugauccuccaaauuggaaauaucaucuccauuuggaucucucacagcauucagcugggcaaccagaaucagacggagaccuguaaccaauccgucaucacauacgaaaauaacaccuggguuaaucagacauaugugaacauuucuaauaccaacuucgcugccgggcagagcguggucuccgugaaacuugcgggaaauucuagccugugcccuguuuccggcugggcuaucuacagcaaggacaacucuauuagaaucggguccaaaggagauguguuugucauccgggagccguucauuagcuguucuccccucgaaugccgcacauuuuuccugacccagggcgcccuucugaaugacaagcauuccaacggcacgaucaaagauagaagcccuuaucggacccucaugucuugucccauuggggaggugccuucccccuacaacagccgcuuugaauccguugccuggucugcuagcgccugccacgacggaaucaauuggcugacaauuggcaucuccgggccugauaacggagcuguggccguccugaaguauaauggcaucauuaccgacacaaucaagagcuggagaaacaauauucuccggacccaagagucugagugugcgugcgugaacggguccuguuucacggugaugacagauggaccgagcgacggccaggccucuuacaaaaucuuucgcauugaaaagggcaaaaucgucaagagcguugagaugaaugcucccaacuaucauuacgaagagugcuccuguuacccugauucuagcgagauuaccugcgugugcagagacaauuggcacggguccaaccggcccugggugagcuucaaucagaaccuggaauaucgcaucggauacaucuguucuggcauuuuuggggauaauccuagacccaacgacaaaacaggauccugcggcccggucagcucuaauggggccaacggagugaagggcuucuccuuuaaguauggcaacgggguuuggaucggacggaccaaaagcauuuccucucgcaauggcuucgagaugaucugggauccuaacggguggaccggaacagacaauaacuuuagcauuaagcaggacaucaucggcauuaaugaaugguccggguacucuggcagcuucgugcaacaucccgagcuuacgggacuggauuguaucagaccuugcuucugggucgaacucauucggggccgccccaaagagaacaccaucuggacauccgggagcucuauuuccuuuuguggagugaauagcgacaccguuggcuggucuuggcccgauggggcugagcugccuuucacaguggacaaguga

SEQ ID NO: 213189 - RNA, 1410 nt, Artificial Sequence; identical to SEQ ID NO: 212329
  derived and/or modified CDS sequence (opt5) from neuraminidase__InfluenzaA__AEQ49780

SEQ ID NO: 213190 - RNA, 1410 nt, Artificial Sequence; identical to SEQ ID NO: 212329
  derived and/or modified CDS sequence (opt5) from neuraminidase__InfluenzaA__AEQ49781

SEQ ID NO: 213191 - RNA, 1410 nt, Artificial Sequence; identical to SEQ ID NO: 213150
  derived and/or modified CDS sequence (opt5) from neuraminidase__InfluenzaA__AEQ49782

SEQ ID NO: 213192 - RNA, 1410 nt, Artificial Sequence
  derived and/or modified CDS sequence (opt5) from neuraminidase__InfluenzaA__AEQ49783
augaaccccaaucagaagaucauuaccaucggcagcgccugcaugacaauugggauggcuaaccugauccuccaaauuggaaauaucaucuccauuuggaucucucacagcauucagcugggcaaccagucccagaucgagacguguaaucaaucugugauuaccuacgaaaacaauacaugggucaaccagaccuauguuaauaucagcaacacaaauuucgccgcggggcaguccguggugucugucaaacuugcuggaaacagcucccugugcccugugagcggcugggccauuuacucuaaggacaauuccaucagaaucgggagcaaaggagauguuuuugugauucgggagccguucaucucuuguagcccccucgaaugccgcaccuuuuuccugacacagggcgcccuucugaacgacaagcauuccaauggcaccauuaaagauagaucuccuuaucggacgcucauguccugucccaucggggaggucccuagccccuacaacucccgcuuugaaucuguggcuuggagcgccuccgcuugccacgacggaauuaacuggcugaccaucggcaucagcgggccugauaauggagccguugcggugcugaaguauaacggcauuaucacagacaccauuaagucuuggagaaauaacauccuccggacacaagaguccgagugugccugcgucaaugggagcuguuucaccauuaugacggauggaccgucugacggccaggcuagcuacaaaaucuuucgcaucgaaaagggcaaaauugugaaguccguggagaugaacgcccccaauuaucauuacgaagagugcucuuguuacccugauagcuccgagaucacaugcgucugcagagacaacuggcacgggagcaaucggcccuggguuucuuucaaccagaaucuggaauaucagauuggauacaucuguuccggcauuuuuggggauaacccucgccccaaugacaaaaccggaagcugcggcccggugucuuccaacggggcuaauggagugaagggcuucagcuuuaaguauggcaacggggucuggaucggaagaacaaaauccauuucuagccggaagggcuucgagaugaucugggauccuaacggguggaccggaaccgacaauaacuuuuccaucaaacaagacauugugggcaucaaugaauggucuggguacagcggcuccuucguucagcaucccgagcuuacaggacuggauuguauucgcccuugcuucuggguggaacucaucagaggccggcccaaggagaacacgauuuggaccagcgggucuuccaucagcuuuuguggagucaauucugacacagugggcugguccuggcccgauggggccgagcugccuuucaccaucgacaaauga

SEQ ID NO: 213193 - RNA, 1410 nt, Artificial Sequence
  derived and/or modified CDS sequence (opt5) from neuraminidase__InfluenzaA__AEQ49785
augaaccccaaucagaagaucauuaccaucggcagcgugucccugacaauuucuacgaucugcuucuuuaugcaaauugccauccucaucaccacagucacccugcacuucaaacaguacgaguuuaacagcccuccgaauaaccagguuaugcuuugugaacccacaauuaucgagagaaauauuaccgaaaucguguaucugacaaacaccacgauugagaaggaaaucugcccuaaacucgcugaguaccggaauugguccaagccccagugugacauuaccggguucgccccuuuuucuaaagauaacagcauccgccuguccgcgggaggcgacaucugggugacaagagagcccuaugucucuugcgauccuaauaaguguuaccaauucgcucuugggcagggaaccacacugaacaaugugcauagcaacaauaccguucgggaccgcacgccguauagaacacuccugaugaacgaacugggcgugcccuuucaccucgggaccaagcaggucugcauugccugguccucuagcuccugucaugauggaaaagccuggcugcacgugugcaucacaggcgacgauaagaaugcuaccgccagcuucauuuacaacggccggcuuguugacucuguggucuccuggagcaaagagauccugcgcacccaggaaucugagugugugugcauuaacgggacauguacgguggucaugaccgauggauccgcuagcggcaaggccgacacaaaaauccucuuuaucgaggaagggaagauuguucauaccuccacacugucuggaagcgcgcaacacguggaggaaugcuccugcuauccuagauaccccggcgugcggugugucugccgcgauaauuggaaggggagcaacagaccuaucguggacauuaauaugaaagaucacucuaucguuuccagcuacguguguucuggacuugucggcgacacgccccggaagaacgacagcuccucuagcucccauugcuucgauccgaaugacgaggaaggcgggcacggagugaaaggcugggccuuugaugacgggaacgauguuuggaugggacgcaccauuagcgagaagucuagacugggcuaugagacauucaaagugaucgaagggugguccaauccuaagagcaaacuccagaucaaccggcaggucauuguggaccgcggagauagaucuggcuacuccggcaucuuuagcgucgaggggaaguccuguauuaaucggugcuucuauguggaacugaucagaggaucuaaggaggaaaccgagguucuguggaccagcaacuccauuguggucuucuguggcacaucugggaccuacggaacaggcagcuggcccgacggggcugauaucaaucucaugccuauuuga

SEQ ID NO: 213194 - RNA, 1410 nt, Artificial Sequence; identical to SEQ ID NO: 213193
  derived and/or modified CDS sequence (opt5) from neuraminidase__InfluenzaA__AEQ49786

SEQ ID NO: 213195 - RNA, 1410 nt, Artificial Sequence; identical to SEQ ID NO: 213193
  derived and/or modified CDS sequence (opt5) from neuraminidase__InfluenzaA__AEQ49788

SEQ ID NO: 213196 - RNA, 1410 nt, Artificial Sequence; identical to SEQ ID NO: 213193
  derived and/or modified CDS sequence (opt5) from neuraminidase__InfluenzaA__AEQ49789

SEQ ID NO: 213197 - RNA, 1410 nt, Artificial Sequence
  derived and/or modified CDS sequence (opt5) from neuraminidase__InfluenzaA__AEQ49790
augaaccccaaucagaagaucauuaccaucggcagcgugucccugacaauuucuacgaucugcuucuuuaugcaaauugccauccucaucaccacagucacccugcacuucaaacaguacgaguuuuauagcccuccgaacaaucagguuaugcuuugugaacccacaauuaucgagagaaacauuaccgaaaucguguaccugacaaauaccacgauugagaaggaaaucugcccuaaacucgcugaguaucggaacugguccaagccccagugugacauuaccggguucgccccuuuuucuaaagauaauagcauccgccuguccgcgggaggcgacaucugggugacaagagagcccuacgucucuugcgauccugacaaguguuaucaauucgcucuugggcagggaaccacacugaacaaugugcauagcaacaauaccguucggggccgcacgccguacagaacacuccugaugaacgaacugggggugcccuuucaccucggaaccaagcaggucugcauugccugguccucuagcuccugucaugauggcaaagccuggcugcacgugugcaucacaggcgacgauaagaaugcuaccgccagcuucauuuauaacgggcggcuuguugacucuguggucuccuggagcaaagagauccugcgcacccaggaaucugagugugugugcauuaauggaacauguacgguggucaugaccgauggcuccgcuagcgggaaggccgacacaaaaauccucuuuaucgaggaaggaaagauuguucauaccuccacacugucuggcagcgcgcaacacguggaggaaugcuccugcuacccuagauaccccggggugcggugugucugccgcgauaacuggaagggaagcaacagaccuaucguggacauuaauaucaaagaucacucuauuguuuccagcuauguguguucuggccuugucggcgacacgccccggaagaacgacagcuccucuagcucccauugccuggauccgaauaacgaggaagggggacacggcgugaaagggugggccuucgacgauggaaaugacguuuggaugggccgcaccaucaacgagacaagcagacucggguacgagaccuuuaaggugaucgaaggauggucuaauccuaaauccaagcugcagauuaaccggcaggucaucguggaucgcggcaauagaagcggcuauucugggauuuucuccgucgagggaaaaagcuguaucaaccggugcuuuuacguggaacugauuagaggccgcaaggaggaaaccgagguucucuggacauccaauucuaucguggucuucugugggaccagcggaacauauggcacgggguccuggcccgacggcgcugaucugaaccuuaugccuauuuga

SEQ ID NO: 213198 - RNA, 1410 nt, Artificial Sequence
  derived and/or modified CDS sequence (opt5) from neuraminidase__InfluenzaA__AEQ49791
augaaccccaaucagaagaucauuaccaucggcagcgugucccugacaauuucuacgaucugcuucuuuaugcaaauugccauccucaucaccacagucacccugcacuucaaacaguacgaguuuuauccuccgcccaacaaucagguuaugcuuugugaaccuacaauuaucgagagaaacauuaccgaaaucguguaccugacaaauaccacgauugagaaggaaaucugccccaaacucgcugaguaucggaacuggagcaagccucagugugacauuaccggguucgcccccuuuuccaaagauaauucuauccgccugagcgcgggaggcgacaucugggugacaagagagccuuacgucuccugcgauccggacaaguguuaucaauucgcucuugggcagggaaccacacugaacaaugugcauucuaacaauaccguucggaaccgcacgcccuacagaacacuccugaugaaugaacugggcgugccuuuucaccucgggaccaagcaggucugcauugccuggagcuccagcucuugucaugauggaaaagccuggcugcacgugugcaucacaggcgacgauaagaacgcuaccgccuccuucauuuauaauggccggcuuguugacagcguggucucuugguccaaagagauccugcgcacccaggaaagcgagugugugugcauuaacgggacauguacgguggucaugaccgauggaucugcuuccggcaaggccgacacaaaaauccucuuuaucgaggaagggaagauuguucauaccagcacacuguccggaucugcgcaacacguggaggaaugcagcugcuaccccagauacccuggcgugcggugugucugccgcgauaacuggaagggguccaauagacccaucguggacauuaacaucaaagaucacagcauuguuucuuccuauguguguagcggacuugucggcgacaccccgcggaagaaugacucuagcuccucuagccauugccuggauccuaacaaugaggaaggcgggcacggagugaaaggcugggccuucgacgaugggaacgacguuuggaugggacgcacgaucaaugagacauccagacucggcuacgagaccuuuaaggugaucgaaggguggagcaaccccaaaucuaagcugcagauuaaucggcaggucaucguggaucgcggaaacagauccggcuauagcggcauuuucucugucgaggggaaauccuguaucaaucggugcuuuuacguggaacugauuagaggacgcaaggaggaaaccgagguucucuggacaagcaacuccaucguggucuucuguggcaccucugggacauauggaacgggcagcuggccugacggggcugaucugaaucuuaugcccauuuga

SEQ ID NO: 213199 - RNA, 1410 nt, Artificial Sequence; identical to SEQ ID NO: 213193
  derived and/or modified CDS sequence (opt5) from neuraminidase__InfluenzaA__AEQ49792

SEQ ID NO: 213200 - RNA, 1410 nt, Artificial Sequence; identical to SEQ ID NO: 213193
  derived and/or modified CDS sequence (opt5) from neuraminidase__InfluenzaA__AEQ49793

SEQ ID NO: 213201 - RNA, 1410 nt, Artificial Sequence; identical to SEQ ID NO: 213193
  derived and/or modified CDS sequence (opt5) from neuraminidase__InfluenzaA__AEQ49794

SEQ ID NO: 213202 - RNA, 1410 nt, Artificial Sequence; identical to SEQ ID NO: 213193
  derived and/or modified CDS sequence (opt5) from neuraminidase__InfluenzaA__AEQ49795

SEQ ID NO: 213203 - RNA, 1410 nt, Artificial Sequence
  derived and/or modified CDS sequence (opt5) from neuraminidase__InfluenzaA__AEQ49796
augaaccccaaucagaagaucauuaccaucggcagcgugucccugacaauuucuacgaucugcuucuuuaugcaaauugccauccucaucaccacagucacccugcacuucaaacaguacgaguuuaacagcccuccgaauaaccagguuaugcuuugugaacccacaauuaucgagagaaauauuaccgaaaucguguaucugacaaacaccacgauugagaaggaaaucugcccuaaacucgcugaguaccggaauugguccaagccccagugugacauuaccggguucgccccuuuuucuaaagauaacagcauccgccuguccgcgggaggcgacaucugggugacaagagagcccuaugucucuugcgauccugacaaguguuaccaauucgcucuugggcagggaaccacacugaauaacgugcauagcaauaacaccguucggggccgcacgccguauagaacacuccugaugaaugaacugggggugcccuuucaccucggaaccaagcaggucugcauugccugguccucuagcuccugucaugauggcaaagccuggcugcacgugugcaucacaggcgacgauaagaacgcuaccgccagcuucauuuacaaugggcggcuuguugacucuguggucuccuggagcaaagagauccugcgcacccaggaaucugagugugugugcauuaacggaacauguacgguggucaugaccgauggcuccgcuagcgggaaggccgacacaaaaauccucuuuaucgaggaaggaaagauuguucauaccuccacacugucuggcagcgcgcaacacguggaggaaugcuccugcuauccuagauaccccggggugcggugugucugccgcgauaacuggaagggaagcaauagaccuaucguggacauuaacaucaaagaucacucuauuguuuccagcuacguguguucuggccuugucggcgacacgccccggaagaaugacagcuccucuagcucccauugccuggauccgaacaaugaggaagggggacacggcgugaaagggugggccuucgacgauggaaacgacguuuggaugggccgcaccaucaaugagacaagcagacucggguaugagaccuuuaaggugaucgaaggauggucuaacccuaaauccaagcugcagauuaaucggcaggucaucguggauaaaggcaaccgcagcggcuacucugggauuuucuccgucgagggaaagagcuguaucaauagaugcuuuuauguggaacugauucggggcagaaaggaggaaaccgagguucucuggacauccaacucuaucguggucuucugugggaccagcggaacauacggcacgggguccuggcccgacggcgcugaucugaaucuuaugccuauuuga

SEQ ID NO: 213204 - RNA, 1410 nt, Artificial Sequence; identical to SEQ ID NO: 213193
  derived and/or modified CDS sequence (opt5) from neuraminidase__InfluenzaA__AEQ49797

SEQ ID NO: 213205 - RNA, 1410 nt, Artificial Sequence; identical to SEQ ID NO: 213193
  derived and/or modified CDS sequence (opt5) from neuraminidase__InfluenzaA__AEQ49798

SEQ ID NO: 213206 - RNA, 1410 nt, Artificial Sequence; identical to SEQ ID NO: 213193
  derived and/or modified CDS sequence (opt5) from neuraminidase__InfluenzaA__AEQ49799

SEQ ID NO: 213207 - RNA, 1410 nt, Artificial Sequence; identical to SEQ ID NO: 213193
  derived and/or modified CDS sequence (opt5) from neuraminidase__InfluenzaA__AEQ49800

SEQ ID NO: 213208 - RNA, 1410 nt, Artificial Sequence; identical to SEQ ID NO: 213193
  derived and/or modified CDS sequence (opt5) from neuraminidase__InfluenzaA__AEQ49801

SEQ ID NO: 213209 - RNA, 1410 nt, Artificial Sequence; identical to SEQ ID NO: 213193
  derived and/or modified CDS sequence (opt5) from neuraminidase__InfluenzaA__AEQ49802

SEQ ID NO: 213210 - RNA, 1410 nt, Artificial Sequence
  derived and/or modified CDS sequence (opt5) from neuraminidase__InfluenzaA__AEQ49803
augaaccccaaucagaagaucauuaccaucggcagcgugucccugacaauuucuacgaucugcuucuuuaugcaaauugccauccucaucaccacagucacccugcacuucaaacaguacgaguuuaacagcccuccgaauaaccagguuaugcuuugugaacccacaauuaucgagagaaauauuaccgaaaucguguaucugacaaacaccacgauugagaaggaaaucugcccuaaacucgcugaguaccggaauugguccaagccccagugugacauuaccggguucgccccuuuuucuaaagauaacagcauccgccuguccgcgggaggcgacaucugggugacaagagagcccuaugucucuugcgauccuaauaaguguuaccaauucgcucuugggcagggaaccacacugaacaaugugcauagcaacaauaccguucgggaccgcacgccguauagaacacuccugaugaacgaacugggcgugcccuuucaccucgggaccaagcaggucugcauugccugguccagcagcuccugucaugauggaaaagccuggcugcacgugugcaucacaggcgacgauaagaaugcuaccgccagcuucauuuacaacggccggcuuguugacucuguggucuccuggagcaaagagauccugcgcacccaggaaucugagugugugugcauuaacgggacauguacgguggucaugaccgauggauccgcuagcggcaaggccgacacaaaaauccucuuuaucgaggaagggaagauuguucauaccuccacacugucuggaagcgcgcaacacguggaggaaugcuccugcuauccuagauaccccggcgugcggugugucugccgcgauaauuggaaggggagcaacagaccuaucguggacauuaauaucaaagaucacucuauuguuuccagcuacguguguucuggacuugucggcgacacgccccggaagaacgacagcaccuccucuagccauugccuggauccgaauaacgaggaaggcgggcacggagugaaaggcugggccuucgacgaugggaaugacguuuggaugggacgcacaaucuccgagaccagcagacucggcuaugagaccuuuaaggugaucgaaggguggucuaacccuaaauccaagcugcagauuaaucggcaggucaucguggauaaaggaaaccgcagcggcuacucuggcauuuucuccgucgaggggaagucuuguaucaauagaugcuuuuauguggaacugauucggggaagaaaggaggaaacagagguucucuggaccuccaacucuaucguggucuucuguggcacaagcgggacguacggaaccggcuccuggcccgacggggcugaucugaaucuuaugacaauuuga

SEQ ID NO: 213211 - RNA, 1410 nt, Artificial Sequence
  derived and/or modified CDS sequence (opt5) from neuraminidase__InfluenzaA__AEQ49804
augaaccccaaucagaagaucauuaccaucggcagcgugucccugacaauuucuacgaucugcuucuuuaugcaaauugccauccucaucaccacagucacccugcacuucaaacaguacgaguuuaacagcccuccgaauaaccagguuaugcuuugugaacccacaauuaucgagagaaauauuaccgaaaucguguaucugacaaacaccacgauugagaaggaaaucugcccuaaacccgcugaguaccggaauugguccaagccucagugugacauuaccggguucgcccccuuuucuaaagauaacagcauccgccucuccgcgggaggcgacaucugggugacaagagagccuuaugucucuugcgauccggacaaguguuaccaauucgcucuggggcagggaaccacacuuaauaacgugcauagcaauaacaccguucgggaucgcacgcccuauagaacacugcucaugaaugaacugggcgugccuuuucaccuggggaccaagcaggucugcauugccugguccucuagcuccugucaugacggaaaagccuggcuccacgugugcaucacaggcgaugacaagaacgcuaccgccagcuucauuuacaauggccggcugguugauucuguggucuccuggagcaaagacauccuucgcacccaggagucugaaugugugugcauuaacgggacauguacgguggucaugaccgauggauccgcuagcggcaaggccgacacaaaaauccuguuuaucgaggaggggaagauuguucauaccuccacacucucuggaagcgcgcaacacguggaagagugcuccugcuaucccagauacccuggcgugcggugugucugccgcgauaacuggaaggggagcaauagacccaucguggacauuaacaucaaagaccacucuauuguuuccagcuacguguguucuggacuggucggcgauaccccgcggaagaaugacagcuccucuagcucccauugccuugauccuaacaaugaagagggcgggcacggagugaaaggcugggccuucgacgaugggaacgacguuuggaugggacgcacgaucaaugaaacaagcagacugggcuaugagaccuuuaaggugaucgagggguggucuaaccccaaauccaagcuccagauuaaucggcaggucaucguggaucgcggaaacagaagcggcuacucuggcauuuucuccgucgaagggaaaagcuguaucaaucggugcuuuuauguggagcugauuagaggacgcaaggaagagaccgaaguucuguggacauccaacucuaucguggucuucuguggcaccagcgggacauacggaacgggcuccuggccugacggggcugaucucaaucugaugcccauuuga

SEQ ID NO: 213212 - RNA, 1410 nt, Artificial Sequence
  derived and/or modified CDS sequence (opt5) from neuraminidase__InfluenzaA__AEQ49805
augaaccccaaucagaagaucauuaccaucggcagcgugucccugacaauuucuacgaucugcuucuuuaugcaaauugccauccucaucaccacagucacccugcacuucaaacaguacgaguuuaacagcccuccgaauaaccagguuaugcuuugugaacccacaauuaucgagagaaauauuaccgaaaucguguaucugacaaacaccacgauugagaaggaaaucugcccuaaacccgcugaguaccggaauugguccaagccucagugugacauuaccggguucgcccccuuuucuaaagauaacagcauccgccucuccgcgggaggcgacaucugggugacaagagagccuuaugucucuugcgauccggacaaguguuaccaauucgcucuggggcagggaaccacacuuaauaacgugcauagcaauaacaccguucggaaucgcacgcccuauagaacacugcucaugaacgaacugggcgugccuuuucaccuggggaccaagcaggucugcauugccugguccucuagcuccugucaugauggaaaagccuggcuccacgugugcaucacaggcgacgauaagaaugcuaccgccagcuucauuuacaacggccggcugguugacucuguggucuccuggagcaaagauauccuucgcacccaggagucugaaugugugugcauuaacgggacauguacgguggucaugaccgacggauccgcuagcggcaaggccgauacaaaaauccuguuuaucgaggaggggaagauuguucauaccuccacacucucuggaagcgcgcaacacguggaagagugcuccugcuaucccagauacccuggcgugcggugugucugccgcgacaauuggaaggggagcaacagacccaucguggauauuaauaucaaagaccacucuauuguuuccagcuacguguguucuggacuggucggcgacaccccgcggaagaacgauagcuccucuagcucccauugccuugacccuaauaacgaagagggcgggcacggagugaaaggcugggccuucgaugacgggaaugauguuuggaugggacgcacgaucaacgaaacaagcagacugggcuaugagaccuuuaaggugaucgagggguggucuaaucccaaauccaagcuccagauuaaccggcaggucaucguggaccgcggaaauagaagcggcuacucuggcauuuucuccgucgaagggaaaagcuguaucaaccggugcuuuuauguggagcugauuagaggacgcaaggaagagaccgaaguucuguggacauccaauucuaucguggucuucuguggcaccagcgggacauacggaacgggcuccuggccugauggggcugaccucaaccugaugcccauuuga

SEQ ID NO: 213213 - RNA, 1410 nt, Artificial Sequence
  derived and/or modified CDS sequence (opt5) from neuraminidase__InfluenzaA__AEQ49806
augaaccccaaucagaagaucauuaccaucggcagcgugucccugacaauuucuacgaucugcuucuuuaugcaaauugccauccucaucaccacagucacccugcacuucaaacaguacgaguuuaacagcccuccgaauaaccagguuaugcuuugugaacccacaauuaucgagagaaauauuaccgaaaucguguaucugacaaacaccacgauugagaaggaaaucugcccuaaacucgcugaguaccggaauugguccaagccccagugugacauuaccggguucgccccuuuuucuaaagauaacagcauccgccuguccgcgggaggcgacaucugggugacaagagagcccuaugucucuugcgauccugacaaguguuaccaauucgcucuugggcagggaaccacacugaauaacgugcauagcaauaacaccguucgggaucgcacgccguauagaacacuccugaugaaugaacugggcgugcccuuucaccucgggaccaagcaggucugcauugccugguccucuucuuccugucaugacggaaaagccuggcugcacgugugcaucacaggcgaugacaagaacgcuaccgccagcuucauuuacaauggccggcuuguugauucuguggucuccuggagcaaagagauccugcgcacccaggaaucugagugugugugcauuaacgggacauguacgguggucaugaccgacggauccgcuagcggcaaggccgauacaaaaauccucuuuaucgaggaagggaagauuguucauaccuccacacugucuggaagcgcgcaacacguggaggaaugcuccugcuauccuagauaccccggcgugcggugugucugccgcgacaacuggaaggggagcaauagaccuaucguggauauuaacaucaaagaccacucuauuguuuccagcuacguguguucuggacuugucggcgacacgccccggaagaaugauagcuucuccucuagccauugccuggacccgaacaaugaggaaggcgggcacggagugaaaggcugggccuuugaugacgggaacgauguuuggaugggacgcaccaucaaugagacauccagacucggcuaugagaccuucaaggugaucgaaggguggagcaacccuaaaucuaagcugcagauuaaucggcaggucaucguggaccgcggaaacagauccggcuacagcggcauuuuuagcgucgaggggaaauccuguaucaaucggugcuucuauguggaacugauuagaggacgcaaggaggaaaccgagguucucuggacaagcaacuccaucguggucuucuguggcaccucugggacauacggaacgggcagcuggcccgauggggcugaccugaaucuuaugccuauuuga

SEQ ID NO: 213214 - RNA, 1410 nt, Artificial Sequence; identical to SEQ ID NO: 211590
  derived and/or modified CDS sequence (opt5) from neuraminidase__InfluenzaA__AEQ49807

SEQ ID NO: 213215 - RNA, 1410 nt, Artificial Sequence
  derived and/or modified CDS sequence (opt5) from neuraminidase__InfluenzaA__AEQ49809
augaaccccaaucagaagaucauuaccaucggcagcgugucccugacaauuucuacgaucugcuucuuuaugcaaauugccauccucaucaccacagucacccugcacuucaaacaguacgaguuuaacagcccuccgaauaaccagguuaugcuuugugaacccacaauuaucgagagaaauauuaccgaaaucguguaucugacaaacaccacgauugagaaggaaaucugcccuaaacucgcugaguaccggaauugguccaagccccagugugacauuaccggguucgccccuuuuucuaaagauaacagcauccgccuguccgcgggaggcgacaucugggugacaagagagcccuaugucucuugcgauccugacaaguguuaccaauucgcucuugggcagggaaccacacugaauaacgugcauagcaauaacaccguucgggaucgcacgccguauagaacacuccugaugaaugaacugggcgugcccuuucaccucgggaccaagcaggucugcauugccugguccucuagcuccugucaugacggaaaagccuggcugcacgugugcaucacaggcgaugacaagaacgcuaccgccagcuucauuuacaauggcaaacuuguugauucuguggucuccuggagcaaggagauccugcggacccaggaaucugagugugugugcauuaacgggacauguacgguggucaugaccgacggauccgcuagcggcaaagccgauacaaagauccucuuuaucgaggaagggaagauuguucauaccuccacacugucuggaagcgcgcaacacguggaggaaugcuccugcuauccucgcuaccccggcgugagaugugucugccgggacaacuggaaagggagcaaucgcccuaucguggauauuaacaucaaggaccacucuauuguuuccagcuacguguguucuggacuugucggcgacacccccagaaagaaugauagcuccucuagcucccauugccuggacccgaacaaugaggaaggcgggcacggagugaagggcugggccuucgaugacgggaacgauguuuggaugggacggacgaucaaugagacaagccgccucggcuaugagaccuuuaaagugaucgaaggguggucuaacccuaaguccaaacugcagauuaauagacaggucaucguggaccggggaaaccgcagcggcuacucuggcauuuucuccgucgaggggaaaagcuguaucaauagaugcuuuuauguggaacugauucggggaagaaaggaggaaaccgagguucucuggacauccaacucuaucguggucuucuguggcaccagcgggacauacggaacgggcuccuggcccgauggggcugaccugaaucuuaugccuauuuga

SEQ ID NO: 213216 - RNA, 1410 nt, Artificial Sequence; identical to SEQ ID NO: 213215
  derived and/or modified CDS sequence (opt5) from neuraminidase__InfluenzaA__AEQ49811

SEQ ID NO: 213217 - RNA, 1410 nt, Artificial Sequence; identical to SEQ ID NO: 211590
  derived and/or modified CDS sequence (opt5) from neuraminidase__InfluenzaA__AEQ49812

SEQ ID NO: 213218 - RNA, 1410 nt, Artificial Sequence; identical to SEQ ID NO: 211590
  derived and/or modified CDS sequence (opt5) from neuraminidase__InfluenzaA__AEQ49813

SEQ ID NO: 213219 - RNA, 1410 nt, Artificial Sequence; identical to SEQ ID NO: 211590
  derived and/or modified CDS sequence (opt5) from neuraminidase__InfluenzaA__AEQ49815

SEQ ID NO: 213220 - RNA, 1410 nt, Artificial Sequence
  derived and/or modified CDS sequence (opt5) from neuraminidase__InfluenzaA__AEQ49816
augaaccccaaucagaagaucauuaccaucggcagcgugucccugacaauuucuacgaucugcuucuuuaugcaaauugccauccucaucaccacagucacccugcacuucaaacaguacgaguuuaacagcccuccgaauaaccagguuaugcuuugugaacccacaauuaucgagagaaauauuaccgaaaucguguaucugacaaacaccacgauugagaaggaaaucugcccuaaacucgcugaguaccggaauugguccaagccccagugugacauuaccggguucgccccuuuuucuaaagauaacagcauccgccuguccgcgggaggcgacaucugggugacaagagagcccuaugucucuugcgauccuaauaaguguuaccaauucgcucuugggcagggaaccacacugaacaaugugcauagcaacaauaccguucgggaccgcacgccguauagaacacuccugaugaacgaacugggcgugcccuuucaccucgggaccaagcaggucugcauugccugguccucuagcuccugucaugauggaaaagccuggcugcacgugugcaucacaggcgacgauaagaaugcuaccgccagcuucauuuacaacggccggcuuguugacucuguggucuccuggagcaaagagauccugcgcacccaggaaucugagugugugugcauuaacgggacauguacgguggucaugaccgauggauccgcuagcggcaaggccgacacaaaaauccucuuuguugaggaagggaagaucgugcauaccuccacacugucuggaagcgcgcaacacguggaggaaugcuccugcuauccuagauaccccggcguccggugugugugccgcgauaauuggaaggggagcaacagaccuauuguugacaucaauaugaaagaucacucuauuguguccagcuacgucuguucuggacuugugggcgacacgccccggaagaacgacagcuccucuagcucccauugcuucgauccgaaugacgaggaaggcgggcacggaguuaaaggcugggccuuugaugacgggaacgauguguggaugggacgcaccaucagcgagaagucuagacugggcuaugagacauucaaagucauugaagggugguccaauccuaagagcaaacuccagaucaaccgccaggugaucgucgaccggggaaauagaucuggcuacuccggcauuuuuagcguggaggggaaguccuguaucaaccggugcuucuauguugaacugauuagaggacgcaaggaggaaaccgaggugcuguggaccucuaauagcaucgucguguucuguggcacauccgggaccuacggaacaggcucuuggcccgauggggcugacauuaaccucaugccuaucuga

SEQ ID NO: 213221 - RNA, 1410 nt, Artificial Sequence; identical to SEQ ID NO: 212955
  derived and/or modified CDS sequence (opt5) from neuraminidase__InfluenzaA__AEQ49820

SEQ ID NO: 213222 - RNA, 1410 nt, Artificial Sequence; identical to SEQ ID NO: 212955
  derived and/or modified CDS sequence (opt5) from neuraminidase__InfluenzaA__AEQ49821

SEQ ID NO: 213223 - RNA, 1410 nt, Artificial Sequence; identical to SEQ ID NO: 213193
  derived and/or modified CDS sequence (opt5) from neuraminidase__InfluenzaA__AEQ49822

SEQ ID NO: 213224 - RNA, 1410 nt, Artificial Sequence; identical to SEQ ID NO: 213193
  derived and/or modified CDS sequence (opt5) from neuraminidase__InfluenzaA__AEQ49823

SEQ ID NO: 213225 - RNA, 1410 nt, Artificial Sequence; identical to SEQ ID NO: 213193
  derived and/or modified CDS sequence (opt5) from neuraminidase__InfluenzaA__AEQ49824

SEQ ID NO: 213226 - RNA, 1410 nt, Artificial Sequence; identical to SEQ ID NO: 213193
  derived and/or modified CDS sequence (opt5) from neuraminidase__InfluenzaA__AEQ49825

SEQ ID NO: 213227 - RNA, 1410 nt, Artificial Sequence; identical to SEQ ID NO: 213193
  derived and/or modified CDS sequence (opt5) from neuraminidase__InfluenzaA__AEQ49826

SEQ ID NO: 213228 - RNA, 1410 nt, Artificial Sequence; identical to SEQ ID NO: 213193
  derived and/or modified CDS sequence (opt5) from neuraminidase__InfluenzaA__AEQ49827

SEQ ID NO: 213229 - RNA, 1410 nt, Artificial Sequence; identical to SEQ ID NO: 213193
  derived and/or modified CDS sequence (opt5) from neuraminidase__InfluenzaA__AEQ49828

SEQ ID NO: 213230 - RNA, 1410 nt, Artificial Sequence
  derived and/or modified CDS sequence (opt5) from neuraminidase__InfluenzaA__AEQ49829
augaaccccaaucagaagaucauuaccaucggcagcgugucccugacaauuucuacgaucugcuucuuuaugcaaauugccauccucaucaccacagucacccugcacuucaaacaguacgaguuuaacagcccuccgaauaaccagguuaugcuuugugaacccacaauuaucgagagaaauauuaccgaaaucguguaucugacaaacaccacgauugagaaggaaaucugcccuaaacucgcugaguaccggaauugguccaagccccagugugacauuaccggguucgccccuuuuucuaaagauaacagcauccgccuguccgcgggaggcgacaucugggugacaagagagcccuaugucucuugcgauccuaauaaguguuaccaauucgcucuugggcagggaaccacacugaacaaugugcauagcaacaauaccguucgggaccgcacgccguauagaacacuccugaugaacgaacugggcgugcccuuucaccucgggaccaagcaggucugcauugccugguccagcagcuccugucaugauggaaaagccuggcugcacgugugcaucacaggcgacgauaagaaugcuaccgccagcuucauuuacaacggccggcuuguugacucuguggucuccuggagcaaagagauccugcgcacccaggaaucugagugugugugcauuaacgggacauguacgguggucaugaccgauggauccgcucucggcaaggccgacacaaaaauccuguuuaucgaggaagggaagauuguucauaccagcacacuuuccggaucugcgcaacacguggaggaaugcagcugcuauccuagauaccccggcgugcggugugucugccgcgauaauuggaagggguccaacagaccuaucguggacauuaauaugaaagaucacagcaucguuucuuccuacguguguagcggacuggucggcgacacgccccggaagaacgacucuagcuccucuagccauugcuucgauccgaaugacgaggaaggcgggcacggagugaaaggcugggccuuugaugacgggaacgauguuuggaugggacgcaccauuuccgagaagucuagacucggcuaugagacauucaaagugaucgaaggguggucuaauccuaaguccaaacugcagaucaaccggcaggucauuguggaccgcggagauagaagcggcuacucuggcaucuuuuccgucgagggaaagagcuguauuaaucggugcuucuauguggaacugaucagaggguccaaggaggaaaccgagguucucuggaccucuaacagcauuguggucuucuguggcacauccgggaccuacggaacaggcucuuggcccgacggggcugauaucaaucugaugccuauuuga

SEQ ID NO: 213231 - RNA, 1410 nt, Artificial Sequence; identical to SEQ ID NO: 213193
  derived and/or modified CDS sequence (opt5) from neuraminidase__InfluenzaA__AEQ49830

SEQ ID NO: 213232 - RNA, 1410 nt, Artificial Sequence; identical to SEQ ID NO: 213193
  derived and/or modified CDS sequence (opt5) from neuraminidase__InfluenzaA__AEQ49831

SEQ ID NO: 213233 - RNA, 1410 nt, Artificial Sequence
  derived and/or modified CDS sequence (opt5) from neuraminidase__InfluenzaA__AEQ49832
augaaccccaaucagaagaucauuaccaucggcagcgugucccugacaauuucuacgaucugcuucuuuaugcaaauugccauccucaucaccacagucacccugcacuucaaacaguacgaguuuaacagcccuccgaauaaccagguuaugcuuugugaacccacaauuaucgagagaaauauuaccgaaaucguguaucugacaaacaccacgauugagaaggaaaucugcccuaaacucgcugaguaccggaauugguccaagccccagugugacauuaccggguucgccccuuuuucuaaagauaacagcauccgccuguccgcgggaggcgacaucugggugacaagagagcccuaugucucuugcgauccuaauaaguguuaccaauucgcucuugggcagggaaccacacugaacaaugugcauagcaacaauaccguucgggaccgcacgccguauagaacacuccugaugaacgaacugggcgugcccuuucaccucgggaccaagcaggucugcauugccugguccucuagcuccugucaugauggaaaagccuggcugcacgugugcaucacaggcgacgauaagaaugcuaccgccagcuucauuuacaacggccggcuuguugacucuguggucuccuggagcaaagagauccugcgcacccaggaaucugagugugugugcauuaacgggacauguacgguggucaugaccgauggauccgcuagcggcaaggccgacacaaaaauccucuuuaucgaggaagggaagauuguucauaccuccacacugucuggaagcgcgcaacacguggaggaaugcuccugcuauccuagauaccccggcgugcggugugucugccgcgauaauuggaaggggagcaacagaccuaucguggacauuaauaugaaagaucacucuaucguuuccagcuacguguguucuggacuugucggcgacacgccccggaagaacgacagcuccucuagcucccauugcuucgauccgaaugacgaggaaggcgggcacggagugaaaggcugggccuuugaugacgggaacgauguuuggaugggacgcaccauuagcgagaagucuagacugggcuaugagacauucaaaguggucgaagggugguccaauccuaagagcaaacuccagaucaaccgccaggugaucgucgaccggggagauagaucuggcuacuccggcauuuuuagcguggaggggaaguccuguaucaaucggugcuucuauguugaacugauuagaggaucuaaggaggaaaccgaggugcuguggaccagcaacuccaucgucguguucuguggcacaucugggaccuacggaacaggcagcuggcccgacggggcugauauuaaucucaugccuaucuga

SEQ ID NO: 213234 - RNA, 1410 nt, Artificial Sequence
  derived and/or modified CDS sequence (opt5) from neuraminidase__InfluenzaA__AEQ49833
augaaccccaaucagaagaucauuaccaucggcagcgugucccugacaauuucuacgaucugcuucuuuaugcaaauugccauccucaucaccacagucacccugcacuucaaacaguacgaguuuaacagcccuccgaauaaccagguuaugcuuugugaacccacaauuaucgagagaaauauuaccgaaaucguguaucugacaaacaccacgauugagaaggaaaucugcccuaaacucgcugaguaccggaauugguccaagccccagugugacauuaccggguucgccccuuuuucuaaagauaacagcauccgccuguccgcgggaggcgacaucugggugacaagagagcccuaugucucuugcgauccugacaaguguuaccaauucgcucuugggcagggaaccacacugaauaacgugcauagcaauaacaccguucgggaucgcacgccguauagaacacuccugaugaaugaacugggcgugcccuuucaccucgggaccaagcaggucugcauugccugguccucuagcuccugucaugacggaaaagccuggcugcacgugugcaucacaggcgaugacaagaacgcuaccgccagcuucauuuacaauggcaaacuuguugauucuguggucuccuggagcaaggagauccugcggacccaggaaucugagugugugugcauuaacgggacauguacgguggucaugaccgacggauccgcuagcggcaaagccgauacaaagauccucuuuaucgaggaagggaagauuguucauaccuccacacugucuggaagcgcgcaacacguggaggaaugcuccugcuauccucgcuaccccggcgugagaugugucugccgggacaacuggaaagggagcaaucgcccuaucguggauauuaacaucaaggaccacucuauuguuuccagcuacguguguucuggacuugucggcgacacccccagaaagaaugauagcuccucuagcucccauugccuggacccgaacaaugaggaaggcgggcacggagugaaaggcugggccuucgaugacgggaacgauguuuggaugggacggacgaucaaugagacaagccgccucggcuaugagaccuuuaaagugaucgaaggguggucuaacccuaaguccaaacugcagauuagcagacaggucaucguggaccggggaaaucgcucuggcuacuccggcauuuucagcgucgaggggaaguccuguaucaacagaugcuuuuauguggaacugauucggggaagaaaggaggaaaccgagguucucuggacaucuaauagcaucguggucuucuguggcaccuccgggacauacggaacgggcucuuggcccgauggggcugaccugaaccuuaugccuauuuga

SEQ ID NO: 213235 - RNA, 1410 nt, Artificial Sequence
  derived and/or modified CDS sequence (opt5) from neuraminidase__InfluenzaA__AEQ49835
augaaccccaaucagaagaucauuaccaucggcagcgugucccugacaauuucuacgaucugcuucuuuaugcaaauugccauccucaucaccacagucacccugcacuucaaacaguacgaguuuaacagcccuccgaauaaccagguuaugcuuugugaacccacaauuaucgagagaaauauuaccgaaaucguguaucugacaaacaccacgauugagaaggaaaucugcccuaaacucgcugaguaccggaauugguccaagccccagugugacauuaccggguucgccccuuuuucuaaagauaacagcauccgccuguccgcgggaggcgacaucugggugacaagagagcccuaugucucuugcgauccuaauaaguguuaccaauucgcucuugggcagggaaccacacugaacaaugugcauagcaacaauaccguucgggaccgcacgccguauagaacacuccugaugaacgaacugggcgugcccuuucaccucgggaccaagcaggucugcauggccugguccucuagcuccugucaugauggaaaagccuggcugcacgugugcauuacaggcgacgauaagaaugcuaccgccagcuucaucuacaacggccggcuuguugacucuguggucuccuggagcaaagagauucugcgcacccaggaaucugagugugugugcaucaacgggacauguacgguggucaugaccgauggauccgcuagcggcaaggccgacacaaaaauucucuuuaucgaggaagggaagaucguucauaccuccacacugucuggaagcgcgcaacacguggaggaaugcuccugcuauccuagauaccccggcgugcggugugucugccgcgauaauuggaaggggagcaacagaccuauuguggacaucaauaugaaagaucacucuauuguuuccagcuacguguguucuggacuugucggcgacacgccccggaagaacgacagcuccucuagcucccauugcuucgauccgaaugacgaggaaggcgggcacggagugaaaggcugggccuuugaugacgggaacgauguuuggaugggacgcaccaucagcgagaagucuagacugggcuaugagacauucaaagugauugaagggugguccaauccuaagagcaaacuccagaucaaccggcaggucaucguggaccgcggaaauagaucuggcuacuccggcauuuuuagcgucgaggggaaguccuguaucaaccggugcuucuauguggaacugauuagaggacgcaaggaggaaaccgagguucuguggaccucuaauagcaucguggucuucuguggcacauccgggaccuacggaacaggcucuuggcccgauggggcugacauuaaccucaugccuaucuga

SEQ ID NO: 213236 - RNA, 1410 nt, Artificial Sequence; identical to SEQ ID NO: 213235
  derived and/or modified CDS sequence (opt5) from neuraminidase__InfluenzaA__AEQ49836

SEQ ID NO: 213237 - RNA, 1410 nt, Artificial Sequence; identical to SEQ ID NO: 213235
  derived and/or modified CDS sequence (opt5) from neuraminidase__InfluenzaA__AEQ49838

SEQ ID NO: 213238 - RNA, 1410 nt, Artificial Sequence; identical to SEQ ID NO: 213235
  derived and/or modified CDS sequence (opt5) from neuraminidase__InfluenzaA__AEQ49839

SEQ ID NO: 213239 - RNA, 1410 nt, Artificial Sequence
  derived and/or modified CDS sequence (opt5) from neuraminidase__InfluenzaA__AEQ49840
augaaccccaaucagaagaucauuaccaucggcagcgugucccugacaauuucuacgaucugcuucuuuaugcaaauugccauccucaucaccacagucacccugcacuucaaacaguacgaguuuaacagcccuccgaauaaccagguuaugcuuugugaacccacaauuaucgagagaaauauuaccgaaaucguguaucugacaaacaccacgauugagaaggaaaucugcccuaaacucgcugaguaccggaauugguccaagccccagugugacauuaccggguucgccccuuuuucuaaagauaacagcauccgccuguccgcgggaggcgacaucugggugacaagagagcccuaugucucuugcgauccuaauaaguguuaccaauucgcucuugggcagggaaccacacugaacaaugugcauagcaacaauaccguucgggaccgcacgccguauagaacacuccugaugaacgaacugggcgugcccuuucaccucgggaccaagcaggucugcauggccugguccucuagcuccugucaugauggaaaagccuggcugcacgugugcauuacaggcgacgauaagaaugcuaccgccagcuucaucuacaacggccggcuuguugacucuguggucuccuggagcaaagagauucugcgcacccaggaaucugagugugugugcaucaacgggacauguacgguggucaugaccgauggauccgcuagcggcaaggccgacacaaaaauucucuuuaucgaggaagggaagaucguucauaccuccacacugucuggaagcgcgcaacacguggaggaaugcuccugcuauccuagauaccccggcgugcggugugucugccgcgauaauuggaaggggagcaacagaccuauuguggacaucaauaugaaagaucacucuauuguuuccagcuacguguguucuggacuugucggcgacacgccccggaagaacgacagcuccucuagcucccauugcuucgauccgaaugacgaggaaggcgggcacggagugaaaggcugggccuuugaugacgggaacgauguuuggaugggacgcaccaucagcgagaagucuagacugggcuaugagacauucaaagugauugaagggugguccaaucauaagagcaaacuccagaucaaccggcaggucaucguggaccgcggaaauagaucuggcuacuccggcauuuuuagcgucgaggggaaguccuguaucaaccggugcuucuauguggaacugauuagaggacgcaaggaggaaaccgagguucuguggaccucuaauagcaucguggucuucuguggcacauccgggaccuacggaacaggcucuuggccugauggggcugacauuaaccucaugcccaucuga

SEQ ID NO: 213240 - RNA, 1410 nt, Artificial Sequence; identical to SEQ ID NO: 213235
  derived and/or modified CDS sequence (opt5) from neuraminidase__InfluenzaA__AEQ49841

SEQ ID NO: 213241 - RNA, 1410 nt, Artificial Sequence; identical to SEQ ID NO: 213235
  derived and/or modified CDS sequence (opt5) from neuraminidase__InfluenzaA__AEQ49842

SEQ ID NO: 213242 - RNA, 1410 nt, Artificial Sequence; identical to SEQ ID NO: 213235
  derived and/or modified CDS sequence (opt5) from neuraminidase__InfluenzaA__AEQ49843

SEQ ID NO: 213243 - RNA, 1410 nt, Artificial Sequence; identical to SEQ ID NO: 213193
  derived and/or modified CDS sequence (opt5) from neuraminidase__InfluenzaA__AEQ49844

SEQ ID NO: 213244 - RNA, 1410 nt, Artificial Sequence
  derived and/or modified CDS sequence (opt5) from neuraminidase__InfluenzaA__AEQ49845
augaaccccaaucagaagaucauuaccaucggcagcgugucccugacaauuucuacgaucugcuucuuuaugcaaauugccauccucaucaccacagucacccugcacuucaaacaguacgaguuuaacagcccuccgaauaaccagguuaugcuuugugaacccacaauuaucgagagaaauauuaccgaaaucguguaucugacaaacaccacgauugagcgggaaaucugcccuaagcucgcugaguaccgcaauugguccaaaccccagugugacauuaccggguucgccccuuuuucuaaggauaacagcaucagacuguccgcgggaggcgacaucugggugacacgggagcccuaugucucuugcgauccuaauaaauguuaccaauucgcucuugggcagggaaccacacugaacaaugugcauagcaacaauaccguucgcgacagaacgccguaucggacacuccugaugaacgaacugggcgugcccuuucaccucgggaccaagcaggucugcauggccugguccucuagcuccugucaugauggaaaggccuggcugcacgugugcauuacaggcgacgauaaaaaugcuaccgccagcuucaucuacaacggccgccuuguugacucuguggucuccuggagcaaggagauucugagaacccaggaaucugagugugugugcaucaacgggacauguacgguggucaugaccgauggauccgcuagcggcaaagccgacacaaagauucucuuuaucgaggaagggaaaaucguucauaccuccacacugucuggaagcgcgcaacacguggaggaaugcuccugcuauccucgguaccccggcgugcgcugugucugcagagauaauuggaaggggagcaaccggccuauuguggacaucaauaugaaggaucacucuauuguuuccagcuacguguguucuggacuugucggcgacacgccccgcaaaaacgacagcuccucuagcucccauugcuucgauccgaaugacgaggaaggcgggcacggagugaagggcugggccuuugaugacgggaacgauguuuggaugggaagaaccaucagcgagaaaucucggcugggcuaugagacauucaaggugauugaagggugguccaauccuaaaagcaagcuccagaucaaccgccaggucaucguggacagaggaaaucggucuggcuacuccggcauuuuuagcgucgaggggaaauccuguaucaacagaugcuucuauguggaacugauucgcggacggaaggaggaaaccgagguucuguggaccucuaauagcaucguggucuucuguggcacauccgggaccuacggaacaggcucuuggcccgauggggcugacauuaaccucaugccuaucuga

SEQ ID NO: 213245 - RNA, 1410 nt, Artificial Sequence
  derived and/or modified CDS sequence (opt5) from neuraminidase__InfluenzaA__AEQ49846
augaaccccaaucagaagaucauuaccaucggcagcgugucccugacaauuucuacgaucugcuucuuuaugcaaauugccauccucaucaccacagucacccugcacuucaaacaguacgaguuuaacagcccuccgaauaaccagguuaugcuuugugaacccacaauuaucgagagaaauauuaccgaaaucguguaucugacaaacaccacgauugagaaggaaaucugcccuaaacucgcugaguaccggaauugguccaagccccagugugacauuaccggguucgccccuuuuucuaaagauaacagcauccgccuguccgcgggaggcgacaucugggugacaagagagcccuaugucucuugcgauccuaauaaguguuaccaauucgcucuugggcagggaaccacacugaacaaugugcauagcaacaauaccguucgggaccgcacgccguauagaacacuccugaugaacgaacugggcgugcccuuucaccucgggaccaagcaggucugcauggccugguccucuagcuccugucaugauggaaaagccuggcugcacgugugcauuacaggcgacgauaagaaugcuaccgccagcuucaucuacaacggccggcuuguugacucuguggucuccuggagcaaagagauucugcgcacccaggaaucugagugugugugcaucaacgggacauguacgguggucaugaccgauggauccgcuagcggcaaggccgacacaaaaauucucuuuaucgaggaagggaagaucguucauaccuccacacugucuggaagcgcgcaacacguggaggaaugcuccugcuauccuagauaccccggcgugcggugugucugccgcgauaauuggaaggggagcaacagaccuauuguggacaucaaucuuaaagaucacucuauuguuuccagcuacguguguucuggacuggucggcgacacgccccggaagaacgacagcuccucuagcucccauugcuucgauccgaaugacgaggaaggcgggcacggagugaaaggcugggccuuugaugacgggaacgauguuuggaugggacgcaccaucagcgagaagucuagacucggcuaugagacauucaaagugauugaagggugguccaauccuaagagcaaacugcagaucaaccggcaggucaucguggaccgcggaaauagaucuggcuacuccggcauuuuuagcgucgaggggaaguccuguaucaaccggugcuucuauguggaacugauuagaggacgcaaggaggaaaccgagguucucuggaccucuaauagcaucguggucuucuguggcacauccgggaccuacggaacaggcucuuggcccgauggggcugacauuaaccugaugccuaucuga

SEQ ID NO: 213246 - RNA, 1410 nt, Artificial Sequence
  derived and/or modified CDS sequence (opt5) from neuraminidase__InfluenzaA__AEQ49850
augaaccccaaucagaagaucauuaccaucggcagcgugucccugacaauuucuacgaucugcuucuuuaugcaaauugccauccucaucaccacagucacccugcacuucaaacaguacgaguuuaacagcccuccgaauaaccagguuaugcuuugugaacccacaauuaucgagagaaauauuaccgaaaucguguaucugacaaacaccacgauugagaaggaaaucugcccuaaacucgcugaguaccggaauugguccaagccccagugugacauuaccggguucgccccuuuuucuaaagauaacagcauccgccuguccgcgggaggcgacaucugggugacaagagagcccuaugucucuugcgauccuaauaaguguuaccaauucgcucuugggcagggaaccacacugaacaaugugcauagcaacaauaccguucgggaccgcacgccguauagaacacuccugaugaacgaacugggcgugcccuuucaccucgggaccaagcaggucugcauugccugguccucuagcuccugucaugauggaaaagccuggcugcacgugugcaucacaggcgacgauaagaaugcuaccgccagcuucauuuacaacggccggcuuguugacucuguggucuccuggagcaaagagauccugcgcacccaggaaucugagugugugugcauuaacgggacauguacgguggucaugaccgauggauccgcuagcggcaaggccgacacaaaaauccucuuuaucgaggaagggaagauuguucauaccuccacacugucuggaagcgcgcaacacguggaggaaugcuccugcuauccuagauaccccggcgugcggugugucugccgcgauaauuggaaggggagcaacagaccuaucguggacauuaauaugaaagaucacucuaucguuuccagcuacguguguucuggacuugucggcgacacgccccggaagaacgacagcuccucuagcucccauugcuucgauccgaaugacgaggaaggcgggcacggagugaaaggcugggccuuugaugacgggaacgauguuuggaugggacgcaccauuagcgagaagucuagacugggcuaugagacauucaaagugaucgaagggugguccaauccuaagagcaaacuccagaucaaccggcaggucauuguggaccgcggagauagaucuggcuacuccggcaucuuuagcgucgaggggaaguccuguauuaaucggugcuucuauguggaacugaucagaggaucuaaggaggaaaccgagguucuguggaccagcaacuccauuguggucuucuguggcacaucugggaccuacggaacaggcagcuggcccgacggggcugauaucaaaauuaugccuaucuga

SEQ ID NO: 213247 - RNA, 1410 nt, Artificial Sequence
  derived and/or modified CDS sequence (opt5) from neuraminidase__InfluenzaA__AEQ49851
augaaccccaaucagaagaucauuaccaucggcagcgugucccugacaauuucuacgaucugcuucuuuaugcaaauugccauccucaucaccacagucacccugcacuucaaacaguacgaguuuaacagcccuccgaauaaccagguuaugcuuugugaacccacaauuauggagagaaauaucaccgaaauuguguaucugacaaacaccacgaucgagaaggaaauuugcccuaaacucgcugaguaccggaauugguccaagccccagugugacaucaccggguucgccccuuuuucuaaagauaacagcauucgccuguccgcgggaggcgacaucugggugacaagagagcccuaugucucuugcgauccugacaaguguuaccaauucgcucuugggcagggaaccacacugaauaacgugcauagcaauaacaccguucgggaucgcacgccguauagaacacuccugaugaaugaacugggcgugcccuuucaccucgggaccaagcaggucugcaucgccugguccucuagcuccugucaugacggaaaagccuggcugcacgugugcauuacaggcgaugacaagaacgcuaccgccagcuucaucuacaauggcaaacuuguugauucuguggucuccuggagcaaggagauucugcggacccaggaaucugagugugugugcaucaacgggacauguacgguggucaugaccgacggauccgcuagcggcaaagccgauacaaagauucucuuuaucgaggaagggaagaucguucauaccuccacacugucuggaagcgcgcaacacguggaggaaugcuccugcuauccucgcuaccccggcgugagaugugucugccgggacaacuggaaagggagcaaucgcccuauuguggauaucaacauuaaggaccacucuaucguuuccagcuacguguguucuggacuugucggcgacacccccagaaagaaugauagcuccucuagcucccauugccuggacccgaacaaugaggaaggcgggcacggagugaagggcugggccuucgaugacgggaacgauguuuggaugggacggacgauuaaugagacaagccgccucggcuaugagaccuuuaaagugaucgaaggguggucuaacccuaaguccaaacugcagaucaauagacaggucauuguggaccggggaaaccgcagcggcuacucuggcaucuucuccgucgaggggaaaagcuguauuaauagaugcuuuuauguggaacugauccggggaagaaaggaggaaaccgagguucucuggacauccaacucuauuguggucuucuguggcaccagcgggacauacggaacgggcuccuggcccgauggggcugaccugaaucuuaugccuaucuga

SEQ ID NO: 213248 - RNA, 1410 nt, Artificial Sequence; identical to SEQ ID NO: 213215
  derived and/or modified CDS sequence (opt5) from neuraminidase__InfluenzaA__AEQ49852

SEQ ID NO: 213249 - RNA, 1410 nt, Artificial Sequence; identical to SEQ ID NO: 213193
  derived and/or modified CDS sequence (opt5) from neuraminidase__InfluenzaA__AEQ49969

SEQ ID NO: 213250 - RNA, 1410 nt, Artificial Sequence; identical to SEQ ID NO: 213215
  derived and/or modified CDS sequence (opt5) from neuraminidase__InfluenzaA__AEQ49970

SEQ ID NO: 213251 - RNA, 1410 nt, Artificial Sequence
  derived and/or modified CDS sequence (opt5) from neuraminidase__InfluenzaA__AEQ54954
augaaccccaaucagaagaucauuaccaucggcagcgugucccugacaauuucuacgaucugcuucuuuaugcaaauugccauccucaucaccacagucacccugcacuucaaacaguacgaguuuaacagcccuccgaauaaccagguuaugcuuugugaacccacaauuaucgagagaaauauuaccgaaaucguguaucugacaaacaccacgauugagaaggaaaucugcccuaaacucgcugaguaccggaauugguccaagccccagugugacauuaccggguucgccccuuuuucuaaagauaacagcauccgccuguccgcgggaggcgacaucugggugacaagagagcccuaugucucuugcgauccugacaaguguuaccaauucgcucuugggcagggaaccacacugaauaacgugcauagcaauaacaccguucgggaucgcacgccguauagaacacuccugaugaaugaacugggcgugcccuuucaccucgggaccaagcaggucugcauugccugguccucuagcuccugucaugacggaaaagccuggcugcacgugugcaucacaggcgaugacaagaacgcuaccgccagcuucauuuacaauggcaaacuuguugauucuguggucuccuggagcaaggagauccugcggacccaggaaucugagugugugugcauuaacgggacauguacgguggucaugaccgacggauccgcuagcggcaaagccgauacaaagauccucuuuaucgaggaagggaagauuguucauaccuccacacugucuggaagcgcgcaacacguggaggaaugcuccugcuauccucgcuaccccggcgugagaugugucugccgggacaacuggaaagggagcaaucgcccuaucguggauauuaacaucaaggaccacucuauuguuuccagcuacguguguucuggacuugucggcgacacccccagaaagaaugauagcuccucuagcucccauugccuggacccgaacaaugaggaaggcgggcacggagugaaaggcugggccuucgaugacgggaacgauguuuggaugggacggacgaucagcgagacaucucgccucggcuaugagaccuuuaaagugaucgaagggugguccaauccuaagagcaaacugcagauuaacagacaggucaucguggaccggggaaaucgcucuggcuacuccggcauuuucagcgucgaggggaaguccuguaucaacagaugcuuuuauguggaacugauucggggaagaaaggaggaaaccgagguucucuggacaucuaauagcaucguggucuucuguggcaccuccgggacauacggaacgggcucuuggcccgauggggcugaccugaaccuuaugccuauuuga

SEQ ID NO: 213252 - RNA, 1410 nt, Artificial Sequence; identical to SEQ ID NO: 208671
  derived and/or modified CDS sequence (opt5) from neuraminidase__InfluenzaA__AER08645

SEQ ID NO: 213253 - RNA, 1410 nt, Artificial Sequence
  derived and/or modified CDS sequence (opt5) from neuraminidase__InfluenzaA__AER08649
augaaccccaaucagaagaucauuaccaucggcagcgugucccugacaauuucuacgaucugcuucuuuaugcaaauugccauccucaucaccacagucacccugcacuucaaacaguacgaguuuaacagcccuccgaauaaccagguuaugcuuugugaacccacaauuaucgagagaaauauuaccgaaaucguguaucugacaaacaccacgauugagaaggaaaucugcccuaaacucgcugaguaccggaauugguccaagccccagugugacauuaccggguucgccccuuuuucuaaagauaacagcauccgccuguccgcgggaggcgacaucugggugacaagagagcccuaugucucuugcgauccugacaaguguuaccaauucgcucuugggcagggaaccacacugaauaacgugcauagcaauaacaccguucgggaucgcacgccguauagaacacuccugaugaaugaacugggcgugcccuuucaccucgggaccaagcaggucugcauugccugguccucuagcuccugucaugacggaaaagccuggcugcacgugugcaucacaggcgaugacaagaacgcuaccgccagcuucauuuacaauggccggcuuguugauucuguggucuccuggagcaaagagauccugcgcacccaggaaucugagugugugugcauuaacgggacauguacgguggucaugaccgacggauccgcuagcggcaaggccgauacaaaaauccucuuuaucgaggaagggaagcugguucauaccuccacacuuucuggaagcgcgcaacacguggaggaaugcuccugcuauccuagauaccccggcgugcggugugucugccgcgacaacuggaaggggagcaauagaccuauuguggauaucaacauuaaagaccacucuaucguuuccagcuacguguguucuggacuggucggcgacacgccccggaagaaugauagcuccucuagcucccauugccucgacccgaacaaugaggaaggcgggcacggagugaaaggcugggccuucgaugacgggaacgauguuuggaugggacgcaccauuagcgagaagucuagacugggcuaugagacauuuaaagugaucgaagggugguccaauccuaagagcaaacugcagaucaaccggcaggucauuguggaccgcggaaauagaucuggcuacuccggcaucuucagcgucgaggggaaguccuguauuaaccggugcuuuuauguggaacucaucagaggacgcaaggaggaaaccgagguucuguggaccucuaauagcauuguggucuucuguggcacauccgggaccuacggaacaggcucuuggcccgauggggcugacaucaaccuuaugccuauuuga

SEQ ID NO: 213254 - RNA, 1410 nt, Artificial Sequence
  derived and/or modified CDS sequence (opt5) from neuraminidase__InfluenzaA__AER08657
augaaccccaaucagaagaucauuaccaucggcagcgugucccugacaauuucuacggucugcuucuuuaugcaaaucgccauucucaucaccacaguuacccugcacuucaaacaguacgaguuuaacagcccuccgaauaaccaggugaugcuuugugaacccacaaucauugagagaaauaucaccgaaauuguguaucugacaaacaccacgaucgagaaggaaaugugcccuaaacucgcugaguaccggaauugguccaagccccagugugacauuaccggguucgccccuuuuucuaaagauaacagcauccgccuguccgcgggaggcgacauuugggucacaagagagcccuaugugucuugcgauccugacaaguguuaccaauucgcucuugggcagggaaccacacugaauaacguucauagcaauaacaccgugcgggaucgcacgccguauagaacacuccugaugaaugaacugggcguccccuuucaccucgggaccaaacaggugugcaucgccugguccucuagcuccugucaugacggaaaggccuggcugcacguuugcaucacaggcgaugacaagaacgcuaccgccagcuucauuuacaauggccggcuuguggauucugucguguccuggagcaaagagauccugcgcacccaggaaucugagugugugugcauuaacgggacauguacggucguuaugaccgacggauccgcuagcggcaaggccgauacaaaaauccucuuuauugaggaagggaagaucgugcauaccuccacacugucuggaagcgcgcaacacguggaggaaugcuccugcuauccuagauaccccggcguccggugugugugccgcgacaacuggaaggggagcaauagaccuaucguugauauuaacaucaaagaccacucuauuguguccagcuacgucuguucuggacuugugggcgacacgccccggaagaaugauagcuccucuagcucccauugccuggacccgaacaaugaggaaggcgggcacggaguuaaaggcugggccuucgaugacgggaacgauguguggaugggacgcaccaucagcgagaagucuagacucggcuaugagacauuuaaagucauugaagggugguccaauccuaagagcaaacugcagaucaaccgccaggugaucgucgaccggggaaauagaucuggcuacuccggcauuuucagcguggaggggaaguccuguaucaaccggugcuuuuauguugaacugauuagaggacgcaaggaggaaaccgaggugcucuggaccucuaauagcaucgucguguucuguggcacauccgggaccuacggaacaggcucuuggcccgauggggcugacauuaaccugaugccuaucuga

SEQ ID NO: 213255 - RNA, 1410 nt, Artificial Sequence; identical to SEQ ID NO: 208671
  derived and/or modified CDS sequence (opt5) from neuraminidase__InfluenzaA__AER08659

SEQ ID NO: 213256 - RNA, 1410 nt, Artificial Sequence
  derived and/or modified CDS sequence (opt5) from neuraminidase__InfluenzaA__AER08661
augaaccccaaucagaagaucauuaccaucggcagcgugucccugacaauuucuacgaucugcuucuuuaugcaaauugccauccucaucaccacagucacccugcacuucaaacaguacgaguuuaacagcccuccgaauaaccagguuaugcuuugugaacccacaauuaucgagagaaauauuaccgaaaucguguaucugacaaacaccacgauugagaaggaaaucugcccuaaacucgcugaguaccggaauugguccaagccccagugugacauuaccggguucgccccuuuuucuaaagauaacagcauccgccuguccgcgggaggcgacaucugggugacaagagagcccuaugucucuugcgauccugacaaguguuaccaauucgcucuugggcagggaaccacacugaauaacgugcauagcaauaacaccguucgggaucgcacgccguauagaacacuccugaugaaugaacugggcgugcccuuucaccucgggaccaagcaggucugcauugccugguccucuagcuccugucaugacggaaaagccuggcugcacgugugcaucacaggcgaugacaagaacgcuaccgccagcuucauuuacaauggccggcuuguugauucuguggucuccuggagcaaagagauccugcgcacccaggaaucugagugugugugcauuaacgggacauguacgguggucaugaccgacggauccgcuagcggcaaggccgauacaaaaauccucuuuaucgaggaagggaagauuguucauaccuccacacugucuggaagcgcgcaacacguggaggaaugcuccugcuauccuagauaccccggcgugcggugugucugccgcgacaacuggaaggggagcaauagaccuaucguggauauuaacaucaaagaccacucuauuguuuccagcuacguguguucuggacuugucggcgacacgccccggaagaaugauagcuccucuagcucccauugccuggacccgaacaaugaggaaggcgaucacggggugaaaggaugggccuucgacgauggcaacgacguuuggauggggcgcaccaucaaugagacaagcagacucggauaugagaccuuuaaggugaucgaaggcuggucuaacccuaaauccaagcugcagauuaaucggcaggucaucguggaucgcgggaacagaagcggauacucuggcauuuucuccgucgagggcaaaagcuguaucaaucggugcuuuuauguggaacugauuagagggcgcaaggaggaaaccgagguucucuggacauccaacucuaucguggucuucuguggaaccagcggcacauacgggacgggauccuggcccgacggcgcugaucugaaucuuaugccuauuuga

SEQ ID NO: 213257 - RNA, 1410 nt, Artificial Sequence; identical to SEQ ID NO: 211590
  derived and/or modified CDS sequence (opt5) from neuraminidase__InfluenzaA__AER08663

SEQ ID NO: 213258 - RNA, 1410 nt, Artificial Sequence; identical to SEQ ID NO: 211590
  derived and/or modified CDS sequence (opt5) from neuraminidase__InfluenzaA__AER08665

SEQ ID NO: 213259 - RNA, 1410 nt, Artificial Sequence
  derived and/or modified CDS sequence (opt5) from neuraminidase__InfluenzaA__AER08669
augaaccccaaucagaagaucauuaccaucggcagcgugucccugacaauuucuacgaucugcuucuuuaugcaaauugccauccucaucaccacagucacccugcacuucaaacaguacgaguuuaacagcccuccgaauaaccagguuaugcuuugugaacccacaauuaucgagagaaauauuaccgaaaucguguaucugacaaacaccacgauugagaaggaaaucugcccuacccucgcugaguaccggaauugguccaaaccccagugugacauuacaggguucgccccuuuuucuaaggauaacagcauccgccuguccgcgggaggcgacaucugggugaccagagagcccuaugucucuugcgauccugacaaauguuaccaauucgcucuugggcagggaacaacccugaauaacgugcauagcaauaacacgguucgggaucgcacaccguauagaacccuccugaugaaugaacugggcgugcccuuucaccucgggacaaagcaggucugcauugccugguccucuagcuccugucaugacggaaaggccuggcugcacgugugcaucaccggcgaugacaaaaacgcuaccgccagcuucauuuacaauggccggcuuguugauucuguggucuccuggagcaaggagauccugcgcacacaggaaucugagugugugugcauuaacgggacguguaccguggucaugacagacggauccgcuagcggcaaagccgauaccaagauccucuuuaucgaggaagggaaaauuguucauacauccacccugucuggaagcgcgcaacacguggaggaaugcuccugcuauccuagauaccccggcgugcggugugucugccgcgacaacuggaaggggagcaauagaccuaucguggauauuaacaucaaggaccacucuauuguuuccagcuacguguguucuggacuugucggcgacacgccccggaaaaaugauagcuccucuagcucccauugccuggacccgaacaaugaggaaggcgggcacggagugaagggcugggccuucgaugacgggaacgauguuuggaugggacgcacaaucagcgagaccucuagacucggcuaugagaccuuuaaagugaucgaagggugguccaauccuaagagcaaacugcagauuaaccggcaggucaucguggaccgcggaaauagaucuggcuacuccggcauuuucagcgucgaggggaaguccuguaucaaccggugcuuuuauguggaacugauuagaggacgcaaagaggaaacagagguucucuggaccucuaauagcaucguggucuucuguggcacauccgggacguacggaaccggcucuuggcccgauggggcugaccugaaccuuaugccuauuuga

SEQ ID NO: 213260 - RNA, 1410 nt, Artificial Sequence
  derived and/or modified CDS sequence (opt5) from neuraminidase__InfluenzaA__AER08671
augaaccccaaucagaagaucauuaccaucggcagcgugucccugacaauuucuacgaucugcuucuuuaugcaaauugccauccucaucaccacagucacccugcacuucaaacaguacggguuuaacagcccuccgaauaaccagguuaugcuuugugagcccacaauuaucgaaagaaauauuaccgagaucguguaucugacaaacaccacgauugaaaaggagaucugcccuacccucgcugaauaccggaauugguccaaaccccagugugacauuacaggauucgccccuuuuucuaaggauaacagcauccgccuguccgcgggcggggacaucugggugaccagagagcccuaugucucuugcgauccugacaaauguuaccaauucgcucuuggacagggcacaacccugaauaacgugcauagcaauaacacgguucgggaucgcacaccguauagaacccuccugaugaaugagcugggggugcccuuucaccucggaacaaagcaggucugcauugccugguccucuagcuccugucaugacggcaaggccuggcugcacgugugcaucaccggcgaugacaaaaacgcuaccgccagcuucauuuacaaugggcggcuuguugauucuguggucuccuggagcaaggaaauccugcgcacacaggagucugaaugugugugcauuaacggaacguguaccguggucaugacagacggcuccgcuagcgggaaagccgauaccaagauccucuuuaucgaggagggaaaaauuguucauacauccacccugucuggcagcgcgcaacacguggaagagugcuccugcuauccuagauaccccggggugcggugugucugccgcgacaacuggaagggaagcaauagaccuaucguggauauuaacaucaaggaccacucuauuguuuccagcuacguguguucuggccuugucggcgacacgccccggaaaaaugauagcuccucuagcucccauugccuggacccgaacaaugaagaagggggacacggcgugaaggggugggccuucgaugacggaaacgauguuuggaugggccgcacaaucaaugagaccagcagacucggguaugagaccuuuaaagugaucgagggauggucuaacccuaaguccaaacugcagauuaaucggcaggucaucguggaccgcggcaacagaagcggcuacucugggauuuucuccgucgaaggaaagagcuguaucaaucggugcuuuuauguggagcugauuagaggccgcaaagaagagacagaaguucucuggaccuccaacucuaucguggucuucugugggacaagcggaacguacggcaccggguccuggcccgauggcgcugaccugaaucuuaugccuauuuga

SEQ ID NO: 213261 - RNA, 1410 nt, Artificial Sequence; identical to SEQ ID NO: 211590
  derived and/or modified CDS sequence (opt5) from neuraminidase__InfluenzaA__AER08673

SEQ ID NO: 213262 - RNA, 1410 nt, Artificial Sequence; identical to SEQ ID NO: 211590
  derived and/or modified CDS sequence (opt5) from neuraminidase__InfluenzaA__AER08675

SEQ ID NO: 213263 - RNA, 1410 nt, Artificial Sequence; identical to SEQ ID NO: 211590
  derived and/or modified CDS sequence (opt5) from neuraminidase__InfluenzaA__AER08677

SEQ ID NO: 213264 - RNA, 1410 nt, Artificial Sequence; identical to SEQ ID NO: 211590
  derived and/or modified CDS sequence (opt5) from neuraminidase__InfluenzaA__AER08679

SEQ ID NO: 213265 - RNA, 1410 nt, Artificial Sequence
  derived and/or modified CDS sequence (opt5) from neuraminidase__InfluenzaA__AER08681
augaaccccaaucagaagaucauuaccaucggcagcgugucccugacaauuucuacgaucugcuucuuuaugcaaauugccauccucaucaccacagucacccugcacuucaaacaguacgaguuuaacagcccuccgaauaaccagguuaugcuuugugaacccacaauuaucgagagaaauauuaccgaaaucguguaucugacaaacaccacgauugagaaggaaaucugcccuaaacucgcugaguaccggaauugguccaagccccagugugacauuaccggguucgccccuuuuucuaaagauaacagcauccgccuguccgcgggaggcgacaucugggugacaagagagcccuaugucucuugcgauccugacaaguguuaccaauucgcucuugggcagggaaccacacugaauaacgugcauagcaauaacaccguucgggaucgcacgccguauagaacacuccugaugaaugaacugggcgugcccuuucaccucgggaccaagcaggucugcauugccugguccagcagcuccugucaugacggaaaagccuggcugcacgugugcaucacaggcgaugacaagaacgcuaccgccagcuucauuuacaauggccggcuuguugauucuguggucuccuggagcaaagagauccugcgcacccaggaaucugagugugugugcauuaacgggacauguacgguggucaugaccgacggauccgcuagcggcaaggccgauacaaaaauccucuuuaucgaggaagggaagauuguucauaccuccacacugucuggaagcgcgcaacacguggaggaaugcuccugcuauccuagauaccccggcgugcggugugucugccgcgacaacuggaaggggagcaauagaccuaucguggauauuaacaucaaagaccacucuauuguuuccagcuacguguguucuggacuugucggcgacacgccccggaagaaugauagcuccucuagcucccauugccuggacccgaacgaugaggaaggcgggcacggagugaaaggcugggccuucgacgaugggaaugacguuuggaugggacgcaccaucaacgagacaagcagacucggcuaugagaccuuuaaggugaucgaaggguggucuaauccuaaauccaagcugcagauuaaccggcaggucaucguggauaaaggaaaucgcagcggcuacucuggcauuuucuccgucgaggggaagucuuguaucaacagaugcuuuuauguggaacugauucggggaagaaaggaggaaaccgagguucucuggacauccaauucuaucguggucuucuguggcaccagcgggacauacggaacgggcuccuggcccgacggggcugaucugaaccuuaugccuauuuga

SEQ ID NO: 213266 - RNA, 1410 nt, Artificial Sequence; identical to SEQ ID NO: 211590
  derived and/or modified CDS sequence (opt5) from neuraminidase__InfluenzaA__AER08683

SEQ ID NO: 213267 - RNA, 1410 nt, Artificial Sequence; identical to SEQ ID NO: 213215
  derived and/or modified CDS sequence (opt5) from neuraminidase__InfluenzaA__AER08685

SEQ ID NO: 213268 - RNA, 1410 nt, Artificial Sequence; identical to SEQ ID NO: 213215
  derived and/or modified CDS sequence (opt5) from neuraminidase__InfluenzaA__AER08687

SEQ ID NO: 213269 - RNA, 1410 nt, Artificial Sequence
  derived and/or modified CDS sequence (opt5) from neuraminidase__InfluenzaA__AER08689
augaaccccaaucagaagaucauuaccaucggcagcgugucccugacaauuucuacgaucugcuucuuuaugcaaauugccauccucaucaccacagucacccugcacuucaaacaguacgaguuuaacagcccuccgaauaaccagguuacacuuugugaacccaccauuaucgagagaaauauuacagaaaucguguaucugaccaacacgaccauugagaaggaaaucugcccuaaacucgcugaguaccggaauugguccaagccccagugugacauuacaggguucgccccuuuuucuaaagauaacagcauccgccuguccgcgggaggcgacaucugggugaccagagagcccuaugucucuugcgauccugacaaguguuaccaauucgcucuugggcagggaacaacccugaauaacgugcauagcaauaacacgguucgggaucgcacaccguauagaacccuccugaugaaugaacugggcgugcccuuucaccucgggacaaagcaggucugcauugccugguccucuagcuccugucaugacggaaaagccuggcugcacgugugcaucaccggcgaugacaagaacgcuaccgccagcuucauuuacaauggccggcuuguugauucuguggucuccuggagcaaagagauccugcgcacacaggaaucugagugugugugcauuaacgggacguguaccguggucaugacagacggauccgcuagcggcaaggccgauaccaaaauccucuuuaucgaggaagggaagauuguucauacauccacccugucuggaagcgcgcaacacguggaggaaugcuccugcuauccuagauaccccggcgugcggugugucugccgcgacaacuggaaggggagcaauagaccuaucguggauauuaacaucaaagaccacucuauuguuuccagcuacguguguucuggacuugucggcgacacgccccggaaggaugacagcuccucuagcucccauugccuggauccgaauaacgaggaaggcgggcacggagugaaaggcugggccuucgacgaugggaaugacguuuggaugggacgcacaaucaacgagaccagcagacucggcuaugagaccuuuaaggugaucgaaggguggucuaauccuaaauccaagcugcagauuaaccggcaggucaucguggaucgcggaaauagaagcggcuacucuggcauuuucuccgucgaggggaaaagcuguaucaaccggugcuuuuauguggaacugauuagaggacgcaaggaggaaacagagguucucuggaccuccaauucuaucguggucuucuguggcacaagcgggacguacggaaccggcuccuggcccgacggggcugaucugaaccuuaugccuauuuga

SEQ ID NO: 213270 - RNA, 1410 nt, Artificial Sequence; identical to SEQ ID NO: 213215
  derived and/or modified CDS sequence (opt5) from neuraminidase__InfluenzaA__AER08691

SEQ ID NO: 213271 - RNA, 1410 nt, Artificial Sequence
  derived and/or modified CDS sequence (opt5) from neuraminidase__InfluenzaA__AER08693
augaaccccaaucagaagaucauuaccaucggcagcgugucccugacaauuucuacgaucugcuucuuuaugcaaauugccauccucaucaccacagucacccugcacuucaaacaguacgaguuuaacagcccuccgaagaaucagguuaugcuuugugaacccacaauuaucgagagaaacauuaccgaaaucguguaucugacaaauaccacgauugagaaagaaaucugcccuaagcucgcugaguaccggaacugguccaaaccccagugugacauuaccggguucgccccuuuuucuaaggauaauagcauccgccuguccgcgggaggcgacaucugggugacaagagagcccuaugucucuugcgauccugacaaguguuaccaauucgcucuugggcagggaaccacacugaacaaugugcauagcaacaauaccguucgggaucgcacgccguauagaacacuccugaugaacgaacugggcgugcccuuucaccucgggaccaaacaggucugcauugccugguccagcagcuccugucaugacggaaaggccuggcugcacgugugcaucacaggcgaugacaaaaaugcuaccgccagcuucauuuacaacggcaaacuuguugauucuguggucuccuggagcaaggagauccugcggacccaggaaucugagugugugugcauuaaugggacauguacgguggucaugaccgacggauccgcuagcggcaaggccgauacaaagauccucuuuaucgaggaagggaaaauuguucauaccuccacacugucuggaagcgcgcaacacguggaggaaugcuccugcuauccucgcuaccccggcgugagaugugucugccgggacaacuggaaggggagcaaccgcccuaucguggauauuaauaucaaagaccacucuauuguuuccagcuacguguguucuggacuugucggcgacacccccagaaagaacgauagcuccucuagcucccauugccuggacccgaauaacgaggaaggcgggcacggagugaaaggcugggccuucgaugacgggaaugauguuuggaugggacggacgaucaacgagacaagccgccucggcuaugagaccuuuaaggugaucgaaggguggucuaauccuaaauccaagcugcagauuaacagacaggucaucguggaccggggaaaucgcagcggcuacucuggcauuuucuccgucgaggggaagucuuguaucaacagaugcuuuuauguggaacugauucggggaagaaaagaggaaaccgagguucucuggacauccaauucuaucguggucuucuguggcaccagcgggacauacggaacgggcuccuggcccgauggggcugaccugaaccuuaugccuauuuga

SEQ ID NO: 213272 - RNA, 1410 nt, Artificial Sequence
  derived and/or modified CDS sequence (opt5) from neuraminidase__InfluenzaA__AER08697
augaaccccaaucagaagaucauuaccaucggcagcgugucccugacaauuucuacgaucugcuucuuuaugcaaauugccauccucaucaccacagucacccugcacuucaaacaguacgaguuuaacagcccuccgaauaaccagguuaugcuuugugaacccacaauuaucgagagaaauauuaccgaaaucguguaucugacaaacaccacgauugagaaggaaaccugcccuacacucgcugaguaccggaauugguccaaaccccagugugacaucaccggguucgccccuuuuucuaaggauaacagcauucgccuguccgcgggaggcgacaucugggugacaagagagcccuaugucucuugcgauccugacaaauguuaccaauucgcucuugggcagggaaccacgcugaauaacgugcauagcaauaacacaguucgggaucgcaccccguauagaacacuccugaugaaugaacugggcgugcccuuucaccucgggaccaagcaggucugcaucgccugguccagcagcuccugucaugacggaaaggccuggcugcacgugugcauuaccggcgaugacaaaaacgcuacagccagcuucaucuacaauggccggcuuguugauucuguggucuccuggagcaaggagauucugcgcacgcaggaaucugagugugugugcaucaacgggaccuguacaguggucaugaccgacggauccgcuagcggcaaagccgauacaaagauucucuuuaucgaggaagggaaaaucguucauaccuccacgcugucuggaagcgcgcaacacguggaggaaugcuccugcuauccuagauaccccggcgugcggugugucugccgcgacaacuggaaggggagcaauagaccuauuguggauaucaacauuaaggaccacucuaucguuuccagcuacguguguucuggacuugucggcgacacaccccggaaaaaugauagcuccucuagcucccauugccuggacccgaacaaugaggaaggcgggcacggagugaagggcugggccuucgaugacgggaacgauguuuggaugggacgcaccauuaaugugaccagcagacucggcuaugagacauuuaaagucaucgagggguggucuaacccuaaguccaaacugcagaucaaucgccaggugauugucgaccggggaaacagaagcggcuacucuggcaucuucuccguggaagggaagucuuguauuaaucggugcuuuuauguugagcugaucagaggacgcaaagaagagaccgaagugcucuggacauccaacucuauugucguguucuguggcacgagcgggaccuacggaacaggcuccuggcccgauggggcugaccugaaucuuaugccuaucuga

SEQ ID NO: 213273 - RNA, 1410 nt, Artificial Sequence; identical to SEQ ID NO: 213069
  derived and/or modified CDS sequence (opt5) from neuraminidase__InfluenzaA__AER92714

SEQ ID NO: 213274 - RNA, 1410 nt, Artificial Sequence; identical to SEQ ID NO: 208810
  derived and/or modified CDS sequence (opt5) from neuraminidase__InfluenzaA__AER92721

SEQ ID NO: 213275 - RNA, 1410 nt, Artificial Sequence; identical to SEQ ID NO: 208810
  derived and/or modified CDS sequence (opt5) from neuraminidase__InfluenzaA__AER92724

SEQ ID NO: 213276 - RNA, 1413 nt, Artificial Sequence
  derived and/or modified CDS sequence (opt5) from neuraminidase__InfluenzaA__AET84165
augaaccccaaucagaagaucauuaccaucggcagcauuuccaucgccauugggaucaucucucugaugcuccaaauuggaaacaucauuagcaucugggcuucccacucuauucagacaggcagccagaauaacacggggaucugcaaucagagaauuaucaccuacgagaacuccacaugggugaaucauaccuaugucaacaucaauaacacaaauguuguggccggagaagacaaaaccucugugacacuggcgggcaacagcucccuuuguagcauuucugggugggcuaucuacaccaaggauaauuccauucggaucggaagcaaaggcgacgucuucgugauucgcgagccuuuuaucucuugcucccaccuggaauguagaacguucuuucucacccaaggcgcccugcuuaacgauaagcauagcaaugggacaguuaaagaccggucuccguaucgcgcccugauguccugcccccucggagaggcuccuagccccuacaacuccaaguucgaaucuguggccuggagcgcuuccgccugucacgauggcaugggguggcugaccaucggaauuagcggcccugacaacggggcggucgccgugcugaaguauaauggaaucauuacaggcaccaucaaaucuuggaagaaacagauucucagaacgcaggaguccgagugcguuuguaugaacggcagcugcuuuacaaucaugaccgaugggcccucuaauaaggcugccagcuacaaaaucuucaagauugaaaagggaaaagugacaaaguccaucgagcugucugcuccuaacuuuuauuacgaagaguguagcugcuacccggacaccggcauugucaugugugugugccgggauaauuggcauggguccaaccgccccugggugagcuucaaucagaaccuugacuaucaaaucggauacauuugcucuggcgucuuuggggauaauccuagacccgaggacggagaaggcuccuguaacccuguuaccaucgauggcgccaauggggugaaaggauucagcuauaaguacggcaacgggguguggauuggacggacaaaaucuaaucgccugagaaagggcuuugagaugaucugggaccccaacggguggacgaauaccgacuccgauuucagcgucaaacaggacgugguugcgaucacagauugguccggcuauucuggcagcuuugugcagcacccggaacucaccggacuggacugcauucggccuuguuucugggucgagcuugugcgcgggcugcccagagaaaacacaaccaucuggacguccggaucuagcauuuccuucugcggcguuaacagcgauacagccaauuggucuuggccugacggggcugagcuccccuuuaccaucgauaaguga

SEQ ID NO: 213277 - RNA, 1413 nt, Artificial Sequence; identical to SEQ ID NO: 211002
  derived and/or modified CDS sequence (opt5) from neuraminidase__InfluenzaA__AET84176

SEQ ID NO: 213278 - RNA, 1413 nt, Artificial Sequence
  derived and/or modified CDS sequence (opt5) from neuraminidase__InfluenzaA__AET84187
augaaccccaaucagaagaucauuaccaucggcagcauuuccaucgccauugggaucaucucucugaugcuccaaauuggaaacaucauuagcaucugggcuucccacucuauucagacaggcagccagaauaacacggggaucugcaaucagagaauuaucaccuacgagaacuccacaugggugaaucauaccuaugucaacaucaauaacacaaauguuguggccggagaagacaaaaccucugugacacuggcgggcaacagcucccuuuguagcauuucugggugggcuaucuacaccaaggauaauuccauucggaucggaagcaaaggcgacgucuucgugauucgcgagccuuuuaucucuugcucccaccuggaauguagaacguucuuucucacccaaggcgcccugcuuaacgauaagcauagcaaugggacaguuaaagaccggucuccguaucgcgcccugauguccugcccccucggagaggcuccuagccccuacaacuccaaguucgaaucuguggccuggagcgcuuccgccugucacgauggcauggacuggcugaccaucgggauuagcggaccugauaacggcgcggucgccgugcugaaguauaaugggaucauuacaggaaccaucaaaucuuggaagaaacagauucucagaacgcaggaguccgagugcguuuguaugaacggcagcugcuuuacaaucaugaccgacggccccucuaauaaggcugccagcuacaaaaucuucaagauugaaaaggggaaagugacaaaguccaucgagcugaacgcuccuaauuuuuauuacgaagaguguucuugcuacccggauaccggaauugucaugugugugugccgggacaacuggcauggcagcaaucgccccuggguguccuucaaccagaaucuugauuaucaaaucggguacauuugcagcggagucuuuggcgacaacccuagacccaaagauggggagggaucuuguaauccuguuaccaucgacggcgccaacggcgugaagggguucuccuauaaauacggaaauggcguguggauugggcggacaaagagcaaccgccugagaaaaggauuugaaaugaucugggaccccaauggcuggacgaacaccgauucugacuucuccgucaagcaggaugugguugcgaucacagacuggagcggguauuccggcucuuuugugcagcacccggagcucaccggacuggauugcauucggccuuguuucugggucgaacuugugcgcggccugcccagagagaacacaaccaucuggacgagcggguccucuauuagcuucugcggaguuaauuccgacacagccaacuggagcuggccugauggcgcugaacuccccuuuaccaucgacaaguga

SEQ ID NO: 213279 - RNA, 1413 nt, Artificial Sequence
  derived and/or modified CDS sequence (opt5) from neuraminidase__InfluenzaA__AET84198
augaaccccaaucagaagaucauuaccaucggcagcauuuccaucgccauugggaucaucucucugaugcuccaaauuggaaacaucauuagcaucugggcuucccacucuauucagacaggcagccagaauaacacggggaucugcaaucagagaauuaucaccuacgagaacuccacaugggugaaucauaccuaugucaacaucaauaacacaaauguuguggccggagaagacaaaaccucuaugacacuggcgggcaacagcucccuuuguagcauuucugggugggcuaucuacaccaaggauaauuccauucggaucggaagcaaaggcgacguguucgucauucgcgagccuuuuaucucuugcucccaccuggaauguagaacguucuuucucacccaaggcgcccugcuuaacgauaagcauagcaaugggacagugaaagaccggucuccguaucgcgcccugauguccugcccccucggagaggcuccuagccccuacaacuccaaguucgaaucuguugccuggagcgcuuccgccugucacgauggcaugggguggcugaccaucggaauuagcggcccugacaacggggcgguggccguccugaaguauaauggaaucauuacaggcaccaucaaaucuuggaagaaacagauucucagaacgcaggaguccgagugcguguguaugaacggcagcugcuuuacaaucaugaccgaugggcccucuaauaaggcugccagcuacaaaaucuucaagauugaaaagggaaaaguuacaaaguccaucgagcugaacgcuccuaauuuuuauuacgaagaguguucuugcuacccggacaccggcauugugaugugugucugccgggauaacuggcaugggagcaaucgccccuggguguccuucaaccagaaucuugacuaucaaaucggauacauuugcagcggcguguuuggggauaacccuagacccaaagacggagagggcucuuguaauccugucaccguugauggcgccaacggggugaagggauucuccuauaaauacggcaaugggguguggaucggacggacaaagagcaaccgccugagaaaaggcuuugaaaugauuugggaccccaauggguggacgaacaccgacucugauuucuccgucaagcaggacgugguugcgaucacagauuggagcggcuauuccggaucuuuugugcagcacccggagcucaccggccuggacugcauccggccuuguuucugggucgaacuugugcgcgggcugcccagagagaacacaaccauuuggacgagcggauccucuaucagcuucugcggcguuaauuccgauacagccaacuggagcuggccugacggggcugaacuccccuuuaccauugauaaguga

SEQ ID NO: 213280 - RNA, 1413 nt, Artificial Sequence
  derived and/or modified CDS sequence (opt5) from neuraminidase__InfluenzaA__AET84209
augaaccccaaucagaagaucauuaccaucggcagcauuuccaucgccauugggaucaucucucugaugcuccaaauuggaaacaucauuagcaucugggcuucccacucuauucagacaggcagccagaauaacacggggaucugcaaucagagaauuaucaccuacgagaacuccacaugggugaaucauaccuaugugaacaucaauaacacaaaaguuguggccggagaagacaagaccucugugacacuggcgggcaauagcucccuuuguagcauuucugggugggcuaucaacaccaaagauaauuccauucggaucggaagcaagggcgacgucuucgugauucgcgagccuuuuaucucuugcucccaccuggaauguagaacguucuuucucacccaaggcgcccugcuuaacgauaaacauagcaaugggacaguuaaggaccggucuccguaccgcgcccugauguccugcccccucggagaggcuccuagccccuauaacuccaaguucgaaucuguggccuggagcgcuuccgccugucacgauggcaugggguggcugaccaucggaauuagcggcccugacaacggggcggucgccgugcugaaauacaauggaaucauuacaggcaccaucaagucuuggaaaaagcagauucucagaacgcaggaguccgagugcguuuguaugaacggcagcugcuuuacaaucaugaccgaugggcccucuaauaaagcugccagcuauaagaucuucaagauugaaaaaggaaaggugacaaaauccaucgagcugaacgcuccuaauuuuuacuaugaagaguguucuugcuacccggacaccggcauugucaugugugugugccgggauaacuggcaugggagcaaucgccccuggguguccuucaaccagaaucuugacuaccaaaucggauauauuugcagcggcgucuuuggggauaacccuagacccaaggacggagagggcucuuguaauccuguuaccguggauggcgccaacggggugaaaggauucuccuacaaguauggcaauggggucuggaucggacggacaaaaagcaaccgccugagaaagggcuuugaaaugauuugggaccccaauggguggacgaacaccgacucugauuucuccgugaagcaggacguuguggcgaucacagauuggagcggcuacuccggaucuuuuguccagcacccggagcucaccggccuggacugcauccggccuuguuucuggguggaacuuguucgcgggcugcccagagagaacacaaccauuuggacgagcggauccucuaucagcuucugcggcgucaauuccgauacagccaacuggagcuggccugacggggcugaacuccccuuuaccauugauaaauga

SEQ ID NO: 213281 - RNA, 1413 nt, Artificial Sequence
  derived and/or modified CDS sequence (opt5) from neuraminidase__InfluenzaA__AET84231
augaaccccaaucagaagaucauuaccaucggcagcauuuccaucgccauugggaucaucucucugaugcuccaaauuggaagcaucauuuccaucugggcuucucacagcauucauacaggcucccagaacaauacggggaucugcaaccagagaauuaucaccuacgaaaauucuacaugggugaaccacaccuaugucaauaucaacaauacaaacguuguggccggagaggacaaaaccagcgugacacuggcgggcaauuccagccuuuguucuauuuccgggugggcuaucuacaccaaggauaacagcauucggaucggaucuaaaggcgacgucuucgugauucgcgagccuuuuaucuccugcagccaucuggaauguagaacguucuuucucacccagggcgcccugcuuaaugauaagcacucuaacgggacaguuaaagaccgguccccguaucgcgcccugaugagcugcccccucggagaggcuccuucccccuacaauucuaaguucgaaagcguggccugguccgcuagcgccugucaugauggcaugggguggcugaccaucggaauuucuggcccugacaacggggcggucgccgugcugaaguauaacggaaucauuacaggcaccaucaaauccuggaagaaacaaauucucagaacgcaggagagcgagugcguuuguaugaauggcucuugcuuuacaaucaugaccgaugggcccagcaacaaggcuuccucuuacaaaaucuucaagauugaaaagggaaaagugacaaagagcaucgagcugaaugccccuaacuuuuauuacgaagaguguuccugcuacccggacaccggcauugucaugugugugugccgggauaauuggcacgggagcaaccgccccugggugucuuucaaucagaaccuugacuaucagaucggauacauuugcuccggcgucuuuggggauaauccuagacccgaggacggagaaggcagcuguaacccuguuaccguggauggcgcuaauggggugaaaggauucucuuauaaguacggcaacggggucuggaucggacggacaaaauccaaucgccugagaaagggcuuugagaugauuugggaccccaacggguggacgaauaccgacagcgauuucuccgugaaacaagacguuguggccaucacagauuggucuggcuauagcggauccuuuguccagcacccggaacucaccggccuggacugcauccggccuuguuucuggguggagcuuguucgcgggcugcccagagaaaacacaaccauuuggacgucuggaagcuccaucagcuucugcggcgugaacucugauacagcgaauugguccuggccugacggggccgagcuccccuuuaccauugauaaguga

SEQ ID NO: 213282 - RNA, 1413 nt, Artificial Sequence; identical to SEQ ID NO: 209533
  derived and/or modified CDS sequence (opt5) from neuraminidase__InfluenzaA__AET84242

SEQ ID NO: 213283 - RNA, 1413 nt, Artificial Sequence
  derived and/or modified CDS sequence (opt5) from neuraminidase__InfluenzaA__AET84253
augaaccccaaucagaagaucauuaccaucggcagcauuuccaucgccauugggaucaucucucugaugcuccaaauuggaagcaucauuuccaucugggcuucucacagcauucagacaggcucccagaacaauacggggaucugcaaccagagaauuaucaccuacgaaaauucuacaugggugaaccauaccuaugucaauaucaacaauacaaacguuguggccggagaggacaaaaccagcgugacacuggcgggcaauuccagccuuuguucuauuuccgggugggcuaucuacaccaaggauaacagcauucggaucggaucuaaaggcgacgucuucgugauucgcgagccuuuuaucuccugcagccaccuggaauguagaacguucuuucucacccaaggcgcccugcuuaaugauaagcauucuaacgggacaguuaaagaccgguccccguaucgcgcccugaugagcugcccccucggagaggcuccuucccccuacaauucuaaguucgaaagcguggccugguccgcuagcgccugucacgauggcaugggguggcugaccaucggaauuucuggcccugacaacggggcggucgccgugcugaaguauaacggaaucauuacagagaccaucaaauccuggaagaaacagauucucagaacgcaggagagcgaaugcguuuguaugaauggcucuugcuuuacaaucaugaccgauggccccagcaacaaggcugccuccuacaaaaucuucaagauugagaaggggaaagugacaaagucuaucgaacugaaugcuccuaacuuuuauuacgaggaguguagcugcuacccggacaccggaauugucaugugugugugccgggauaauuggcauggcuccaaccgccccugggugagcuucaaucagaaccuugacuaucaaaucggguacauuugcucuggagucuuuggcgauaauccuagacccgaagacggggagggauccuguaacccuguuaccguggauggcgccaauggcgugaaaggguucagcuauaaguacggaaacggcgucuggaucgggcggacaaaaucuaaucgccugagaaagggauuugaaaugauuugggaccccaacggcuggacgaauaccgacuccgauuucagcgugaaacaggacguuguggcgaucacagauugguccggguauucuggcagcuuuguccagcacccggagcucaccggacuggacugcauccggccuuguuucuggguggaacuuguucgcggccugcccagagagaacacaaccauuuggacguccgggucuagcaucuccuucugcggagugaacagcgauacagccaauuggucuuggccugacggcgcugagcuccccuuuaccauugauaaguga

SEQ ID NO: 213284 - RNA, 1413 nt, Artificial Sequence
  derived and/or modified CDS sequence (opt5) from neuraminidase__InfluenzaA__AET84264
augaaccccaaucagaagaucauuaccaucggcagcauuuccaucgccauugggaucaucucucugauguuccaaauuggaagcaucauuuccaucugggcuucucacagcauucagacaggcucccagaacaauacggggaucugcaaccagagaauuaucaccuacgaaaauucuacaugggugaaccauaccuaugucaauaucaacaauacaaacguuguggccggagaggacaaaaccagcgugacacucgcgggcaauuccagccuguguucuauuuccgggugggcuaucuacaccaaggauaacagcauucggaucggaucuaaaggcgacgucuuugugauucgcgagccuuucaucuccugcagccaccuugaauguagaacguuuuuccugacccaaggcgcccuccugaaugauaagcauucuaacgggacaguuaaagaccgguccccguaucgcgcccuuaugagcugcccccugggagaggcuccuucccccuacaauucuaaguuugaaagcguggccugguccgcuagcgccugucacgauggcaugggguggcucaccaucggaauuucuggcccugacaacggggcggucgccgugcugaaguauaacggaaucauuacagagaccaucaaauccuggaagaaacagauucugagaacgcaggagagcgaaugcguuuguaugaauggcucuugcuucacaaucaugaccgauggccccagcaacaaggcugccuccuacaaaaucuuuaagauugagaaggggaaagugacaaagucuaucgaacucaaugcuccuaacuucuauuacgaggaguguagcugcuacccggacaccggaauugucaugugugugugccgggauaauuggcauggcuccaaccgccccugggugagcuuuaaucagaaccuggacuaucaaaucggguacauuugcucuggagucuucggcgauaauccuagacccgaagacggggagggauccuguaacccuguuaccguggauggcgccaauggcgugaaaggguuuagcuauaaguacggaaacggcgucuggaucgggcggacaaaaucuaaucgccuuagaaagggauucgaaaugauuugggaccccaacggcuggacgaauaccgacuccgauuuuagcgugaaacaggacguuguggcgaucacagauugguccggguauucuggcagcuucguccagcacccggagcugaccggacucgacugcauccggccuuguuucuggguggaacugguucgcggccuucccagagagaacacaaccauuuggacguccgggucuagcaucuccuuuugcggagugaacagcgauacagccaauuggucuuggccugacggcgcugagcugcccuucaccauugauaaguga

SEQ ID NO: 213285 - RNA, 1413 nt, Artificial Sequence
  derived and/or modified CDS sequence (opt5) from neuraminidase__InfluenzaA__AET84275
augaaccccaaucagaagaucauuaccaucggcagcauuuccaucgccauugggaucaucucucugaugcuccaaauuggaaacaucauuagcaucugggcuucccacucuauucagacaggcagccagaauaacacggggaucugcaaucagagaauuaucaccuacgagaacuccacaugggugaaucauaccuaugugaacaucaauaacacaaauguuguggccggagaagacaaaaccucugugacacuggcgggcaacagcucccuuuguagcauuucugggugggcuaucuacaccaaggauaauuccauucggaucggaagcaaaggcgacgucuucgugauucgcgagccuuuuaucucuugcucccaccuggaauguagaacguucuuucucacccaaggcgcccugcuuaacgauaagcauagcaaugggacaguuaaagaccggucuccguaucgcgcccugauguccugcccccucggagaggcuccuagccccuacaacuccaaguucgaaucuguggccuggagcgcuuccgccugucacgauggcaugggguggcugaccaucggaauuagcggcccugacaacggggcggucgccgugcugaaguauaauggaaucauuacaggcaccaucaaaucuuggaagaaacagauucucagaacgcaggaguccgagugcguuuguaugaacggcagcugcuuuacaaucaugaccgaugggcccucuaauaaggcugccagcuacaaaaucuucaagauugaaaagggaaaagugacaaaguccaucgagcugaacgcuccuaauuuuuauuacgaagaguguucuugcuacccggacaccggcauugucaugugugugugccgggauaacuggcaugggagcaaucgccccuggguguccuucaaccagaaucuugacuaucaaaucggauacauuugcagcggcgucuuuggggauaacccuagacccaaagacggagagggcucuuguaauccuguuaccguggauggcgccaacggggugaagggauucuccuauaaauacggcaauggggucuggaucggacggacaaagagcaaccgccugagaaaaggcuuugaaaugauuugggaccccaauggguggacgaacaccgacucugauuucuccgugaagcaggacguuguggcgaucacagauuggagcggcuauuccggaucuuuuguccagcacccggagcucaccggccuggacugcauccggccuuguuucuggguggaacuuguucgcgggcugcccagagagaacacaaccauuuggacgagcggauccucuaucagcuucugcggcgucaauuccgauacagccaacuggagcuggccugacggggcugaacuccccuuuaccauugauaaguga

SEQ ID NO: 213286 - RNA, 1413 nt, Artificial Sequence; identical to SEQ ID NO: 209533
  derived and/or modified CDS sequence (opt5) from neuraminidase__InfluenzaA__AET84286

SEQ ID NO: 213287 - RNA, 1413 nt, Artificial Sequence
  derived and/or modified CDS sequence (opt5) from neuraminidase__InfluenzaA__AET84297
augaaccccaaucagaagaucauuaccaucggcagcauuuccaucgccauugggaucaucucucugaugcuccaaauuggaaacaucauuagcaucugggcuucccacucuauucagacaggcagccagaauaacacggggaucugcaaucagagaauuaucaccuacgagaacuccacaugggugaaucauaccuaugugaacaucaauaacacaaauguuguggccggagaagacaaaaccucugugacacuggcgggcaacagcucccuuuguagcauuucugggugggcuaucuacaccaaggauaauuccauucggaucggaagcaaaggcgacgucuucgugauucgcgagccuuuuaucucuugcucccaccuggaauguagaacguucuuucucacccaaggcgcccugcuuaacgauaagcauagcaaugggacaguuaaagaccggucuccguaucgcgcccugauguccugcccccucggagaggcuccuagccccuacaacuccaaguucgaaucuguggccuggagcgcuuccgccugucacgauggcaugggguggcugaccaucggaauuagcggcccugacaacggggcggucgccgugcugaaguauaauggaaucauuacaggcaccaucaaaucuuggaagaaacagauucucagaacgcaggaguccgagugcguuuguaugaacggcagcugcuuuacaaucaugaccgaugggcccucuaauaaggcugccagcuacaaaaucuucaagauugaaaagggaaaagugacaaaguccaucgagcugaacgcuccuaauuuuuauuacgaagaguguucuugcuacccggacaccggcauugucaugugugugugccgggauaacuggcaugggagcaaucgccccuggguguccuucaaccagaaucuugacuaucaaaucggauacauuugcagcggcgucuuuggggauaacccuagacccgaggacggagaaggcucuuguaauccuguuaccguggauggcgccaacggggugaaaggauucuccuauaaguacgacaauggcgucuggaucgggcggacaaaaagcaaccgccugagaaagggauuugagaugauuugggaccccaauggcuggacgaacaccgauucugacuucuccgugaaacaggauguuguggcgaucacagacuggagcggguauuccggcucuuuuguccagcacccggaacucaccggacuggauugcauccggccuuguuucuggguggagcuuguucgcggccugcccagagaaaacacaaccauuuggacgagcggguccucuaucagcuucugcggagucaauuccgacacaaccaacuggagcuggccugauggcgccgagcuccccuuuaccauugacaaguga

SEQ ID NO: 213288 - RNA, 1413 nt, Artificial Sequence
  derived and/or modified CDS sequence (opt5) from neuraminidase__InfluenzaA__AET84308
augaaccccaaucagaagaucauuaccaucggcagcauuuccaucgccauugggaucaucucucugaugcuccaaauuggaaacaucauuagcaucugggcuucccacucuauucagacaggcagccagaauaacacggggaucugcaaucagagaauuaucaccuacgagaacuccacaugggugaaucauaccuaugugaacaucaauaacacaaauguuguggccggagaagacaaaaccucugugacacuggcgggcaacagcucccuuuguagcauuucugggugggcuaucuacaccaaggauaauuccauucggaucggaagcaaaggcgacgucuucgugauucgcgagccuuuuaucucuugcucccaccuggaauguagaacguucuuucucacccaaggcgcccugcuuaacgauaagcauagcaaugggacaguuaaagaccggucuccguaucgcgcccugauguccugcccccucggagaggcuccuagccccuacaacuccaaguucgaaucuguggccuggagcgcuuccgccugucacgauggcaugggguggcugaccaucggaauuagcggcccugacaacggggcggucgccgugcugaaguauaauggaaucauuacagagaccaucaaaucuuggaagaaacagauucucagaacgcaggaguccgaaugcguuuguaugaacggcagcugcuuuacaaucaugaccgauggccccucuaauaaggcugccagcuacaaaaucuucaagauugagaaggggaaagugacaaaguccaucgaacugaacgcuccuaauuuucauuaugaggaguguucuugcuacccggacaccggaauugucaugugugugugccgggauaacuggcacggcagcaaucgccccuggguguccuucaaccagaaucuugacuaccaaaucggguauauuugcagcggagucuuuggcgauaacccuagacccgaagacggggagggaucuuguaauccuguuaccguggauggcgccaacggcgugaaaggguucuccuacaaguaugacaauggagucuggaucggccggacaaaaagcaaccgccugagaaagggguuugaaaugauuugggaccccaauggauggacgaacaccgauucugacuucuccgugaaacaggauguuguggcgaucacagacuggagcggcuacuccgggucuuuuguccagcacccggagcucaccggccuggauugcauccggccuuguuucuggguggaacuuguucgcggacugcccagagagaacacaaccauuuggacgagcggcuccucuaucagcuucugcggggucaauuccgacacaaccaacuggagcuggccugauggagccgagcuccccuuuaccauugacaaguga

SEQ ID NO: 213289 - RNA, 1413 nt, Artificial Sequence
  derived and/or modified CDS sequence (opt5) from neuraminidase__InfluenzaA__AET84319
augaaccccaaucagaagaucauuaccaucggcagcauuuccaucgccauugggaucaucucucugaugcuccaaauuggaaacaucauuagcaucugggcuucccacucuauucagacaggcagccagaauaacacggggaucugcaaucagagaauuaucaccuacgagaacuccacaugggugaaucauaccuaugucaacaucaauaacacaaauguuguggccggagaagacaaaaccucuaugacacuggcgggcaacagcucccuuuguagcauuucugggugggcuaucuacaccaaggauaauuccauucggaucggaagcaaaggcgacguguucgucauucgcgagccuuuuaucucuugcucccaccuggaauguagaacguucuuucucacccaaggcgcccugcuuaacgauaagcauagcaaucggacagugaaagaccgcucuccguauagagcccugauguccugcccccucggggaggcuccuagccccuacaacuccaaguucgaaucuguugccuggagcgcuuccgccugucacgauggaaugggcuggcugaccaucgggauuagcggaccugacaacggcgcgguggccguccugaaguauaaugggaucauuacagagaccaucaaaucuuggaagaaacagauucuccggacgcaggaguccgaaugcguguguaugaacggaagcugcuuuacaaucaugaccgauggccccucuaauaaggcugccagcuacaaaaucuucaagauugagaagggcaaaguuacaaaguccaucgaacugaacgcuccuaauuuuuauuacgaggaguguucuugcuacccggacaccgggauugugaugugugucugccgcgauaacuggcauggaagcaauagacccuggguguccuucaaccagaaucuugacuaucaaaucggcuacauuugcagcgggguguuuggagauaacccucggcccgaagacggcgaggggucuuguaauccugucaccguugauggagccaacggcgugaaaggcuucuccuauaaguacgggaauggaguguggaucggccgcacaaaaagcaacagacugcggaagggguuugaaaugauuugggaccccaauggauggacgaacaccgacucugauuucuccgucaaacaggacgugguugcgaucacagauuggagcggcuauuccgggucuuuugugcagcacccggagcucaccggccuggacugcauccgcccuuguuucugggucgaacuugugagaggacugccccgggagaacacaaccauuuggacgagcggcuccucuaucagcuucugcgggguuaauuccgauacagccaacuggagcuggccugacggagcugagcuccccuuuaccauugauaaguga

SEQ ID NO: 213290 - RNA, 1413 nt, Artificial Sequence
  derived and/or modified CDS sequence (opt5) from neuraminidase__InfluenzaA__AET84330
augaaccccaaucagagaaucauuaccaucggcagcauuuccaucgccauugggaucaucucucugaugcuccaaauuggaaacaucauuagcaucugggcuucccacucuauucagaucggcagccagaauaacacagggauuugcaaucagcggaucaucacguacgagaacuccaccugggugaaucauacauaugucaacauuaauaacaccaauguuguggccggagaagacaagacaucugugacccuggcgggcaacagcucccuuuguagcaucucugggugggcuauuuacacaaaagauaauuccauccgcauuggaagcaagggcgacgucuucgugaucagagagccuuuuaucucuugcucccaccuggaaugucggaccuucuuucucacgcaaggcgcccugcuuaacgauaaacauagcaaugggaccgccaaggaccgcucuccguauagagcucugauguccugcccccucggagaggccccuagccccuacaacuccaaauucgaaucuguugcuuggagcgccuccgcgugucacgauggcaugggguggcugacaauuggaaucagcggcccugacaacggggccguggcuguccugaaguauaauggaauuaucaccggcacaauuaagucuuggaaaaagcagauccuccggacccaggaguccgagugcguguguaugaacggcagcugcuuuacgaucaugacagaugggcccucuaauaaagccgcuagcuacaagauuuucaaaaucgaaaagggaaagguuaccaaauccauugagcugaacgccccuaauuuuuauuacgaagaguguucuugcuacccggacacaggcaucgugaugugugucugccgcgauaacuggcaugggagcaauagacccuggguguccuucaaccagaaucuugacuaucaaauuggauacaucugcagcggcguguuuggggauaacccucggcccaaggacggagagggcucuuguaauccugucaccguugauggcgcgaacggggugaaaggauucuccuauaaguacggcaaugggguguggauuggacgcaccaaaagcaacagacugcggaagggcuuugaaaugaucugggaccccaauggguggacaaacacggacucugauuucuccgucaaacaggacgugguugccaucaccgauuggagcggcuauuccggaucuuuugugcagcacccggagcucacaggccuggacugcauucgcccuuguuucugggucgaacuugugagagggcugccccgggagaacaccacaaucuggaccagcggauccucuauuagcuucugcggcguuaauuccgauacggcuaacuggagcuggccugacggggccgaacuccccuuuacaaucgauaaguga

SEQ ID NO: 213291 - RNA, 1413 nt, Artificial Sequence
  derived and/or modified CDS sequence (opt5) from neuraminidase__InfluenzaA__AET84341
augaaccccaaucagagaaucauuaccaucggcagcauuuccaucgccauugggaucaucucucugaugcuccaaauuggaaacaucauuagcaucugggcuucccacucuauucagaucggcagccagaauaacacagggauuugcaaucagcggaucaucacguacgagaacuccaccugggugaaucauacauaugucaacauuaauaacaccaauguuguggccggagaagacaagacaucugugacccuggcgggcaacagcucccuuuguagcaucucugggugggcuauuuacacaaaagauaauuccauccgcauuggaagcaagggcgacgucuucgugaucagagagccuuuuaucucuugcucccaccuggaaugucggaccuucuuucucacgcaaggcgcccugcuuaacgauaaacauagcaaugggaccgccaaggaccgcucuccguauagagcucugauguccugcccccucggagaggccccuagccccuacaacuccaaauucgaaucuguugcuuggagcgccuccgcgugucacgauggcaugggguggcugacaauuggaaucagcggcccugacaacggggccguggcuguccugaaguauaauggaauuaucaccggcacaauuaagucuuggaaaaagcagauccuccggacccaggaguccgagugcguguguaugaacggcagcugcuuuacgaucaugacagaugggcccucuaauaaagccgcuagcuacaagauuuucaaaaucgaaaagggaaagguuaccaaauccauugagcugaacgccccuaauuuuuauuacgaagaguguucuugcuacccggacacaggcaucgugaugugugucugccgcgauaacuggcaugggagcaauagacccuggguguccuucaaccagaaucuugacuaucaaauuggauacaucugcagcggcguguuuggggauaacccucggcccaaggacggagagggcucuuguaauccugucaccguugauggcgcgaacggggugaaaggauucuccuauaaguacggcaaugggguguggauuggacgcaccaaaagcaacagacugcggaagggcuuugaaaugaucugggaccccaauggguggacaaacacggacucugauuucuccgucaaacaggacgugguugccaucaccgauuggagcggcuauuccggaucuuuugugcagcacccggagcucacaggccuggacugcauucgcccuuguuucugggucgaacuugugagagggcugcccaaggagaacaccacaaucuggaccagcggauccucuauuagcuucugcggcguuaauuccgauacggcuaacuggagcuggccugacggggccgaacuccccuuuacaaucgauaaguga

SEQ ID NO: 213292 - RNA, 1413 nt, Artificial Sequence
  derived and/or modified CDS sequence (opt5) from neuraminidase__InfluenzaA__AET84363
augaaccccaaucagagaaucauuaccaucggcagcauuuccaucgccauugggaucaucucucugaugcuccaaauuggaaacaucauuagcaucugggcuucccacucuauucagacaggcagccagaauaacacggggaucugcaaucagcggauuaucaccuacgagaacuccacaugggugaaucauaccuaugugaacaucaauaacacaaauguuguggccggagaagacaagaccucuaugacacuggcgggcaacagcucccuuuguagcauuucugggugggcuaucuacaccaaagauaauuccauucgcaucggaagcaagggcgacguguucgucauuagagagccuuuuaucucuugcucccaccuggaaugucggacguucuuucucacccaaggcgcccugcuuaacgauaaacauagcaaugggacagccaaggaccgcucuccguauagagcucugauguccugcccccucggagaggccccuagccccuacaacuccaaauucgaaucuguggcuuggagcgccuccgcgugucacgauggcaugggguggcugaccaucggaauuagcggcccugacaacggggccguugcugugcugaaguauaauggaaucauuacaggcaccaucaagucuuggaaaaagcagauucuccggacgcaggaguccgagugcgucuguaugaacggcagcugcuuuacaaucaugaccgaugggcccucuaauaaagccgcuagcuacaagaucuucaaaauugaaaagggaaaggugacaaaauccaucgagcugaacgccccuaauuuuuauuacgaagaguguucuugcuacccggacaccggcauuguuaugugugugugccgcgauaacuggcaugggagcaauagacccugggucuccuucaaccagaaucuugacuaucaaaucggauacauuugcagcggcguguuuggggauaacccucggcccaaggacggagagggcucuuguaauccugugaccgucgauggcgcgaacgggguuaaaggauucuccuauaaguacggcaaugggguguggaucggacgcacaaaaagcaacagacugcggaagggcuuugaaaugauuugggaccccaauggguggacgaacaccgacucugauuucuccgugaaacaggacgucguggccaucacagauuggagcggcuauuccggaucuuuuguucagcacccggagcucaccggccuggacugcauccgcccuuguuucuggguggaacuugucagagggcugccccgggagaacacaaccauuuggacgagcggauccucuaucagcuucugcggcgucaauuccgauacagcuaacuggagcuggccugacggggccgaacuccccuuuaccauugauaaguga

SEQ ID NO: 213293 - RNA, 1413 nt, Artificial Sequence
  derived and/or modified CDS sequence (opt5) from neuraminidase__InfluenzaA__AET84374
augaaccccaaucagagaaucauuaccaucggcagcauuuccaucgccauugggaucaucucucugaugcuccaaauuggaaacaucauuagcaucugggcuucccacucuauucagaucggcagccagaauaacacagggauuugcaaucagcggaucaucacguacgagaacuccaccugggugaaucauacauaugucaacauuaauaacaccaauguuguggccggagaagacaagacaucugugacccuggcgggcaacagcucccuuuguagcaucucugggugggcuauuuacacaaaagauaauuccauccgcauuggaagcaagggcgacgucuucgugaucagagagccuuuuaucucuugcucccaccuggaaugucggaccuucuuucucacgcaaggcgcccugcuuaacgauaaacauagcaaugggaccgccaaggaccgcucuccguauagagcucugauguccugcccccucggagaggccccuagccccuacaacuccaaauucgaaucuguugcuuggagcgccuccgcgugucacgauggcaugggguggcugacaauuggaaucagcggcccugacaacggggccguggcuguccugaaguauaauggaauuaucaccgagacaauuaagucuuggaaaaagcagauccuccggacccaggaguccgaaugcguguguaugaacggcagcugcuuuacgaucaugacagauggccccucuaauaaagccgcuagcuacaagauuuucaaaaucgagaaggggaagguuaccaaauccauugaacugaacgccccuaauuuuuauuacgaggaguguucuugcuacccggacacaggaaucgugaugugugucugccgcgauaacuggcauggcagcaauagacccuggguguccuucaaccagaaucuugacuaucaaauuggguacaucugcagcggaguguuuggcgauaacccucggcccaaggacggggaaggaucuuguaauccugucaccguugauggcgcgaacggcgugaaaggguucuccuauaaguacggaaauggcguguggauugggcgcaccaaaagcaacagacugcggaagggauuugagaugaucugggaccccaauggcuggacaaacacggacucugauuucuccgucaaacaggacgugguugccaucaccgauuggagcggguauuccggcucuuuugugcagcacccggaacucacaggacuggacugcauucgcccuuguuucugggucgagcuugugagaggccugccccgggaaaacaccacaaucuggaccagcggguccucuauuagcuucugcggaguuaauuccgauacggcuaacuggagcuggccugacggcgccgagcuccccuuuacaaucgauaaguga

SEQ ID NO: 213294 - RNA, 1413 nt, Artificial Sequence
  derived and/or modified CDS sequence (opt5) from neuraminidase__InfluenzaA__AET84396
augaaccccaaucagagaaucauuaccaucggcagcauuuccaucgccauugggaucaucucucugaugcuccaaauuggaaacaucauuagcaucugggcuucccacucuauucagacaggcagccagaauaacacggggaucugcaaucagcggauuaucaccuacgagaacuccacaugggugaaucauaccuaugugaacaucaauaacacaaauguuguggccggagaagacaagaccucuaugacacuggcgggcaacagcucccuuuguagcauuucugggugggcuaucuacaccaaagauaauuccauucgcaucggaagcaagggcgacguguucgucauuagagagccuuuuaucucuugcucccaccuggaaugucggacguucuuucucacccaaggcgcccugcuuaacgauaaacauagcaaugggacagccaaggaccgcucuccguauagagcucugauguccugcccccucggagaggccccuagccccuacaacuccaaauucgaaucuguggcuuggagcgccuccgcgugucacgauggcaugggguggcugaccaucggaauuagcggcccugacaacggggccguugcugugcugaaguauaauggaaucauuacagagaccaucaagucuuggaaaaagcagauucuccggacgcaggaguccgaaugcgucuguaugaacggcagcugcuuuacaaucaugaccgauggccccucuaauaaagccgcuagcuacaagaucuucaaaauugagaaggggaaggugacaaaauccaucgaacugaacgccccuaauuuuuauuacgaggaguguucuugcuacccggacaccggaauuguuaugugugugugccgcgauaacuggcauggcagcaauagacccugggucuccuucaaccagaaucuugacuaucaaaucggguacauuugcagcggaguguuuggcgauaacccucggcccaaggacggggaaggaucuuguaauccugugaccgucgauggcgcgaacggcguuaaaggguucuccuauaaguacggaaauggcguguggaucgggcgcacaaaaagcaacagacugcggaagggauuugagaugauuugggaccccaauggcuggacgaacaccgacucugauuucuccgugaaacaggacgucguggccaucacagauuggagcggguauuccggcucuuuuguucagcacccggaacucaccggacuggacugcauccgcccuuguuucuggguggagcuugucagaggccugccccgggaaaacacaaccauuuggacgagcggguccucuaucagcuucugcggagucaauuccgauacagcuaacuggagcuggccugacggcgccgagcuccccuuuaccauugauaaguga

SEQ ID NO: 213295 - RNA, 1413 nt, Artificial Sequence
  derived and/or modified CDS sequence (opt5) from neuraminidase__InfluenzaA__AET84407
augaaccccaaucagagaaucauuaccaucggcagcauuuccaucgccauugggaucaucucucugaugcuccaaauuggaaacaucauuagcaucugggcuucccacucuauucagaucggcagccagaauaacacagggauuugcaaucagcggaucaucacguacgagaacuccaccugggugaaucauacauaugucaacauuaauaacaccaauguuguggccggagaagacaagacaucugugacccuggcgggcaacagcucccuuuguagcaucucugggugggcuauuuacacaaaagauaauuccauccgcauuggaagcaagggcgacgucuucgugaucagagagccuuuuaucucuugcucccaccuggaaugucggaccuucuuucucacgcaaggcgcccugcuuaacgauaaacauagcaaugggaccgccaaggaccgcucuccguauagagcucugauguccugcccccucggagaggccccuagccccuacaacuccaaauucgaaucuguugcuuggagcgccuccgcgugucacgauggcaugggguggcugacaauuggaaucagcggcccugacaacggggccguggcuguccugaaguauaauggaauuaucaccggcacaauuaagucuuggaaaaagcagauccuccggacccaggaguccgagugcguguguaugaacggcagcugcuuuacgaucaugacagaugggcccucuaauaaagccgcuagcuacaagauuuucaaaaucgaaaagggaaagguuaccaaauccauugagcugaacgccccuaauuuuuauuacgaagaguguucuugcuacccggacacaggcaucgugaugugugucugccgcgauaacuggcaugggagcaauagacccuggguguccuucaaccagaaucuugacuaucaaauuggauacaucugcagcggcguguuuggggauaacccucggcccgaggacggagaaggcucuuguaauccugucaccguugauggcgcgaacggggugaagggauucuccuauaaauacggcaaugggguguggauuggacgcaccaagagcaacagacugcggaaaggcuuugagaugaucugggaccccaauggguggacaaacacggacucugauuucuccgucaagcaggacgugguugccaucaccgauuggagcggcuauuccggaucuuuugugcagcacccggaacucacaggccuggacugcauucgcccuuguuucugggucgagcuugugagagggcugccccgggaaaacaccacaaucuggaccagcggauccucuauuagcuucugcggcguuaauuccgauacggcuaacuggagcuggccugacggggccgagcuccccuuuacaaucgauaaauga

SEQ ID NO: 213296 - RNA, 1413 nt, Artificial Sequence
  derived and/or modified CDS sequence (opt5) from neuraminidase__InfluenzaA__AET84418
augaaccccaaucagagaaucauugccaucggcagcauuuccaucgcuauugggaucaucucucugaugcuccaaauuggaaacaucauuagcaucugggccucccacucuauucagaucggcagccagaauaacaccgggauuugcaaucagcggaucaucacauacgagaacuccacgugggugaaucauaccuaugucaacauuaauaacacaaauguuguggcgggagaagacaagaccucugugacacuggcuggcaacagcucccuuuguagcaucucugggugggccauuuacaccaaagauaauuccauccgcauuggaagcaagggcgacgucuucgugaucagagagccuuuuaucucuugcucccaccuggaaugucggacauucuuucucacccaaggcgcccugcuuaacgauaaacauagcaaugggacggcuaaggaccgcucuccguauagagcccugauguccugcccccucggagaggcuccuagccccuacaacuccaaauucgaaucuguugccuggagcgcguccgccugucacgauggcaugggguggcugaccauuggaaucagcggcccugacaacggggcuguggccguccugaaguauaauggaauuaucacagagaccauuaagucuuggaaaaagcagauccuccggacacaggaguccgaaugcguguguaugaacggcagcugcuuuaccaucaugacggauggccccucuaauaaagcugccagcuacaagauuuucaaaaucgagaaggggaagguuacaaaauccauugaacugaacgcgccuaauuuuuauuacgaggaguguucuugcuacccggacaccggaaucgugaugugugucugccgcgauaacuggcauggcagcaauagacccuggguguccuucaaccagaaucuugacuaucaaauuggguacaucugcagcggaguguuuggcgauaacccucggcccgaagacggggagggaucuuguaauccugucacaguugauggcgccaacggcgugaagggguucuccuauaaauacggaaauggcguguggauugggcgcaccaagagcaacagacugcggaaaggauuugaaaugaucugggaccccaauggcuggaccaacacagacucugauuucuccgucaagcaggacgugguugcuaucacggauuggagcggguauuccggcucuuuugugcagcacccggagcucaccggacuggacugcauucgcccuuguuucugggucgaacuugugagaggccugccccgggagaacacaaccaucuggacaagcggguccucuauuagcuucugcggaguuaauuccgauaccgccaacuggagcuggccugacggcgcugagcuccccuuuacgaucgauaaauga

SEQ ID NO: 213297 - RNA, 1413 nt, Artificial Sequence
  derived and/or modified CDS sequence (opt5) from neuraminidase__InfluenzaA__AET84429
augaaccccaaucagaagaucauuaccaucggcagcauuuccaucgccauugggaucaucucucugaugcuccaaauuggaaacaucauuagcaucugggcuucccacucuauucagacaggcagccagaauaacacggggaucugcaaucagagaauuaucaccuacgagaacuccacaugggugaaucauaccuaugucucuaucaacaauacaaacguuguggccggaaaagacaagaccagcgugacacuggcgggcaauuccagccuuuguucuauuuccgggugggcuaucuacaccaaagauaacagcauucggaucggaucuaagggcgacgucuucgugauucgcgaaccuuuuaucuccugcagccaccuggaguguagaacguucuuucucacccaaggcgcccugcuuaaugauaaacauucuaacgggacaguuaaggaccgguccccguaucgcgcccugaugagcugcccccucggagaagcuccuucccccuacaauucuaaguucgagagcguggccugguccgcuagcgccugucacgauggcaugggguggcugaccaucggaauuucuggcccugacaacggggcggucgccgugcugaaauauaacggaaucauuacaggcaccaucaaguccuggaaaaagcagauucucagaacgcaggaaagcgagugcguuuguaugaauggcucuugcuuuacaaucaugaccgaugggcccagcaacaaagcugccuccuacaagaucuucaagauugagaaaggaaaggugacaaaaucuaucgaacugaaugcuccuaacuuuuauuacgaggaauguagcugcuacccggacaccggcauugucaugugugugugccgggauaauuggcauggguccaaccgccccugggugagcuucaaucaggaccuugauuaucaaaucggauacauuugcucuggcgucuuuggggacaacccuagacccaaggauggagagggcuccuguaauccuguuaccguggacggcgccaacggggugaaaggauucagcuauaaguacggcaauggggucuggaucggacggacaaaaucuaaccgccugagaaagggcuuugagaugauuugggaccccaauggguggacgaacaccgauuccgacuucagcgugaagcaggauguuguggcgaucacagacugguccggcuauucuggcagcuuuguccagcacccggaacucaccggacuggauugcauccggccuuguuucuggguggagcuuguucgcgggcugcccagagaaaauacaaccauuuggacguccggaucuagcaucuccuucugcggcgugaacagcgacacagccaacuggucuuggccugauggggcugagcuccccuuuaccauugacaaauga

SEQ ID NO: 213298 - RNA, 1413 nt, Artificial Sequence
  derived and/or modified CDS sequence (opt5) from neuraminidase__InfluenzaA__AET84440
augaaccccaaucagaagaucauuaccaucggcagcauuuccaucgccauugggaucaucucucugaugcuccaaauuggaaacaucauuagcaucugggcuucccacucuauucagacaggcagccagaauaacacggggaucugcaaucagagaauuaucaccuacgagaacuccacaugggugaaucauaccuaugugaacaucaauaacacaaauguuguggccggagaagacaaaaccucugugacacuggcgggcaacagcucccuuuguagcauuucugggugggcuaucuacaccaaggauaauuccauucggaucggaagcaaaggcgacgucuucgugauucgcgagccuuuuaucucuugcucccaccuggaauguagaacguucuuucucacccaaggcgcccugcuuaacgauaagcauagcaaugggacaguuaaagaccggucuccguaucgcgcccugauguccugcccccucggagaggcuccuagccccuacaacuccaaguucgaaucuguggccuggagcgcuuccgccugucacgauggcaugggguggcugaccaucggaauuagcggcccugacaacggggcggucgccgugcugaaguauaauggaaucauuacagagaccaucaaaucuuggaagaaacagauucucagaacgcaggaguccgaaugcguuuguaugaacggcagcugcuuuacaaucaugaccgauggccccucuaauaaggcugccagcuacaaaaucuucaagauugagaaggggaaagugacaaaguccaucgaacugaacgcuccuaauuuuuauuacgaggaguguucuugcuacccggacaccggaauugucaugugugugugccgggauaacuggcauggcagcaaucgccccuggguguccuucaaccagaaucuugacuaucaaaucggguacauuugcagcggagucuuuggcgauaacccuagacccaaagacggggaaggaucuuguaauccuguuaccguggauggcgccaacggcgugaagggguucuccuauaaauacggaaauggcgucuggaucgggcggacaaagagcaaccgccugagaaaaggauuugagaugauuugggaccccaauggcuggacgaacaccgacucugauuucuccgugaagcaggacguuguggcgaucacagauuggagcggguauuccggcucuuuuguccagcacccggaacucaccggacuggacugcauccggccuuguuucuggguggagcuuguucgcggccugcccagagaaaacacaaccauuuggacgagcggguccucuaucagcuucugcggagucaauuccgauacagccaacuggagcuggccugacggcgcugagcuccccuuuaccauugauaaguga

SEQ ID NO: 213299 - RNA, 1413 nt, Artificial Sequence
  derived and/or modified CDS sequence (opt5) from neuraminidase__InfluenzaA__AET84451
augaaccccaaucagaagaucauuaccaucggcagcauuuccaucgccauugggaucaucucucugauucuccaaaucggaaacauuaucagcauuugggcuucccacucuauccagacaggcagccagaaucauacggggauuugcaaccagagaaucaucaccuacgaaaauuccacaugggugaacaauaccuaugucaacauuaauaacacaaauguuguggccgagaaagacaagaccucugugacacuggcgggaaacagcucccuuuguagcaucucuggcugggcuauuuacaccaaagauaauuccauccggauugggagcaagggagacgucuucgugauccgcgagccuuuuaucucuugcucccaccuggaauguagaacguucuuucucaccaaaggcgcccugcuuaacgauaagcauagcaauggcacaguuaccgaccggucuccguaucgcgcccugauguccugcccccucggggaggcuccuagccccuacaacuccagauucgaaucuguggccuggagcgcuuccgccugucacgauggaaugggcuggcugacaauugggaucagcggaccugacaacggcgcggucgccgugcugaaguauaaugggauuaucaccgagacgauuaaaucuuggaagaaacggauccuccgcacacaagaguccgaaugcguuuguaugaacggaagcugcuuuaccaucaugacagauggccccucuaauggcgcugccagcuacaagauuuucaaaaucgagaaggggaaggugaccaaaaccauugaacugaacgcuccuaauuuucauuaugaggaguguuccugcuacccggacacaggaacggucaugugugugugcagagauaacuggcacggcucuaaucggcccugggugagcuucaaccagaaucuugacuaccagaucggguauauuugcuccggagucuuuggcgauaacccucgccccaaggacggggaaggaagcuguaauccuguuaccguggauggcgccgacggcgugaaaggguucucuuacaaguauggaaacggcgucuggaucgggagaacaaaauccaaucggcugcgcaagggauuugagaugauuugggaccccaacggcuggaccaauacagauagcgacuucucugugaaacaggauguuguggcgaucaccgacugguccggguacagcggcuccuuuguccaacacccggaacucacgggacuggauugcaucagaccuuguuucuggguggagcuuguucggggccugccccgcgaaaacacaaccauuuggaccucugggagcuccaucucuuucugcggagugaacagcggcacagccaauugguccuggccugacggggcugagcuccccuuuaccauugauaaguga

SEQ ID NO: 213300 - RNA, 1410 nt, Artificial Sequence; identical to SEQ ID NO: 208810
  derived and/or modified CDS sequence (opt5) from neuraminidase__InfluenzaA__AEV53421

SEQ ID NO: 213301 - RNA, 1410 nt, Artificial Sequence; identical to SEQ ID NO: 208810
  derived and/or modified CDS sequence (opt5) from neuraminidase__InfluenzaA__AEV53423

SEQ ID NO: 213302 - RNA, 1410 nt, Artificial Sequence; identical to SEQ ID NO: 210272
  derived and/or modified CDS sequence (opt5) from neuraminidase__InfluenzaA__AEV53425

SEQ ID NO: 213303 - RNA, 1410 nt, Artificial Sequence; identical to SEQ ID NO: 208810
  derived and/or modified CDS sequence (opt5) from neuraminidase__InfluenzaA__AEV53427

SEQ ID NO: 213304 - RNA, 1410 nt, Artificial Sequence; identical to SEQ ID NO: 210272
  derived and/or modified CDS sequence (opt5) from neuraminidase__InfluenzaA__AEV53429

SEQ ID NO: 213305 - RNA, 1410 nt, Artificial Sequence
  derived and/or modified CDS sequence (opt5) from neuraminidase__InfluenzaA__AEV53431
augaaccccaaucagaagaucauuaccaucggcagcgugugcaugacaauugggauggccaaccugauccuccaaauuggaaauaucaucuccauuuggaucucucacagcauucagcugggcaaccagaaucagaucgagacguguaaccaauccgucauuaccuacgaaaauaacacauggguuaaucagaccuaugugaacaucucuaauacaaacuucgcugccgggcagagcguggucccugugaaacuugcgggaaauuccucucugugcccgguuagcggcugggcuauuuacuccaaggacaacagcaucagaaucgggucuaaaggagauguguuugucauucgggagcccuucaucuccuguagcccucucgaaugccgcaccuuuuuccugacacagggcgcccuucugaaugacaagcauucuaacggcaccauuaaagauagaucccccuaucggacgcucaugagcuguccuaucggggaggugcccucuccuuacaacucccgcuuugaaagcguugccugguccgcuucugccugccacgacggaauuaauuggcugaccaucggcaucagcgggccggauaacggagcuguggccguccugaaguauaauggcauuaucacagacaccauuaaguccuggagaaacaauauccuccggacacaagagagcgagugugcgugcgugaacgggucuuguuucaccgugaugacggauggacccuccgacggccaggccagcuacaaaauuuuucgcaucgaaaagggcaaaaucgucaagucuguugagaugaaugcuccuaacuaucauuacgaagagugcagcuguuaccccgauuccucugagauuacaugcgugugcagagacaauuggcacgggagcaaccggccuuggguguccuucaaucagaaccuggaauaucagaucggauacauuuguagcggcaucuuuggggauaauccccgcccgaacgacaaaaccggaucuugcggcccugucuccagcaauggggccaacggagugaagggcuucucuuuuaaguauggcaacgggguuuggauuggaagaacaaaauccaucagcucccggaauggcuucgagaugauuugggaucccaacggguggaccggaaccgacaauaacuuuucuaucaagcaagacaucgugggcauuaaugaauggagcggguacuccggcucuuucguccagcauccugagcuuacaggacuggauuguauccgccccugcuucuggguggaacucauuagaggccggcccaaagagaacacgaucuggaccagcggguccagcauuucuuuuuguggaguuaauuccggcacagugggguggagcuggccugacggagcugagcugccguucaccaucgauaaguga

SEQ ID NO: 213306 - RNA, 1410 nt, Artificial Sequence; identical to SEQ ID NO: 208810
  derived and/or modified CDS sequence (opt5) from neuraminidase__InfluenzaA__AEV53435

SEQ ID NO: 213307 - RNA, 1410 nt, Artificial Sequence
  derived and/or modified CDS sequence (opt5) from neuraminidase__InfluenzaA__AEV53437
augaaccccaaucagaagaucauuaccaucggcagcgugugcaugacaauugggauggccaaccugauccuccaaauuggaaauaucaucuccauuuggaucucucacagcauucagcugggcaaccagaaucagaucgagacguguaaccaauccgucauuaccuacgaaaauaacacauggguuaaucagaccuaugugaacaucucuaauacaaacuucgcugccgggcagagcguggucuccgugaaacuugcgggaaauucuagccugugcccuguuuccggcugggcuauuuacagcaaggacaacucuaucagaaucggguccaaaggagauguguuugucauucgggagccguucaucagcuguucuccccucgaaugccgcaccuuuuuccugacacagggcgcccuucugaaugacaagcauuccaacggcaccauuaaagauagaagcccuuaucggacgcucaugucuugucccaucggggaggugccuucccccuacaacagccgcuuugaauccguugccuggucugcuagcgccugccacgacggaauuaauuggcugaccaucggcaucuccgggccugauaacggagcuguggccguccugaaguauaauggcauuaucacagacaccauuaagagcuggagaaacaauacacuccggacccaagagucugagugugcgugcgugaacggguccuguuucacggugaugacagauggaccgagcgacggccaggccucuuacaaaaucuuucgcauugaaaagggcaaaaucgucaagagcguugagaugaaugcucccaacuaucauuacgaagagugcuccuguuacccugauucuagcgagauuaccugcgugugcagagacaauuggcacggguccaaccggcccugggugagcuucaaucagaaccuggaauaucagaucggauacaucuguucuggcauuuuuggggauaauccucgccccaacgacaaaacaggauccugcggcccggucagcucuaauggggccaacggagugaagggcuucuccuuuaaguauggcaacgggguuuggaucggaagaaccaaaagcauuuccucucggaauggcuucgagaugaucugggauccuaacggguggaccggaacagacaauaacuuuagcauuaagcaagacaucgugggcaucaaugaaugguccggguacucuggcagcuucguccagcaucccgagcuuacgggacuggauuguauucgcccuugcuucuggguggaacucaucagaggccggcccaaagagaacaccauuuggacauccgggagcucuaucuccuuuuguggaguuaauagcgacaccgugggcuggucuuggcccgauggggcugagcugccuuucacaauugacaaguga

SEQ ID NO: 213308 - RNA, 1410 nt, Artificial Sequence; identical to SEQ ID NO: 208810
  derived and/or modified CDS sequence (opt5) from neuraminidase__InfluenzaA__AEV53439

SEQ ID NO: 213309 - RNA, 1410 nt, Artificial Sequence; identical to SEQ ID NO: 208810
  derived and/or modified CDS sequence (opt5) from neuraminidase__InfluenzaA__AEV53441

SEQ ID NO: 213310 - RNA, 1410 nt, Artificial Sequence; identical to SEQ ID NO: 208810
  derived and/or modified CDS sequence (opt5) from neuraminidase__InfluenzaA__AEV53443

SEQ ID NO: 213311 - RNA, 1410 nt, Artificial Sequence
  derived and/or modified CDS sequence (opt5) from neuraminidase__InfluenzaA__AEV53445
augaaccccaaucagaagaucauuaccaucggcagcgugugcaugacaauugggauggccaaccugauccuccaaauuggaaauaucaucuccauuuggaucucucacagcauucagcugggcaaccagaaucagaucgagacguguaaccaauccgucauuaccuacgaaaauaacacauggguuaaucagaccuaugugaacaucucuaauacaaacuucgcugccgggcagagcguggucuccgugaaacuugcgggaaauucuagccugugcccuguuuccggcugggcuauuuacagcaaggacaacucuaucagaaucggguccaaaggagauguguuugucauucgggagccguucaucagcuguucuccccucgaaugccgcaccuuuuuccugacacagggcgcccuucugaaugacaagcauuccaacggcaccauuaaagauagaagcccuuaucggacgcucaugucuugucccaucggggaggugccuucccccuacaacagccgcuuugaauccguugccuggucugcuagcgccugccacgacggaauuaauuggcugaccaucggcaucuccgggccugauaacggagcuguggccguccugaaguauaauggcauuaucacagacaccauuaagagcuggagaaacaauauccuccggacacaagagucugagugugcgugcgugaacggguccuguuucaccgugaugacggauggaccgagcgacggccaggccucuuacaaaauuuuucgcaucgaaaagggcaaaaucgucaagagcguugagaugaaugcucccaacuaucauuacgaagagugcuccuguuacccugauucuagcgagauuacaugcgugugcagagacaauuggcacggguccaaccggcccugggugagcuucaaucagaaccuggaauaucagaucggauacauuuguucuggcaucuuuggggauaauccucgccccaacgacaaaaccggauccugcggcccggucagcucuaauggggccaacggagugaagggcuucuccuuuaaguauggcaacgggguuuggauuggaagaacaaaaagcaucuccucucggaauggcuucgagaugauuugggauccuaacggguggaccggaaccgaccauaauuuuagcaucaagcaagacaucgugggcauuaacgaaugguccggguacucuggcagcuucguccagcaccccgagcuuacaggacuggauuguauccgcccuugcuucuggguggaacucauuagaggccggcccaaagagaauacgaucuggaccuccgggagcucuauuuccuuuuguggaguuaacagcgacacagugggcuggucuuggcccgauggggcugagcugccuuucaccaucgacaaguga

SEQ ID NO: 213312 - RNA, 1410 nt, Artificial Sequence; identical to SEQ ID NO: 208810
  derived and/or modified CDS sequence (opt5) from neuraminidase__InfluenzaA__AEV53447

SEQ ID NO: 213313 - RNA, 1410 nt, Artificial Sequence; identical to SEQ ID NO: 210712
  derived and/or modified CDS sequence (opt5) from neuraminidase__InfluenzaA__AEV53449

SEQ ID NO: 213314 - RNA, 1410 nt, Artificial Sequence
  derived and/or modified CDS sequence (opt5) from neuraminidase__InfluenzaA__AEV53451
augaaccccaaucagaagaucauuaccaucggcagcgugugcaugacaauugggauggccaaccugauccuccaaauuggaaauaucaucuccauuuggaucucucacagcauucagcugggcaaccagaaucagaucgagacguguaaccaauccgucauuaccuacgaaaauaacacauggguuaaucagaccuaugugaacaucucuaauacaaacuucgcugccgggcagagcguggucuccgugaaacuugcgggaaauucuagccugugcccuguuuccggcugggcuauuuacagcaaggacaacucuaucagaaucggguccaaaggagauguguuugucauucgggagccguucaucagcuguucuccccucgaaugccgcaccuuuuuccugacacagggcgcccuucugaaugacaagcauuccaacggcaccauuaaagauagaagcccuuaucggacgcucaugucuugucccaucggggaggugccuucccccuacaacagccgcuuugaauccguugccuggucugcuagcgccugccacgacggaauuaauuggcugaccaucggcaucuccgggccugauaacggagcuguggccguccugaaguauaauggcauuaucacagacaccauuaagagcuggagaaacaauauccuccggacacaagagucugagugugcgugcgugaacggguccuguuucaccgugaugacggauggaccgagcgacggccaggccucuuacaaaauuuuuaagaucgaaaaaggcaagaucgucaaaagcguugagaugaaugcucccgauuaucauuacgaagagugcuccuguuacccugacucuagcgagauuacaugcgugugccgcgauaacuggcacggguccaauagacccugggugagcuucaaccagaaucuggaauaucagaucggauacauuuguucuggcaucuuuggggacaacccucggcccaaugauaagaccggauccugcggcccggucagcucuaacggggccaauggagugaagggcuucuccuuuaaauauggcaacgggguuuggauuggacgcacaaagagcaucuccucuagaaacggcuucgagaugauuugggacccuaauggguggaccggaaccgacaacaauuuuagcaucaaacaagauaucgugggcauuaacgaaugguccggguacucuggcagcuucguccagcaucccgagcuuacaggacuggacuguauccggccuugcuucuggguggaacucauucgcggcagacccaaggagaauacgaucuggaccuccgggagcucuauuuccuuuuguggaguuaacagcgauacagugggcuggucuuggcccgacggggcugagcugccuuucaccaucgauaaauga

SEQ ID NO: 213315 - RNA, 1410 nt, Artificial Sequence; identical to SEQ ID NO: 208810
  derived and/or modified CDS sequence (opt5) from neuraminidase__InfluenzaA__AEV53453

SEQ ID NO: 213316 - RNA, 1410 nt, Artificial Sequence
  derived and/or modified CDS sequence (opt5) from neuraminidase__InfluenzaA__AEV53455
augaaccccaaucagaagaucauuaccaucggcagcgugugcaugacaauugggauggccaaccugauccuccaaauuggaaauaucaucuccauuuggaucucucacagcauucagcugggcaaccagaaucagaucgagacguguaaccaauccgucauuaccuacgaaaauaacacauggguuaaucagaccuaugugaacaucucuaauacaaacuucgcugccgggcagagcguggucuccgugaaacuugcgggaaauucuagccugugcccuguuuccggcugggcuauuuacagcaaggacaacucuaucagaaucggguccaaaggagauguguuugucauucgggagccguucaucagcuguucuccccucgaaugccgcaccuuuuuccugacacagggcgcccuucugaaugacaagcauuccaacggcaccauuaaagauagaagcccuuaucggacgcucaugucuugucccaucggggaggugccuucccccuacaacagccgcuuugaauccguugccuggucugcuagcgccugccacgacggaauuaauuggcugaccaucggcaucuccgggccugauaacggagcuguggccguccugaaguauaauggcauuaucacagacaccauuaagagcuggagaaacaauauccuccggacacaagagucugagugugcgugcgugaacggguccuguuucaccgugaugacggauggaccgagcgacggccaggccucuuacaaaauuuuucgcaucgaaaagggcaaaaucgucaagagcguugagaugaaugcucccaacuaucauuacgaagagugcuccuguuacccugauucuagcgagauuacaugcgugugcagagacaauuggcacggguccaaccggcccugggugagcuucaaucagaaccuggaauaucagaucggauacauuuguucuggcaucuuuggggauaauccucgccccaacgacaaaaccggauccugcggcccggucagcucuaauggggccaacggagugaagggcuucuccuuuaaguauggcaacgggguuuggauuggaagaacaaaaagcaucuccucucggaauggcuucgagaugauuugggauccuaacggguggaccgaaaccgacaauaacuuuagcaucaagcaagacaucgugggaauuaaugagugguccggcuacucugggagcuucguccagcaucccgaacuuacaggccugaacuguauccgcccuugcuucuggguggagcucauuagaggacggcccaaagagaauacgaucuggaccuccggcagcucuauuuccuuuugugggguuaacagcgauacagugggauggucuuggcccgacggcgcugaacugccuuucaccaucgauaaguga

SEQ ID NO: 213317 - RNA, 1410 nt, Artificial Sequence
  derived and/or modified CDS sequence (opt5) from neuraminidase__InfluenzaA__AEV53457
augaaccccaaucagaagaucauuaccaucggcagcgugugcaugacaauugggauggccaaccugauccuccaaauuggaaauaucaucuccauuuggaucucucacagcauucagcugggcaaccagaaucagaucgagacguguaaccaauccgucauuaccuacgaaaauaacacauggguuaaucagaccuaugugaacaucucuaauacaaacuucgcugccgggcagagcguggucuccgugaaacuugcgggaaauucuagccugugcccuguuuccggcugggcuauuuacagcaaggacaacucuaucagaaucggguccaaaggagauguguuugucauucgggagccguucaucagcuguucuccccucgaaugccgcaccuuuuuccugacacagggcgcccuucugaaugacaagcauuccaacggcaccauuaaagauagaagcccuuaucggacgcucaugucuugucccaucggggaggugccuucccccuacaacagccgcuuugaauccguugccuggucugcuagcgccugccacgacggaauuaauuggcugaccaucggcaucuccgggccugauaacggagcuguggccguccugaaguauaauggcauuaucacagacaccauuaagagcuggagaaacaauauccuccggacacaagagucugagugugcgugcgugaacggguccuguuucaccgugaugacggauggaccgagcgacggccaggccucuuacaaaauuuuucgcgucgaaaagggcaaaaucguuaagagcguggagaugaaugcucccaacuaucauuacgaagagugcuccuguuacccugauucuagcgagaucacaugcgugugcagagacaauuggcacggguccaaccggcccugggucagcuucaaucagaaccuggaauaucagauuggauacaucuguucuggcauuuuuggggauaauccucgccccaacgacaaaaccggauccugcggcccggugagcucuaauggggccaacggaguuaagggcuucuccuuuaaguauggcaacgggguguggaucggaagaacaaaaagcauuuccucucggaauggcuucgagaugaucugggauccuaacggguggaccggaaccgacaauaacuuuagcauuaagcaagacaucgucggcaucaaugaaugguccggguacucuggcagcuucgugcagcaucccgagcuuacaggacuggauuguauucgcccuugcuucuggguugaacucaucagaggccggcccaaagagaacacgauuuggaccuccgggagcucuaucuccuuuuguggagugaauagcgacacagucggcuggucuuggcccgauggggcugagcugccuuucaccauugacaaguga

SEQ ID NO: 213318 - RNA, 1410 nt, Artificial Sequence
  derived and/or modified CDS sequence (opt5) from neuraminidase__InfluenzaA__AEV53459
augaaccccaaucagaagaucauuaccaucggcagcgugugcaugacaauugggauggccaaccugauccuccaaauuggaaauaucaucuccauuuggaucucucacagcauucagcugggcaaccagaaucagaucgagacguguaaccaauccgucauuaccuacgaaaauaacacauggguuaaucagaccuaugugaacaucucuaauacaaacuucgcugccgggcagagcguggucuccgugaaacuugcgggaaauucuagccugugcccuguuuccggcugggcuauuuacagcaaggacaacucuaucagaaucggguccaaaggagauguguuugucauucgggagccguucaucagcuguucuccccucgaaugccgcaccuuuuuccugacacagggcgcccuucugaaugacaagcauuccaacggcaccauuaaagauagaagcccuuaucggacgcucaugucuugucccaucggggaggugccuucccccuacaacagccgcuuugaauccguugccuggucugcuagcgccugccacgacggaauuaauuggcugaccaucggcaucuccgggccugauaacggagcuguggccguccugaaguauaauggcauuaucacagacaccauuaagagcuggagaaacaauauccuccggacacaagagucugagugugcgugcgugaacggguccuguuucaccgugauuacggauggaccgagcgacggccaggccucuuacaaaaucuuucgcaucgaaaagggcaaaauugucaagagcguugagaugaaugcucccaacuaucauuacgaagagugcuccuguuacccugauucuagcgagaucacaugcgugugcagagacaauuggcacggguccaaccggcccugggugagcuucaaucagaaccuggaauaucagauuggauacaucuguucuggcauuuuuggggauaauccucgccccaacgacaaaaccggauccugcggcccggucagcucuaauggggccaacggagugaagggcuucuccuuuaaguauggcaacgggguuuggaucggaagaacaaaaagcauuuccucucggaauggcuucgagaugaucugggauccuaacggguggaccgaaaccgacaauaacuuuagcaucaagcaagacauugugggaaucaaugagugguccggcuacucugggagcuucguccagcaucccgaacuuacaggccugaacuguauucgcccuugcuucuggguggagcucaucagaggacggcccaaagagaauacgauuuggaccuccggcagcucuaucuccuuuugugggguuaacagcgauacagugggauggucuuggcccgacggcgcugaacugccuuucaccaucgauaaguga

SEQ ID NO: 213319 - RNA, 1410 nt, Artificial Sequence; identical to SEQ ID NO: 208810
  derived and/or modified CDS sequence (opt5) from neuraminidase__InfluenzaA__AEV53461

SEQ ID NO: 213320 - RNA, 1410 nt, Artificial Sequence
  derived and/or modified CDS sequence (opt5) from neuraminidase__InfluenzaA__AEV53463
augaaccccaaucagaagaucauuaccaucggcagcgugugcaugacaauugggauggccaaccugauccuccaaauuggaaauaucaucuccauuuggaucucucacagcauucagcuggagaaccagaaucagaucgaaacguguaaccaauccgucauuaccuacgagaauaacacauggguuaaucagaccuaugugaacaucucuaauacaaacuucgcugccggccagagcguggucuccgugaaacuugcggggaauagcagccugugcccuguuuccggaugggcuauuuacagcaaggacaacucuaucagaaucggcuccaaaggggauguguuugucauucgggaaccguucaucagcuguucuccccucgagugccgcaccuuuuuccugacacagggagcccuucugaaugacaagcauuccaacggcaccauuaaagauagaagcccuuaucggacgcucaugucuugucccaucggcgaagugccuucccccuacaacagccgcuuugaguccguugccuggucugcuagcgccugccacgacgggauuaauuggcugaccaucggaaucuccggcccugauaacggggcuguggccguccugaaguauaauggaauuaucacagacaccauuaagagcuggagaaacaauauccuccggacacaagagucugaaugugcgugcauuaacggcuccuguuucaccgugaugacggaugggccgagcgacggacaggccucuuacaaaaucuuucgcaucgagaagggcaaaauugugaagucugucgaaaugaaugcucccaacuaucauuacgaggagugcuccuguuacccugauucuagcgaaaucacaugcguuugcagagacaauuggcacggcuccaaccggcccugggugagcuucaaucagaaccuggaguaucagauuggguacaucuguucuggaauuuuuggcgauaauccucgccccaacgacaaaaccggguccugcggaccggugagcucuaauggcgccaacggggucaagggauucuccuuuaaguauggcaacggcguguggaucgggagaacaaaaagcauuuccucucggaauggauucgaaaugaucugggauccuaacggcuggaccgggaccgacaauaacuuuagcaucaagcaagacauuguuggaaucaaugagugguccggcuacucugggagcuucgugcagcaucccgaacuuacaggccuggauuguauucgcccuugcuucugggucgagcucaucagaggacggcccaaagagaacacgauuuggaccuccggcagcucuaucuccuuuuguggggugaauagcgacacaguuggauggucuuggcccgauggcgcugaacugccuuucaccaucgacaaguga

SEQ ID NO: 213321 - RNA, 1410 nt, Artificial Sequence
  derived and/or modified CDS sequence (opt5) from neuraminidase__InfluenzaA__AEV53465
augaaccccaaucagaagaucauuaccaucggcagcgugugcaugacaauugggauggccaaccugauccuccaaauuggaaauaucaucuccauuuggaucucucacagcauucagcugggcaaccagaaucagaucgagacguguaaccaauccgucauuaccuacgaaaauaacacauggguuaaucagaccuaugugaacaucucuaauacaaacuucgcugccgggcagagcguggucuccgugaaacuugcgggaaauucuagccugugcccuguuuccggcugggcuauuuacagcaaggacaacucuaucagaaucggguccaaaggagauguguuugucauucgggagccguucaucagcuguucuccccucgaaugccgcaccuuuuuccugacacagggcgcccuucugaaugacaagcauuccaacggcaccauuaaagauagaagcccuuaucggacgcucaugucuugucccaucggggaggugccuucccccuacaacagccgcuuugaauccguugccuggucugcuagcgccugccacgacggaauuaauuggcugaccaucggcaucuccgggccugauaacggagcuguggccguccugaaguauaauggcauuaucacagacaccauuaagagcuggagaaacaauauccuccggacacaagagucugagugugcgugcgugaacggguccuguuucaccgugaugacggauggaccgagcgaccgccaggccucuuacaaaauuuuuagaaucgaaaagggcaaaaucgucaagagcguugagaugaaugcucccaacuaucauuacgaagagugcuccuguuacccugauucuagcgagauuacaugcgugugccgggacaauuggcacggcuccaaccgccccugggugagcuucaaucagaaccuggaauaucagaucggguacauuuguucuggaaucuuuggcgauaauccuagacccaacgacaaaaccggguccugcggaccggucagcucuaauggcgccaacggggugaagggauucuccuauaaguacggcaacggcguuuggauugggcggacaaaaagcaucuccucucgcaauggauuugagaugauuugggauccuaacggcuggaccgggaccgacaauaacuucagcaucaagcaagacaucgugggaauuaaugaaugguccggcuauucugggagcuuuguccagcaucccgagcuuacaggccuggauuguaucagaccuugcuucuggguggaacucauucggggacgccccaaagagaacacgaucuggaccuccggcagcucuauuuccuucugugggguuaauagcgacacagugggauggucuuggcccgauggcgcugagcugccuuuuaccaucgacaaguga

SEQ ID NO: 213322 - RNA, 1410 nt, Artificial Sequence; identical to SEQ ID NO: 210611
  derived and/or modified CDS sequence (opt5) from neuraminidase__InfluenzaA__AEV53467

SEQ ID NO: 213323 - RNA, 1410 nt, Artificial Sequence; identical to SEQ ID NO: 210611
  derived and/or modified CDS sequence (opt5) from neuraminidase__InfluenzaA__AEV53469

SEQ ID NO: 213324 - RNA, 1410 nt, Artificial Sequence; identical to SEQ ID NO: 208810
  derived and/or modified CDS sequence (opt5) from neuraminidase__InfluenzaA__AEV53471

SEQ ID NO: 213325 - RNA, 1410 nt, Artificial Sequence; identical to SEQ ID NO: 208810
  derived and/or modified CDS sequence (opt5) from neuraminidase__InfluenzaA__AEV53473

SEQ ID NO: 213326 - RNA, 1410 nt, Artificial Sequence; identical to SEQ ID NO: 208810
  derived and/or modified CDS sequence (opt5) from neuraminidase__InfluenzaA__AEV53475

SEQ ID NO: 213327 - RNA, 1410 nt, Artificial Sequence; identical to SEQ ID NO: 208810
  derived and/or modified CDS sequence (opt5) from neuraminidase__InfluenzaA__AEV53477

SEQ ID NO: 213328 - RNA, 1410 nt, Artificial Sequence; identical to SEQ ID NO: 208810
  derived and/or modified CDS sequence (opt5) from neuraminidase__InfluenzaA__AEV53479

SEQ ID NO: 213329 - RNA, 1410 nt, Artificial Sequence; identical to SEQ ID NO: 208810
  derived and/or modified CDS sequence (opt5) from neuraminidase__InfluenzaA__AEV53481

SEQ ID NO: 213330 - RNA, 1410 nt, Artificial Sequence; identical to SEQ ID NO: 208810
  derived and/or modified CDS sequence (opt5) from neuraminidase__InfluenzaA__AEV53483

SEQ ID NO: 213331 - RNA, 1410 nt, Artificial Sequence
  derived and/or modified CDS sequence (opt5) from neuraminidase__InfluenzaA__AEV53485
augaaccccaaucagaagaucauuaccaucggcagcgugugcaugacaauugggauggccaaccugauccuccaaauuggaaauaucaucuccauuugggucucucacagcauccagcugggcaaccagaaucagauugagacguguaaccaauccguuaucaccuacgaaaauaacacaugggugaaucagaccuaugugaacauuucuaauacaaacuucgcugccgggcagagcgucguguccguuaaacuugcgggaaauucuagccugugcccuguguccggcugggcuaucuacagcaaggacaacucuauuagaaucggguccaaaggagaugucuuugugauccgggagccguucauuagcuguucuccccucgaaugccgcaccuuuuuccugacacagggcgcccuucugaaugacaagcauuccaacggcaccaucaaagauagaagcccuuaucggacgcucaugucuugucccauuggggagguuccuucccccuacaacagccgcuuugaauccguggccuggucugcuagcgccugccacgacggaaucaauuggcugaccauuggcaucuccgggccugauaacggagcugucgccgugcugaaguauaauggcaucauuacagacaccaucaagagcuggagaaacaauauucuccggacacaagagucugagugugcgugcgugaacggguccuguuucaccgucaugacggauggaccgagcgacggccaggccucuuacaaaaucuuucgcauugaaaagggcaaaaucguuaagagcguggagaugaaugcucccaacuaucauuacgaagagugcuccuguuacccugauucuagcgagaucacaugcgugugcagagacaauuggcacggguccaaccggcccugggucagcuucaaucagaaccuggaauaucagauuggauacaucuguucuggcauuuuuggggauaauccucgccccaacgacaaaaccggauccugcggcccggugagcucuaauggggccaacggaguuaagggcuucuccuuuaaguauggcaacgggguguggaucggaagaacaaaaagcauuuccucucggaauggcuucgagaugaucugggauccuaacggguggaccggaaccgacaauaacuuuagcauuaagcaagacaucgucggcaucaaugaaugguccggguacucuggcagcuucgugcagcaucccgagcuuacaggacuggauuguauucgcccuugcuucuggguugaacucaucagaggccggcccaaagagaacacgauuuggaccuccgggagcucuaucuccuuuuguggagugaauagcgacacagucggcuggucuuggcccgauggggcugagcugccuuucaccauugacaaguga

SEQ ID NO: 213332 - RNA, 1410 nt, Artificial Sequence; identical to SEQ ID NO: 210611
  derived and/or modified CDS sequence (opt5) from neuraminidase__InfluenzaA__AEV53487

SEQ ID NO: 213333 - RNA, 1410 nt, Artificial Sequence; identical to SEQ ID NO: 209828
  derived and/or modified CDS sequence (opt5) from neuraminidase__InfluenzaA__AEV53489

SEQ ID NO: 213334 - RNA, 1410 nt, Artificial Sequence
  derived and/or modified CDS sequence (opt5) from neuraminidase__InfluenzaA__AEV53491
augaaccccaaucagaagaucauuaccaucggccuggugugcaugacaauugggauggccaaccucauccugcaaauuggaaauaucaucagcauuuggaucucccacucuauucagcuuggcaaccagaaucagaucgagacguguaaccaaagcgucauuaccuacgaaaauaacacauggguuaaucagaccuaugugaacaucuccaauacaaacuucgcugccgggcagucuguggucagcgugaaacuggcgggaaauuccucucucugcccuguuagcggcugggcuauuuacuccaaggacaacagcaucagaaucgggucuaaaggagauguguuugucauucgggagccguucaucuccuguagcccccuggaaugccgcaccuuuuuccuuacacagggcgcccugcucaaugacaagcauucuaacggcaccauuaaagauagauccccuuaucggacgcugaugagcugucccaucggggaggugccuucucccuacaacucccgcuuugaaagcguugccugguccgcuucugccugccacgacggaauuaauuggcugaccaucggcaucagcgggccugauaacggagcuguggccguccucaaguauaauggcauuaucacagacaccauuaaguccuggagaaacaauauccugcggacacaagagagcgagugugcgugcgugaacgggucuuguuucaccgugaugacggauggaccguccgacggccaggccagcuacaaaauuuuucgcaucgaaaagggcaaaaucgucaagucuguugagaugaaugcucccaacuaucauuacgaagagugcagcuguuacccugauuccucugagauuacaugcgugugcagagacaauuggcacgggagcaaccggcccuggguguccuucaaucagaaccuugaauaucagaucggauacauuuguagcggcaucuuuggggauaauccucgccccaacgacaaaaccggaucuugcggcccggucuccagcaauggggccaacggagugaagggcuucucuuuuaaguauggcaacgggguuuggauuggaagaacaaaauccaucagcucccggaauggcuucgagaugauuugggauccuaacggguggaccggaaccgacaauaacuuuucuaucaagcaagacaucgugggcauuaaugaauggagcggguacuccggcucuuucguccagcaucccgagcugacaggacucgauuguauccgcccuugcuucuggguggaacugauuagaggccggcccaaagagaacacgaucuggaccagcggguccagcauuucuuuuuguggaguuaauuccgacacagugggcuggagcuggcccgauggggcugagcuuccuuucaccaucgacaaguga

SEQ ID NO: 213335 - RNA, 1410 nt, Artificial Sequence; identical to SEQ ID NO: 208810
  derived and/or modified CDS sequence (opt5) from neuraminidase__InfluenzaA__AEV53493

SEQ ID NO: 213336 - RNA, 1410 nt, Artificial Sequence; identical to SEQ ID NO: 210272
  derived and/or modified CDS sequence (opt5) from neuraminidase__InfluenzaA__AEV53495

SEQ ID NO: 213337 - RNA, 1410 nt, Artificial Sequence
  derived and/or modified CDS sequence (opt5) from neuraminidase__InfluenzaA__AEV53497
augaaccccaaucagaagaucauuaccaucggcagcgugugcaugacaauugggauggccaaccugauccuccaaauuggaaauaucaucuccauuuggaucucucacagcauucagcuggagaaccagaaucagaucgaaacguguaaccaauccgucauuaccuacgagaauaacacauggguuaaucagaccuaugugaacaucucuaauacaaacuucgcugccggccagagcguggucuccgugaaucuugcggggaacucuagccugugcccuguuuccggaugggcuauuuacagcaaagacaauucuaucagaaucggcuccaagggggauguguuugucauucgggaaccguucaucagcuguucuccccucgagugccgcaccuuuuuccugacacagggagcccuucugaacgacaaacauuccaacggcaccauuaaggauagaagcccuuaucggacgcucaugucuugucccaucggcgaagugccuucccccuacaauagccgcuuugaguccguugccuggucugcuagcgccugccacgacgggauuaacuggcugaccaucggaaucuccggcccugauaauggggcuguggccguccugaaauauaacggaauuaucacagacaccauuaagagcuggagaaauaacauccuccggacacaagagucugaaugugcgugcgugaauggcuccuguuucaccgugaugacggaugggccgagcgacggacaggccucuuacaagauuuuucgcaucgagaaaggcaagaucgucaaaagcguugaaaugaacgcucccaauuaucauuacgaggagugcuccuguuacccugauucuagcgaaauuacaugcgugugcagagacaacuggcacggcuccaaucggcccugggugagcuucaaccagaaucuggaguaucagaucggguacauuuguucuggaaucuuuggcgauaacccucgccccaaugacaagaccggguccugcggaccggucagcucuaacggcgccaacggggugaaaggauucuccuuuaaguauggcaauggcguuuggauugggagaacaaagagcaucuccucucggaacggauucgaaaugauuugggauccuaauggcuggaccgggaccgacaacaauuuuagcaucaaacaagacaucgugggaauuaacgagugguccggcuacucugggagcuucguccagcaucccgaacuuacaggccuggauuguauccgcccuugcuucuggguggagcucauuagaggacggcccaaggagaauacgaucuggaccuccggcagcucuauuuccuuuugugggguuaacagcgacacagugggauggucuuggcccgauggcgcugaacugccuuucaccaucgacaaauga

SEQ ID NO: 213338 - RNA, 1410 nt, Artificial Sequence; identical to SEQ ID NO: 209828
  derived and/or modified CDS sequence (opt5) from neuraminidase__InfluenzaA__AEV53499

SEQ ID NO: 213339 - RNA, 1410 nt, Artificial Sequence; identical to SEQ ID NO: 208810
  derived and/or modified CDS sequence (opt5) from neuraminidase__InfluenzaA__AEV53501

SEQ ID NO: 213340 - RNA, 1410 nt, Artificial Sequence; identical to SEQ ID NO: 208810
  derived and/or modified CDS sequence (opt5) from neuraminidase__InfluenzaA__AEV53503

SEQ ID NO: 213341 - RNA, 1410 nt, Artificial Sequence; identical to SEQ ID NO: 208810
  derived and/or modified CDS sequence (opt5) from neuraminidase__InfluenzaA__AEV53505

SEQ ID NO: 213342 - RNA, 1410 nt, Artificial Sequence; identical to SEQ ID NO: 208810
  derived and/or modified CDS sequence (opt5) from neuraminidase__InfluenzaA__AEV53507

SEQ ID NO: 213343 - RNA, 1410 nt, Artificial Sequence; identical to SEQ ID NO: 208810
  derived and/or modified CDS sequence (opt5) from neuraminidase__InfluenzaA__AEV53509

SEQ ID NO: 213344 - RNA, 1410 nt, Artificial Sequence; identical to SEQ ID NO: 210272
  derived and/or modified CDS sequence (opt5) from neuraminidase__InfluenzaA__AEV53511

SEQ ID NO: 213345 - RNA, 1410 nt, Artificial Sequence; identical to SEQ ID NO: 210272
  derived and/or modified CDS sequence (opt5) from neuraminidase__InfluenzaA__AEV53513

SEQ ID NO: 213346 - RNA, 1410 nt, Artificial Sequence; identical to SEQ ID NO: 210272
  derived and/or modified CDS sequence (opt5) from neuraminidase__InfluenzaA__AEV53515

SEQ ID NO: 213347 - RNA, 1410 nt, Artificial Sequence
  derived and/or modified CDS sequence (opt5) from neuraminidase__InfluenzaA__AEV53517
augaaccccaaucagagaaucauuaccaucggcagcgugugcaugacaauugggauggccaaccugauccuccaaauuggaaauaucaucuccauuugggucucucacagcauccagcugggcaaccagaaucagauugagacguguaaccaauccguuaucaccuacgaaaauaacacaugggugaaucagaccuaugugaacauuucuaauacaaacuucgcugccgggcagagcgucguguccguuaaacuugcgggaaauucuagccugugcccuguguccggcugggcuaucuacagcaaggacaacucuauucggaucggguccaagggagaugucuuugugauccgcgagccguucauuagcuguucuccccucgaaugcagaaccuuuuuccugacacagggcgcccuucugaaugacaaacauuccaacggcaccaucaaggaucggagcccuuaucgcacgcucaugucuugucccauuggggagguuccuucccccuacaacagcagauuugaauccguggccuggucugcuagcgccugccacgacggaaucaauuggcugaccauuggcaucuccgggccugauaacggagcugucgccgugcugaaauauaauggcaucauuacagacaccaucaagagcuggcggaacaauauucuccgcacacaagagucugagugugcgugcgugaacggguccuguuucaccgucaugacggauggaccgagcgacggccaggccucuuacaagaucuuuagaauugaaaaaggcaagaucguuaaaagcguggagaugaaugcucccaacuaucauuacgaagagugcuccuguuacccugauucuagcgagaucacaugcgugugccgggacaauuggcacggguccaaccgccccugggucagcuucaaucagaaccuggaauaucagauuggauacaucuguucuggcauuuuuggggauaauccuagacccaacgacaagaccggauccugcggcccggugagcucuaauggggccaacggaguuaaaggcuucuccuuuaaguauggcaacgggguguggaucggacggacaaagagcauuuccucucgcaauggcuucgagaugaucugggauccuaacggguggaccggaaccgacaauaacuuuagcauuaaacaagacaucgucggcaucaaugaaugguccggguacucuggcagcuucgugcagcaucccgagcuuacaggacuggauuguauuagaccuugcuucuggguugaacucauccggggccgccccaaggagaacacgauuuggaccuccgggagcucuaucuccuuuuguggagugaauagcgacacagucggcuggucuuggcccgauggggcugagcugccuuucaccauugacaaauga

SEQ ID NO: 213348 - RNA, 1410 nt, Artificial Sequence; identical to SEQ ID NO: 208810
  derived and/or modified CDS sequence (opt5) from neuraminidase__InfluenzaA__AEV53519

SEQ ID NO: 213349 - RNA, 1410 nt, Artificial Sequence; identical to SEQ ID NO: 210272
  derived and/or modified CDS sequence (opt5) from neuraminidase__InfluenzaA__AEV53521

SEQ ID NO: 213350 - RNA, 1410 nt, Artificial Sequence; identical to SEQ ID NO: 210098
  derived and/or modified CDS sequence (opt5) from neuraminidase__InfluenzaA__AEV53523

SEQ ID NO: 213351 - RNA, 1410 nt, Artificial Sequence; identical to SEQ ID NO: 209164
  derived and/or modified CDS sequence (opt5) from neuraminidase__InfluenzaA__AEV53525

SEQ ID NO: 213352 - RNA, 1410 nt, Artificial Sequence; identical to SEQ ID NO: 208810
  derived and/or modified CDS sequence (opt5) from neuraminidase__InfluenzaA__AEV53527

SEQ ID NO: 213353 - RNA, 1410 nt, Artificial Sequence
  derived and/or modified CDS sequence (opt5) from neuraminidase__InfluenzaA__AEV53529
augaaccccaaucagaagaucauuaccaucggcagcgugugcaugacaauugggauggccaaccugauccuccaaauuggaaauaucaucuccauuuggaucucucacagcauucagcuggagaaccagaaucagaucgaaacguguaaccaauccgucauuaccuacgagaauaacacauggguuaaucagaccuaugugaacaucucuaauacaaacuucgcugccggccagagcguggucuccgugaaacuugcgggaaauucuagccugugcccuguuuccgggugggcuauuuacagcaaggacaacucuaucagaaucggcuccaaaggggauguguuugucauucgggaaccguucaucagcuguucuccccucgagugccgcaccuuuuuccugacacagggagcccuucugaaugacaagcauuccaacggcaccauuaaagauagaagcccuuaucggacgcucaugucuugucccaucggcgaagugccuucccccuacaacagccgcuuugaguccguugccuggucugcuagcgccugccacgacgggauuaauuggcugaccaucggaaucuccggcccugauaacggggcuguggccguccugaaguauaauggaauuaucacagacaccauuaagagcuggagaaacaauauccuccggacacaagagucugaaugugcgugcgugaacggcuccuguuucaccgugaugacggaugggccgagcgacggacaggccucuuacaaaauuuuucgcaucgagaagggcaaaaucgucaagagcguugaaaugaaugcucccaacuaucauuacgaggagugcuccuguuacccugauucuagcgaaauuacaugcgugugcagagacaauuggcacggcuccaaccggcccugggugagcuucaaucagaaccuggaguaucagaucggguacauuuguucuggaaucuuuggcgauaauccucgccccaacgacaaaaccggguccugcggaccggucagcucuaauggcgccaacggggugaagggauucuccuuuaaguauggcaacggcguuuggauugggagaacaaaaagcaucuccucucggaauggauucgaaaugauuugggauccuaacggcuggaccgggaccgacaauaacuuuagcaucaagcaagacaucgugggaauuaaagagugguccggcuacucugggagcuucguccagcaucccgaacuuacaggccuggauuguauccgcccuugcuucuggguggagcucauuagaggacggcccaaggagaauacgaucuggaccuccggcagcucuauuuccuuuugugggguuaacagcgacacagugggauggucuuggcccgauggcgcugaacugccuuucaccaucgacaaauga

SEQ ID NO: 213354 - RNA, 1410 nt, Artificial Sequence; identical to SEQ ID NO: 210272
  derived and/or modified CDS sequence (opt5) from neuraminidase__InfluenzaA__AEV53531

SEQ ID NO: 213355 - RNA, 1410 nt, Artificial Sequence
  derived and/or modified CDS sequence (opt5) from neuraminidase__InfluenzaA__AEV53533
augaaccccaaucagaagaucauuaccaucggcagcgugugcaugacaauugggauggccaaccugauccuccaaauuggaaauaucaucuccauuuggaucucucacagcauucagcugggcaaccagaaucagaucgagacguguaaccaauccgucauuaccuacgaaaauaacacauggguuaaucagaccuaugugaacaucucuaauacaaacuucgcugccgggcagagcguggucuccgugaaacuugcgggaaauucuagccugugcccuguuuccggcugggcuauuuacagcaaggacaacucuaucagaaucggguccaaaggagauguguuugucauucgggagccguucaucagcuguucuccccucgaaugccgcaccuuuuuccugacacagggcgcccuucugaaugacaagcauuccaacggcaccauuaaagauagaagcccuuaucggacgcucaugucuugucccaucggggaggugccuucccccuacaacagccgcuuugaauccguugccuggucugcuagcgccugccacgacggaauuaauuggcugaccaucggcaucuccgggccugauaacggagcuguggccguccugaaguauaauggcauuaucacagacaccauuaagagcuggagaaacaauauccuccggacacaagagucugagugugcgugcgugaacggguccuguuucaccgugaugacggauggaccgagcgacggccaggccucuuacaaaauuuuucgcaucgaaaagggcaaaaucgucaagagcguugagaugaaugcucccaacuauuacuacgaagagugcuccuguuauccugauucuagcgagauuacaugcgugugcagagacaauuggcauggguccaaccggcccugggugagcuucaaucagaaccuggaauaccagaucggauauauuuguucuggcaucuuuggggauaauccucgccccaacgacaaaaccggauccugcggcccggucagcucuaauggggccaacggagugaagggcuucuccuuuaaguacggcaacgggguuuggauuggaagaacaaaaagcaucuccucucggaauggcuucgagaugauuugggauccuaacggguggaccggaaccgacaauaacuuuagcaucaagcaagacaucgugggcauuaaugaaugguccggguauucuggcagcuucguccagcaccccgagcuuacaggacugaacuguauccgcccuugcuucuggguggaacucauuagaggccggcccaaagagaauacgaucuggaccuccgggagcucuauuuccuuuuguggaguuaacagcgauacagugggcuggucuuggcccgacggggcugagcugccuuucaccaucgauaaguga

SEQ ID NO: 213356 - RNA, 1410 nt, Artificial Sequence; identical to SEQ ID NO: 208810
  derived and/or modified CDS sequence (opt5) from neuraminidase__InfluenzaA__AEV53535

SEQ ID NO: 213357 - RNA, 1410 nt, Artificial Sequence; identical to SEQ ID NO: 213331
  derived and/or modified CDS sequence (opt5) from neuraminidase__InfluenzaA__AEV53537

SEQ ID NO: 213358 - RNA, 1410 nt, Artificial Sequence; identical to SEQ ID NO: 208810
  derived and/or modified CDS sequence (opt5) from neuraminidase__InfluenzaA__AEV53539

SEQ ID NO: 213359 - RNA, 1410 nt, Artificial Sequence; identical to SEQ ID NO: 212249
  derived and/or modified CDS sequence (opt5) from neuraminidase__InfluenzaA__AEV53541

SEQ ID NO: 213360 - RNA, 1410 nt, Artificial Sequence; identical to SEQ ID NO: 212249
  derived and/or modified CDS sequence (opt5) from neuraminidase__InfluenzaA__AEV53543

SEQ ID NO: 213361 - RNA, 1410 nt, Artificial Sequence; identical to SEQ ID NO: 210458
  derived and/or modified CDS sequence (opt5) from neuraminidase__InfluenzaA__AEV53545

SEQ ID NO: 213362 - RNA, 1410 nt, Artificial Sequence; identical to SEQ ID NO: 212249
  derived and/or modified CDS sequence (opt5) from neuraminidase__InfluenzaA__AEV53547

SEQ ID NO: 213363 - RNA, 1410 nt, Artificial Sequence; identical to SEQ ID NO: 212249
  derived and/or modified CDS sequence (opt5) from neuraminidase__InfluenzaA__AEV53549

SEQ ID NO: 213364 - RNA, 1410 nt, Artificial Sequence; identical to SEQ ID NO: 212249
  derived and/or modified CDS sequence (opt5) from neuraminidase__InfluenzaA__AEV53551

SEQ ID NO: 213365 - RNA, 1410 nt, Artificial Sequence; identical to SEQ ID NO: 212249
  derived and/or modified CDS sequence (opt5) from neuraminidase__InfluenzaA__AEV53553

SEQ ID NO: 213366 - RNA, 1410 nt, Artificial Sequence; identical to SEQ ID NO: 213331
  derived and/or modified CDS sequence (opt5) from neuraminidase__InfluenzaA__AEV53555

SEQ ID NO: 213367 - RNA, 1410 nt, Artificial Sequence; identical to SEQ ID NO: 209828
  derived and/or modified CDS sequence (opt5) from neuraminidase__InfluenzaA__AEV53557

SEQ ID NO: 213368 - RNA, 1410 nt, Artificial Sequence; identical to SEQ ID NO: 208810
  derived and/or modified CDS sequence (opt5) from neuraminidase__InfluenzaA__AEV53559

SEQ ID NO: 213369 - RNA, 1410 nt, Artificial Sequence; identical to SEQ ID NO: 208810
  derived and/or modified CDS sequence (opt5) from neuraminidase__InfluenzaA__AEV53561

SEQ ID NO: 213370 - RNA, 1410 nt, Artificial Sequence; identical to SEQ ID NO: 210402
  derived and/or modified CDS sequence (opt5) from neuraminidase__InfluenzaA__AEV53563

SEQ ID NO: 213371 - RNA, 1410 nt, Artificial Sequence
  derived and/or modified CDS sequence (opt5) from neuraminidase__InfluenzaA__AEV53565
augaaccccaaucagaagaucauuaccaucggcagcgugugcaugacaauugggauggccaaccugauccuccaaauuggaaauaucaucuccauuuggaucucucacagcauucagcugggcaaccagaaucagaucgagacguguaaccaauccgucauuaccuacgaaaauaacacauggguuaaucagaccuaugugaacaucucuaauacaaacuucgcugccgggcagagcguggucuccgugaaacuugcgggaaauucuagccugugcccuguuaacggcugggcuauuuacuccaaggacaauagcaucagaaucgggucuaaaggagauguguuugucauucgggagccguucaucuccuguagcccccucgaaugccgcaccuuuuuccugacacagggcgcccuucugaacgacaagcauucuaacggcaccauuaaagauagauccccuuaucggacgcucaugagcugucccaucggggaggugccuucucccuacaauucccgcuuugaaagcguugccugguccgcuucugccugccacgacggaauuaacuggcugaccaucggcaucagcgggccugauaauggagcuguggccguccugaaguauaacggcauuaucacagacaccauuaaguccuggagaaauaacauccuccggacacaagagagcgagugugcgugcgugaaugggucuuguuucaccgugaugacggauggaccguccgacggccaggccagcuacaaaauuuuucgcaucgaaaagggcaaaaucgucaagucuguugagaugaacgcucccaauuaucauuacgaagagugcagcuguuacccugauuccucugagauuacaugcgugugcagagacaacuggcacgggagcaaucggcccuggguguccuucaaccagaaucuggaauaucagaucggauacauuuguagcggcaucuuuggggauaacccucgccccaaugacaaaaccggaucuugcggcccggucuccagcaacggggccaacggagugaagggcuucucuuuuaaguauggcaaugggguuuggauuggaagaacaaaauccaucagcucccggaacggcuucgagaugauuugggauccuaauggguggaccggaaccgacaacaauuuuucuaucaagcaagacaucgugggcauuaacgaauggagcggguacuccggcucuuucguccagcaucccgagcuuacaggacuggauuguauccgcccuugcuucuggguggaacucauuagaggccggcccaaagagaauacgaucuggaccagcggguccagcauuucuuuuuguggaguuaacuccgacacagugggcuggagcuggcccgauggggcugagcugccucuuaccaucgacaaguga

SEQ ID NO: 213372 - RNA, 1410 nt, Artificial Sequence
  derived and/or modified CDS sequence (opt5) from neuraminidase__InfluenzaA__AEV53567
augaaccccaaucagaagaucauuaccaucggcagcgugugcaugacaauugggauggccaaccugauccuccaaauuggaaauaucaucuccauuuggaucucucacagcauucagcugggcaaccagaaucagaucgagacguguaaccaauccgucauuaccuacgaaaauaacacauggguuaaucagaccuaugugaacaucucuaauacaaacuucgcugccgggcagagcguggucuccgugaaacuugcgggaaauucuagccugugcccuguuuccggcugggcuauuuacagcaaggacaacucuaucagaaucggguccaaaggagauguguuugucauucgggagccguucaucagcuguucuccccucgaaugccgcaccuuuuuccugacacagggcgcccuucugaaugacaagcauuccaacggcaccauuaaagauagaagcccuuaucggacgcucaugucuugucccaucggggaggugccuucccccuacaacagccgcuuugaauccguugccuggucugcuagcgccugccacgacggaauuaauuggcugaccaucggcaucuccgggccugauaacggagcuguggccguccugaaguauaauggcauuaucacagacaccauuaagagcuggagaaacaauauccuccggacacaagagucugagugugcgugcgugaacggguccuguuucaccgugaugacggauggaccgagcgacggccaggccucuuacaaaauuuuucgcaucgaaaagggcaaaaucgucaagagcguugagaugaaugcucccaacuaucauuacgaagagugcuccuguuacccugauucuagcgagauuacaugcgugugcagagacaauuggcacggguccaaccggcccugggugagcuucaaucagaaccuggaauaucagaucggauacauuuguucuggcaucuuuggggauaauccucgccccaacgacaaaaccggauccugcggcccggucagcucuaauggggccaacggagugaagggcuucuccuuuaaguauggcaacggggcuuggauuggaagaacaaaaagcaucuccucucggaauggcuucgagaugauuugggauccuaacggguggaccgaaaccgacaauaacuuuagcaucaagcaagacaucguuggaauuaaugagugguccggcuacucugggagcuucgugcagcaucccgaacuuacaggccugaacuguauccgcccuugcuucugggucgagcucauuagaggacggcccaaagagaauacgaucuggaccuccggcagcucuauuuccuuuuguggggugaacagcgauacaguuggauggucuuggcccgacggcgccgaacugccuuucaccaucgauaaguga

SEQ ID NO: 213373 - RNA, 1410 nt, Artificial Sequence; identical to SEQ ID NO: 208810
  derived and/or modified CDS sequence (opt5) from neuraminidase__InfluenzaA__AEV53569

SEQ ID NO: 213374 - RNA, 1410 nt, Artificial Sequence; identical to SEQ ID NO: 212249
  derived and/or modified CDS sequence (opt5) from neuraminidase__InfluenzaA__AEV53571

SEQ ID NO: 213375 - RNA, 1410 nt, Artificial Sequence; identical to SEQ ID NO: 212249
  derived and/or modified CDS sequence (opt5) from neuraminidase__InfluenzaA__AEV53573

SEQ ID NO: 213376 - RNA, 1410 nt, Artificial Sequence; identical to SEQ ID NO: 210611
  derived and/or modified CDS sequence (opt5) from neuraminidase__InfluenzaA__AEV53575

SEQ ID NO: 213377 - RNA, 1410 nt, Artificial Sequence
  derived and/or modified CDS sequence (opt5) from neuraminidase__InfluenzaA__AEV53577
augaaccccaaucagaagaucauuaccaucggcagcgugugcaugacaauugggauggccaaccugauccuccaaauuggaaauaucaucuccauuuggaucucucacagcauucagcugggcaaccagaaucagaucgagacguguaaccaauccgucauuaccuacgaaaauaacacauggguuaaucagaccuaugugaacaucucuaauacaaacuucgcugccgggcagagcguggucuccgugaaacuugcgggaaauucuagccugugcccuguuuccggcugggcuauuuacagcaaggacaacucuaucagaaucggguccaaaggagauguguuugucauucgggagccguucaucagcuguucuccccucgaaugccgcaccuuuuuccugacacagggcgcccuucugaaugacaagcauuccaacggcaccauuaaagauagaagcccuuaucggacgcucaugucuugucccaucggggaggugccuucccccuacaacagccgcuuugaauccguugccuggucugcuagcgccugccacgacggaauuaauuggcugaccaucggcaucuccgggccugauaacggagcuguggccguccugaaguauaauggcauuaucacagacaccauuaagagcuggagaaacaauauccuccggacacaagagucugagugugcgugcgugaacggguccuguuucaccgugaugacggauggaccgagcgacggccaggccucuuacaaaauuuuucgcaucgaaaagggcaaaaucgucaagagcguugagaugaaugcucccaacuaucauuacgaagagugcuccuguuacccugauucuagcgagauuacaugcgugugcagagacaauuggcacggguccaaccggcccugggugagcuucaaucagaaccuggaauaucagaucggauacauuuguucuggcaucuuuggggauaauccucgccccaacgacaaaaccggauccugcggcccggucagcucuaauggggccaacggagugaagggcuucuccuuuaaguauggcaacgggguuuggauuggaagaacaaaaagcaucuccucucggaauggcuucgagaugauuugggauccuaacggguggaccggaaccgacaauaacuuuagcaucaagcaagacaucgugggcauuaaugaaugguccggguacucuggcagcuucguccagcagcccgagcuuacaggacuggauuguauccgcccuugcuucuggguggaacucauuagaggccggcccaaagagaacacgaucuggaccuccgggagcucuauuuccuuuuguggaguuaauagcgacacagugggcuggucuuggcccgauggggcugagcugccuuucaccaucgacaaguga

SEQ ID NO: 213378 - RNA, 1410 nt, Artificial Sequence; identical to SEQ ID NO: 213316
  derived and/or modified CDS sequence (opt5) from neuraminidase__InfluenzaA__AEV53579

SEQ ID NO: 213379 - RNA, 1410 nt, Artificial Sequence; identical to SEQ ID NO: 210611
  derived and/or modified CDS sequence (opt5) from neuraminidase__InfluenzaA__AEV53581

SEQ ID NO: 213380 - RNA, 1410 nt, Artificial Sequence; identical to SEQ ID NO: 210272
  derived and/or modified CDS sequence (opt5) from neuraminidase__InfluenzaA__AEV53583

SEQ ID NO: 213381 - RNA, 1410 nt, Artificial Sequence; identical to SEQ ID NO: 210272
  derived and/or modified CDS sequence (opt5) from neuraminidase__InfluenzaA__AEV53585

SEQ ID NO: 213382 - RNA, 1410 nt, Artificial Sequence
  derived and/or modified CDS sequence (opt5) from neuraminidase__InfluenzaA__AEV76877
augaaccccaaucagaagaucauuaccaucggcagcgugugcaugacaauugggauggccaaccugauccuccaaauuggaaauaucaucuccauuuggaucucucacagcauucagcugggcaaccagucccagaucgagacguguaaucaaucugucauuaccuacgaaaacaauacauggguuaaccagaccuaugugaauaucagcacaaccaacuucgcugccgggcaguccguggucucugugaaacuugcgggaaauagcucccugugcccuguuagcggcugggcuauuuacucuaaggacaacuccaucagaaucgggagcaaaggagauguguuugucauucgggagccguucaucucuuguagcccccucgaaugccgcacauuuuuccugacccagggcgcccuucugaaugacaagcauuccaacggcacgauuaaagauagaucuccuuaucggacccucauguccugucccaucggggaggugccuagccccuacaauucccgcuuugaaucuguugccuggagcgcuuccgccugccacgacggaauuaacuggcugacaaucggcaucagcgggccugauaacggagcuguggccguccugaaguauaauggcauuaucaccgacacaauuaagucuuggagaaacaauauccuccggacccaagaguccgagugugcgugcgugaacgggagcuguuucacgauuaugacagauggaccgucugacggccaggccagcuacaaaaucuuucgcaucgaaaagggcaaaauugugaaguccgucgagaugaaugcucccaacuaucauuacgaagagugcucuuguuacccugauagcuccgagauuaccugcguuugcagagacaauuggcacgggagcaaccggcccugggugucuuucaaucagaaccuggaauaucagaucggauacaucuguuccggcauuuuuggggauaauccucgccccaacgacaaaacaggaagcugcggcccggugucuuccaauggggccaacggagucaagggcuucagcuuuaaguauggcaaugggguguggaucggaagaaccaaauccauuucuagccggaagggcuucgagaugaucugggauccuaacggguggaccggaacagacaacaauuuuuccaucaaacaagacauuguuggcaucaacgaauggucuggguacagcggcuccuucgugcagcaucccgagcuuacgggacuggauuguauucgcccuugcuucugggucgaacucaucagaggccggcccaaggagaauaccauuuggacaagcgggucuuccaucagcuuuuguggagugaacucugacaccguuggcugguccuggcccgauggggcugagcugccuuucacaaucgacaaauga

SEQ ID NO: 213383 - RNA, 1410 nt, Artificial Sequence; identical to SEQ ID NO: 208810
  derived and/or modified CDS sequence (opt5) from neuraminidase__InfluenzaA__AEW10576

SEQ ID NO: 213384 - RNA, 1410 nt, Artificial Sequence; identical to SEQ ID NO: 208810
  derived and/or modified CDS sequence (opt5) from neuraminidase__InfluenzaA__AEW10586

SEQ ID NO: 213385 - RNA, 1410 nt, Artificial Sequence; identical to SEQ ID NO: 208810
  derived and/or modified CDS sequence (opt5) from neuraminidase__InfluenzaA__AEW10596

SEQ ID NO: 213386 - RNA, 1410 nt, Artificial Sequence; identical to SEQ ID NO: 208810
  derived and/or modified CDS sequence (opt5) from neuraminidase__InfluenzaA__AEW10606

SEQ ID NO: 213387 - RNA, 1410 nt, Artificial Sequence; identical to SEQ ID NO: 209697
  derived and/or modified CDS sequence (opt5) from neuraminidase__InfluenzaA__AEW10616

SEQ ID NO: 213388 - RNA, 1410 nt, Artificial Sequence
  derived and/or modified CDS sequence (opt5) from neuraminidase__InfluenzaA__AEW10626
augaaccccaaucagaagaucauuaccaucggcagcgugugcaugacaauugggauggccaaccugauccuccaaauuggaaauaucaucuccauuuggaucucucacagcauucagcugggcaaccagaaucagaucgagacguguaaccaauccgucauuaccuacgaaaauaacacauggguuaaucagaccuaugugaacaucucuaauacaaacuucgcugccgggcagagcguggucuccgugaaacuugcgggaaauucuagccugugcccuguuuccggcugggcuauuuacagcaaggacaacucuaucagaaucggguccaaaggagauguguuugucauucgggagccguucaucagcuguucuccccucgaaugccgcaccuuuuuccugacacagggcgcccuucugaaugacaagcauuccaacggcaccauuaaagauagaagcccuuaucggacgcucaugucuugucccaucggggaggugccuucccccuacaacagccgcuuugaauccguugccuggucugcuagcgccugccacgacggaauuaauuggcugaccaucggcaucuccgggccugauaacggagcuauggccgugcugaaguauaauggcauuaucacagacaccauuaagagcuggagaaacaauauccuccggacacaagagucugagugugcgugcgucaacggguccuguuucaccgugaugacggauggaccgagcgacggccaggccucuuacaaaauuuuucgcaucgaaaagggcaaaaucgucaagagcguggagaugaaugcucccaacuaucauuacgaagagugcuccuguuacccugauucuagcgagauuacaugcguuugcagagacaauuggcacggguccaaccggcccugggugagcuucaaucagaaccuggaauaucagaucggauacauuuguucuggcaucuuuggggauaauccucgccccaacgacaaaaccggauccugcggcccggugagcucuaauggggccaacggagucaagggcuucuccuuuaaguauggcaacgggguguggauuggaagaacaaaaagcaucuccucucggaauggcuucgagaugauuugggauccuaacggguggaccggaaccgacaauaacuuuagcaucaagcaagacaucguuggcauuaaugaaugguccggguacucuggcagcuucgugcagcaucccgagcuuacaggacuggauuguauccgcccuugcuucugggucgaacucauuagaggccggcccaaagagaacacgaucuggaccuccgggagcucuauuuccuuuuguggagugaauagcgacacaguuggcuggucuuggcccgauggggcugagcugccuuucaccaucgacaaguga

SEQ ID NO: 213389 - RNA, 1410 nt, Artificial Sequence; identical to SEQ ID NO: 208810
  derived and/or modified CDS sequence (opt5) from neuraminidase__InfluenzaA__AEW10636

SEQ ID NO: 213390 - RNA, 1410 nt, Artificial Sequence; identical to SEQ ID NO: 208800
  derived and/or modified CDS sequence (opt5) from neuraminidase__InfluenzaA__AEW10646

SEQ ID NO: 213391 - RNA, 1410 nt, Artificial Sequence; identical to SEQ ID NO: 208810
  derived and/or modified CDS sequence (opt5) from neuraminidase__InfluenzaA__AEW10656

SEQ ID NO: 213392 - RNA, 1410 nt, Artificial Sequence; identical to SEQ ID NO: 208810
  derived and/or modified CDS sequence (opt5) from neuraminidase__InfluenzaA__AEW10666

SEQ ID NO: 213393 - RNA, 1410 nt, Artificial Sequence; identical to SEQ ID NO: 208810
  derived and/or modified CDS sequence (opt5) from neuraminidase__InfluenzaA__AEW10676

SEQ ID NO: 213394 - RNA, 1410 nt, Artificial Sequence; identical to SEQ ID NO: 208810
  derived and/or modified CDS sequence (opt5) from neuraminidase__InfluenzaA__AEW10686

SEQ ID NO: 213395 - RNA, 1410 nt, Artificial Sequence; identical to SEQ ID NO: 208810
  derived and/or modified CDS sequence (opt5) from neuraminidase__InfluenzaA__AEW10696

SEQ ID NO: 213396 - RNA, 1410 nt, Artificial Sequence; identical to SEQ ID NO: 208810
  derived and/or modified CDS sequence (opt5) from neuraminidase__InfluenzaA__AEW10706

SEQ ID NO: 213397 - RNA, 1410 nt, Artificial Sequence; identical to SEQ ID NO: 208800
  derived and/or modified CDS sequence (opt5) from neuraminidase__InfluenzaA__AEW10716

SEQ ID NO: 213398 - RNA, 1410 nt, Artificial Sequence; identical to SEQ ID NO: 208810
  derived and/or modified CDS sequence (opt5) from neuraminidase__InfluenzaA__AEW10726

SEQ ID NO: 213399 - RNA, 1410 nt, Artificial Sequence; identical to SEQ ID NO: 208810
  derived and/or modified CDS sequence (opt5) from neuraminidase__InfluenzaA__AEW10736

SEQ ID NO: 213400 - RNA, 1410 nt, Artificial Sequence; identical to SEQ ID NO: 208800
  derived and/or modified CDS sequence (opt5) from neuraminidase__InfluenzaA__AEW10746

SEQ ID NO: 213401 - RNA, 1410 nt, Artificial Sequence; identical to SEQ ID NO: 208800
  derived and/or modified CDS sequence (opt5) from neuraminidase__InfluenzaA__AEW10756

SEQ ID NO: 213402 - RNA, 1410 nt, Artificial Sequence; identical to SEQ ID NO: 208800
  derived and/or modified CDS sequence (opt5) from neuraminidase__InfluenzaA__AEW10766

SEQ ID NO: 213403 - RNA, 1410 nt, Artificial Sequence; identical to SEQ ID NO: 208800
  derived and/or modified CDS sequence (opt5) from neuraminidase__InfluenzaA__AEW10776

SEQ ID NO: 213404 - RNA, 1410 nt, Artificial Sequence; identical to SEQ ID NO: 208800
  derived and/or modified CDS sequence (opt5) from neuraminidase__InfluenzaA__AEW10786

SEQ ID NO: 213405 - RNA, 1410 nt, Artificial Sequence; identical to SEQ ID NO: 208800
  derived and/or modified CDS sequence (opt5) from neuraminidase__InfluenzaA__AEW10796

SEQ ID NO: 213406 - RNA, 1410 nt, Artificial Sequence; identical to SEQ ID NO: 208800
  derived and/or modified CDS sequence (opt5) from neuraminidase__InfluenzaA__AEW10806

SEQ ID NO: 213407 - RNA, 1410 nt, Artificial Sequence; identical to SEQ ID NO: 208800
  derived and/or modified CDS sequence (opt5) from neuraminidase__InfluenzaA__AEW10816

SEQ ID NO: 213408 - RNA, 1410 nt, Artificial Sequence; identical to SEQ ID NO: 208810
  derived and/or modified CDS sequence (opt5) from neuraminidase__InfluenzaA__AEW10826

SEQ ID NO: 213409 - RNA, 1410 nt, Artificial Sequence; identical to SEQ ID NO: 208800
  derived and/or modified CDS sequence (opt5) from neuraminidase__InfluenzaA__AEW10836

SEQ ID NO: 213410 - RNA, 1410 nt, Artificial Sequence; identical to SEQ ID NO: 208800
  derived and/or modified CDS sequence (opt5) from neuraminidase__InfluenzaA__AEW10846

SEQ ID NO: 213411 - RNA, 1410 nt, Artificial Sequence; identical to SEQ ID NO: 208800
  derived and/or modified CDS sequence (opt5) from neuraminidase__InfluenzaA__AEW10856

SEQ ID NO: 213412 - RNA, 1410 nt, Artificial Sequence; identical to SEQ ID NO: 208800
  derived and/or modified CDS sequence (opt5) from neuraminidase__InfluenzaA__AEW10866

SEQ ID NO: 213413 - RNA, 1410 nt, Artificial Sequence; identical to SEQ ID NO: 208800
  derived and/or modified CDS sequence (opt5) from neuraminidase__InfluenzaA__AEW10876

SEQ ID NO: 213414 - RNA, 1410 nt, Artificial Sequence; identical to SEQ ID NO: 208800
  derived and/or modified CDS sequence (opt5) from neuraminidase__InfluenzaA__AEW10886

SEQ ID NO: 213415 - RNA, 1410 nt, Artificial Sequence; identical to SEQ ID NO: 208800
  derived and/or modified CDS sequence (opt5) from neuraminidase__InfluenzaA__AEW10896

SEQ ID NO: 213416 - RNA, 1410 nt, Artificial Sequence; identical to SEQ ID NO: 208800
  derived and/or modified CDS sequence (opt5) from neuraminidase__InfluenzaA__AEW10906

SEQ ID NO: 213417 - RNA, 1410 nt, Artificial Sequence; identical to SEQ ID NO: 208800
  derived and/or modified CDS sequence (opt5) from neuraminidase__InfluenzaA__AEW10916

SEQ ID NO: 213418 - RNA, 1410 nt, Artificial Sequence
  derived and/or modified CDS sequence (opt5) from neuraminidase__InfluenzaA__AEW10926
augaaccccaaucagaagaucauuaccaucggcagcgugugcaugacaauugggauggccaaccugauccuccaaauuggaaauaucaucuccauuuggaucucucacagcauucagcugggcaaccagaaucagaucgagacguguaaccaauccgucauuaccuacgaaaauaacacauggguuaaucagaccuaugugaacaucucuaauacaaacuucgcugccgggcagagcguggucuccgugaaacuugcgggaaauucuagccugugcccuguuuccggcugggcuauuuacagcaaggacaacucuaucagaaucggguccaaaggagauguguuuauuauccgggagccguucauuagcuguucuccccucgaaugccgcaccuuuuuccugacacagggcgcccuucugaaugacaagcauuccaacggcaccaucaaagauagaagcccuuaucggacgcucaugucuugucccauuggggaggucccuucccccuacaacagccgcuuugaauccguggccuggucugcuagcgccugccacgacggaaucaauuggcugaccaucggcauuuccgggccugauaacggagcuguugccgugcugaaguauaauggcaucauuacagacaccaucaagagcuggagaaacaauauucuccggacacaagagucugagugugcgugcgucaacggguccuguuucaccgugaugacggauggaccgagcgacggccaggccucuuacaaaaucuuucgcaucgaaaagggcaaaauugucaagagcguggagaugaaugcucccaacuaucauuacgaagagugcuccuguuacccugauucuagcgagaucacaugcguuugcagagacaauuggcacggguccaaccggcccugggugagcuucaaucagaaccuggaauaucagauuggauacaucuguucuggcauuuuuggggauaauccucgccccaacgacaaaaccggauccugcggcccggugagcucuaauggggccaacggagucaagggcuucuccuuuaaguauggcaacgggguguggaucggaagaacaaaaagcauuuccucucggaauggcuucgagaugaucugggauccuaacggguggaccggaaccgacaauaacuuuagcaucaagcaagacauuguuggcaucaaugaaugguccggguacucuggcagcuucgugcagcaucccgagcuuacaggacuggauuguauucgcccuugcuucugggucgaacucaucagaggccggcccaaagagaacacgauuuggaccuccgggagcucuaucuccuuuuguggagugaauagcgacacaguuggcuggucuuggcccgauggggcugagcugccuuucaccaucgacaaguga

SEQ ID NO: 213419 - RNA, 1410 nt, Artificial Sequence; identical to SEQ ID NO: 208800
  derived and/or modified CDS sequence (opt5) from neuraminidase__InfluenzaA__AEW10936

SEQ ID NO: 213420 - RNA, 1410 nt, Artificial Sequence; identical to SEQ ID NO: 208800
  derived and/or modified CDS sequence (opt5) from neuraminidase__InfluenzaA__AEW10946

SEQ ID NO: 213421 - RNA, 1410 nt, Artificial Sequence; identical to SEQ ID NO: 208810
  derived and/or modified CDS sequence (opt5) from neuraminidase__InfluenzaA__AEW10956

SEQ ID NO: 213422 - RNA, 1410 nt, Artificial Sequence; identical to SEQ ID NO: 208810
  derived and/or modified CDS sequence (opt5) from neuraminidase__InfluenzaA__AEW10966

SEQ ID NO: 213423 - RNA, 1410 nt, Artificial Sequence; identical to SEQ ID NO: 208800
  derived and/or modified CDS sequence (opt5) from neuraminidase__InfluenzaA__AEW10976

SEQ ID NO: 213424 - RNA, 1410 nt, Artificial Sequence; identical to SEQ ID NO: 208810
  derived and/or modified CDS sequence (opt5) from neuraminidase__InfluenzaA__AEW10986

SEQ ID NO: 213425 - RNA, 1410 nt, Artificial Sequence; identical to SEQ ID NO: 208810
  derived and/or modified CDS sequence (opt5) from neuraminidase__InfluenzaA__AEW10996

SEQ ID NO: 213426 - RNA, 1410 nt, Artificial Sequence; identical to SEQ ID NO: 208810
  derived and/or modified CDS sequence (opt5) from neuraminidase__InfluenzaA__AEW11006

SEQ ID NO: 213427 - RNA, 1410 nt, Artificial Sequence; identical to SEQ ID NO: 208810
  derived and/or modified CDS sequence (opt5) from neuraminidase__InfluenzaA__AEW11016

SEQ ID NO: 213428 - RNA, 1410 nt, Artificial Sequence; identical to SEQ ID NO: 208810
  derived and/or modified CDS sequence (opt5) from neuraminidase__InfluenzaA__AEW11026

SEQ ID NO: 213429 - RNA, 1410 nt, Artificial Sequence; identical to SEQ ID NO: 208810
  derived and/or modified CDS sequence (opt5) from neuraminidase__InfluenzaA__AEW11036

SEQ ID NO: 213430 - RNA, 1410 nt, Artificial Sequence; identical to SEQ ID NO: 208800
  derived and/or modified CDS sequence (opt5) from neuraminidase__InfluenzaA__AEW11046

SEQ ID NO: 213431 - RNA, 1410 nt, Artificial Sequence; identical to SEQ ID NO: 208810
  derived and/or modified CDS sequence (opt5) from neuraminidase__InfluenzaA__AEW11056

SEQ ID NO: 213432 - RNA, 1410 nt, Artificial Sequence; identical to SEQ ID NO: 209614
  derived and/or modified CDS sequence (opt5) from neuraminidase__InfluenzaA__AEW11066

SEQ ID NO: 213433 - RNA, 1410 nt, Artificial Sequence; identical to SEQ ID NO: 209614
  derived and/or modified CDS sequence (opt5) from neuraminidase__InfluenzaA__AEW11076

SEQ ID NO: 213434 - RNA, 1410 nt, Artificial Sequence; identical to SEQ ID NO: 209614
  derived and/or modified CDS sequence (opt5) from neuraminidase__InfluenzaA__AEW11086

SEQ ID NO: 213435 - RNA, 1410 nt, Artificial Sequence; identical to SEQ ID NO: 209614
  derived and/or modified CDS sequence (opt5) from neuraminidase__InfluenzaA__AEW11096

SEQ ID NO: 213436 - RNA, 1410 nt, Artificial Sequence; identical to SEQ ID NO: 209614
  derived and/or modified CDS sequence (opt5) from neuraminidase__InfluenzaA__AEW11106

SEQ ID NO: 213437 - RNA, 1410 nt, Artificial Sequence; identical to SEQ ID NO: 208810
  derived and/or modified CDS sequence (opt5) from neuraminidase__InfluenzaA__AEW11116

SEQ ID NO: 213438 - RNA, 1410 nt, Artificial Sequence; identical to SEQ ID NO: 209614
  derived and/or modified CDS sequence (opt5) from neuraminidase__InfluenzaA__AEW11126

SEQ ID NO: 213439 - RNA, 1410 nt, Artificial Sequence; identical to SEQ ID NO: 209518
  derived and/or modified CDS sequence (opt5) from neuraminidase__InfluenzaA__AEW11136

SEQ ID NO: 213440 - RNA, 1410 nt, Artificial Sequence; identical to SEQ ID NO: 208810
  derived and/or modified CDS sequence (opt5) from neuraminidase__InfluenzaA__AEW11146

SEQ ID NO: 213441 - RNA, 1410 nt, Artificial Sequence; identical to SEQ ID NO: 208810
  derived and/or modified CDS sequence (opt5) from neuraminidase__InfluenzaA__AEW11156

SEQ ID NO: 213442 - RNA, 1410 nt, Artificial Sequence; identical to SEQ ID NO: 209614
  derived and/or modified CDS sequence (opt5) from neuraminidase__InfluenzaA__AEW11166

SEQ ID NO: 213443 - RNA, 1410 nt, Artificial Sequence; identical to SEQ ID NO: 209614
  derived and/or modified CDS sequence (opt5) from neuraminidase__InfluenzaA__AEW11176

SEQ ID NO: 213444 - RNA, 1410 nt, Artificial Sequence; identical to SEQ ID NO: 208810
  derived and/or modified CDS sequence (opt5) from neuraminidase__InfluenzaA__AEW11186

SEQ ID NO: 213445 - RNA, 1410 nt, Artificial Sequence; identical to SEQ ID NO: 209614
  derived and/or modified CDS sequence (opt5) from neuraminidase__InfluenzaA__AEW11196

SEQ ID NO: 213446 - RNA, 1410 nt, Artificial Sequence; identical to SEQ ID NO: 208810
  derived and/or modified CDS sequence (opt5) from neuraminidase__InfluenzaA__AEW11206

SEQ ID NO: 213447 - RNA, 1410 nt, Artificial Sequence; identical to SEQ ID NO: 208810
  derived and/or modified CDS sequence (opt5) from neuraminidase__InfluenzaA__AEW11216

SEQ ID NO: 213448 - RNA, 1410 nt, Artificial Sequence; identical to SEQ ID NO: 209518
  derived and/or modified CDS sequence (opt5) from neuraminidase__InfluenzaA__AEW11226

SEQ ID NO: 213449 - RNA, 1410 nt, Artificial Sequence; identical to SEQ ID NO: 208810
  derived and/or modified CDS sequence (opt5) from neuraminidase__InfluenzaA__AEW11236

SEQ ID NO: 213450 - RNA, 1410 nt, Artificial Sequence; identical to SEQ ID NO: 208810
  derived and/or modified CDS sequence (opt5) from neuraminidase__InfluenzaA__AEW11246

SEQ ID NO: 213451 - RNA, 1410 nt, Artificial Sequence; identical to SEQ ID NO: 209614
  derived and/or modified CDS sequence (opt5) from neuraminidase__InfluenzaA__AEW11255

SEQ ID NO: 213452 - RNA, 1410 nt, Artificial Sequence; identical to SEQ ID NO: 209614
  derived and/or modified CDS sequence (opt5) from neuraminidase__InfluenzaA__AEW11265

SEQ ID NO: 213453 - RNA, 1410 nt, Artificial Sequence; identical to SEQ ID NO: 208810
  derived and/or modified CDS sequence (opt5) from neuraminidase__InfluenzaA__AEW11275

SEQ ID NO: 213454 - RNA, 1410 nt, Artificial Sequence
  derived and/or modified CDS sequence (opt5) from neuraminidase__InfluenzaA__AEW11285
augaaccccaaucagaagaucauuaccaucggcagcgugugcaugacaauugggauggccaaccugauccuccaaauuggaaauaucaucuccauuuggaucucucacagcauucagcugggcaaccagaaucagaucgagacguguaaccaauccgucauuaccuacgaaaauaacacauggguuaaucagaccuaugugaacaucucuaauacaaacuucgcugccgggcagagcguggucuccgugaaacuugcgggaaauucuagccugugcccuguuuccggcugggcuauuuacagcaaggacaacucugugagaaucggguccaaaggagaugucuuugugauccgggagccguucauuagcuguucuccccucgaaugccgcaccuuuuuccugacacagggcgcccuucugaaugacaagcauuccaacggcaccaucaaagauagaagcccuuaucggacgcucaugucuugucccauuggggagguuccuucccccuacaacagccgcuuugaauccguggccuggucugcuagcgccugccacgacggaaucaauuggcugaccauuggcaucuccgggccugauaacggagcugucgccgugcugaaguauaauggcaucauuacagacaccaucaagagcuggagaaacaauauucuccggacacaagagucugagugugcgugcgugaacggguccuguuucaccgucaugacggauggaccgagcaauggccaggccucuuacaaaaucuuucgcauugaaaagggcaaaaucguuaagagcguggagaugaacgcucccaauuaucauuacgaagagugcuccuguuacccugacucuagcgagaucacaugcgugugcagagauaacuggcacggguccaaucggcccugggucagcuucaaccagaaucuggaauaucagauuggauacaucuguucuggcauuuuuggggacaacccucgccccaaugauaaaaccggauccugcggcccggugagcucuaacggggccaacggaguuaagggcuucuccuuuaaguauggcaaugggguguggaucggaagaacaaaaagcauuuccucucggaacggcuucgagaugaucugggacccuaauggguggaccggaaccgauaacaauuuuagcauuaagcaagacaucgucggcaucaacgaaugguccggguacucuggcagcuucgugcagaaucccgagcuuacaggacuggacuguauucgcccuugcuucuggguugaacucaucagaggccggcccaaagagaacacgauuuggaccuccgggagcucuaucuccuuuuguggagugaauagcgauacagucggcuggucuuggcccgacggggcugagcugccuuucaccauugauaaguga

SEQ ID NO: 213455 - RNA, 1410 nt, Artificial Sequence; identical to SEQ ID NO: 209614
  derived and/or modified CDS sequence (opt5) from neuraminidase__InfluenzaA__AEW11295

SEQ ID NO: 213456 - RNA, 1410 nt, Artificial Sequence; identical to SEQ ID NO: 208810
  derived and/or modified CDS sequence (opt5) from neuraminidase__InfluenzaA__AEW11305

SEQ ID NO: 213457 - RNA, 1410 nt, Artificial Sequence; identical to SEQ ID NO: 209614
  derived and/or modified CDS sequence (opt5) from neuraminidase__InfluenzaA__AEW11315

SEQ ID NO: 213458 - RNA, 1410 nt, Artificial Sequence; identical to SEQ ID NO: 208810
  derived and/or modified CDS sequence (opt5) from neuraminidase__InfluenzaA__AEW11325

SEQ ID NO: 213459 - RNA, 1410 nt, Artificial Sequence; identical to SEQ ID NO: 208810
  derived and/or modified CDS sequence (opt5) from neuraminidase__InfluenzaA__AEW25299

SEQ ID NO: 213460 - RNA, 1410 nt, Artificial Sequence; identical to SEQ ID NO: 208810
  derived and/or modified CDS sequence (opt5) from neuraminidase__InfluenzaA__AEW25308

SEQ ID NO: 213461 - RNA, 1410 nt, Artificial Sequence; identical to SEQ ID NO: 209883
  derived and/or modified CDS sequence (opt5) from neuraminidase__InfluenzaA__AEW25317

SEQ ID NO: 213462 - RNA, 1410 nt, Artificial Sequence; identical to SEQ ID NO: 208810
  derived and/or modified CDS sequence (opt5) from neuraminidase__InfluenzaA__AEW25324

SEQ ID NO: 213463 - RNA, 1410 nt, Artificial Sequence
  derived and/or modified CDS sequence (opt5) from neuraminidase__InfluenzaA__AEW25327
augaaccccaaucagaagaucauuaccaucggcagcgugugcaugacaauugggauggccaaccugauccuccaaauuggaaauaucaucuccauuuggaucucucacagcauucagcugggcaaccagaaucagaucgagacguguaaccaauccgucauuaccuacgaaaauaacacauggguuaaucagaccuaugugaacaucucuaauacaaacuucgcugccgggcagagcguggucuccgugaaacuugcgggaaauucuagccugugcccuguuuccggcugggcuauuuacagcaaggacaacucuaucagaaucggguccaaaggagauguguuugucauucgggagccguucaucagcuguucuccccucgaaugccgcaccuuuuuccugacacagggcgcccuucugaaugacaagcauuccaacggcaccauuaaagauagaagcccuuaucggacgcucaugucuugucccaucggggaggugccucccccuuacaacucccgcuuugaaagcguugccugguccgcuucugccugccacgacggaauuaauuggcugaccaucggcaucagcgggccggauaacggagcuguggccguccugaaguauaauggcauuaucacagacaccauuaaguccuggagaaacaauauccuccggacacaagagagcgagugugcgugcgugaacgggucuuguuucaccgugaugacggauggacccuccgacggccaggccagcuacaaaauuuuucgcaucgaaaagggcaaaaucgucaagucuguugagaugaaugcuccuaacuaucauugcgaagaguguagcugcuaccccgauuccucugagauuacaugcguguguagagacaauuggcacgggagcaaccggccuuggguguccuucaaucagaaccuggaauaccagaucggauauauuugcagcggcaucuuuggggauaauccccgcccgaacgacaaaaccggaucuuguggcccugucuccagcaauggggccaacggagugaagggcuucucuuuuaaguacggcaacgggguuuggauuggaagaacaaaauccaucagcucccggaauggcuucgagaugauuugggaucccaacggguggaccggaaccgacaauaacuuuucuaucaagcaagacaucgugggcauuaaugaauggagcggguauuccggcucuuucguccagcauccugagcuuacaggacuggauugcauccgccccuguuucuggguggaacucauuagaggccggcccaaagagaacacgaucuggaccagcggguccagcauuucuuuuugcggaguuaauuccgacacagugggcuggagcuggccugauggggcugagcugccguucaccaucgacaaguga

SEQ ID NO: 213464 - RNA, 1410 nt, Artificial Sequence
  derived and/or modified CDS sequence (opt5) from neuraminidase__InfluenzaA__AEW25333
augaaccccaaucagaagaucauuaccaucggcagcgugugcaugacaauugggauggccaaccugauccuccaaauuggaaauaucaucuccauuuggaucucucacagcauucagcugggcaaccagaaucagaucgagacguguaaccaauccgucauuaccuacgaaaauaacacauggguuaaucauaccuaugugaacaucucuaauacaaacuucgcugccgggcagagcguggucuccgugaaacuugcgggaaauucuagccugugcccuguuuccggcugggcuauuuacagcaaggacaacucuaucagaaucggguccaaaggagauguguuugucauucgggagccguucaucagcuguucuccccucgaaugccgcaccuuuuuccugacacagggcgcccuucugaaugacaagcacuccaacggcaccauuaaagauagaagcccuuaucggacgcucaugucuugucccaucggggaggugccuucccccuacaacagccgcuuugaauccguugccuggucugcuagcgccugccaugacggaauuaauuggcugaccaucggcaucuccgggccugauaacggagcuguggccguccugaaguauaauggcauuaucacagacaccauuaagagcuggagaaacaauauccuccggacacaggagucugagugugcgugcgugaacggguccuguuucaccgugaugacggauggaccgagcgacggccaagccucuuacaaaauuuuucgcaucgaaaagggcaaaaucgucaagagcguugagaugaaugcucccaacuaucacuacgaagagugcuccuguuacccugauucuagcgagauuacaugcgugugcagagacaauuggcauggguccaaccggcccugggugagcuucaaucagaaccuggaauaucagaucggauacauuuguucuggcaucuuuggggauaauccucgccccaacgacaaaaccggauccugcggcccggucagcucuaauggggccaacggagugaagggcuucuccuuuaaguauggcaacgggguuugggugggaagaacaaaaagcauuuccucucggaauggcuucgagaugaucugggauccuaacggguggaccggaaccgacaauaacuuuagcauuaagcaggacaucgucggcaucaaugaaugguccggguacucuggcagcuucgugcaacaccccgagcuuacaggacuggauuguauucgccacugcuucuggguugaacucaucagaggccggccuaaagagaacacgauuuggaccuccgggagcucuaucuccuuuuguggagugaauagcgacacagucggcuggucuuggcccgauggggcugagcugcccuucaccauugacaaguga

SEQ ID NO: 213465 - RNA, 1410 nt, Artificial Sequence
  derived and/or modified CDS sequence (opt5) from neuraminidase__InfluenzaA__AEW25338
augaaccccaaucagaagaucauuaccaucggcagcgugugcauggccauugggauggcuaaccugauccuccaaauuggaaauaucaucuccauuuggaucucucacagcauucagcugggcaaccagaaucagaucgagacauguaaccaauccgucauuacguacgaaaauaacaccuggguuaaucagacauaugugaacaucucuaauaccaacuucgccgcggggcagagcguggucuccgugaaacuugcuggaaauucuagccugugcccuguuuccggcugggccauuuacagcaaggacaacucuaucagaaucggguccaaaggagauguguuugucauucgggagccguucaucagcuguucuccccucgaaugccgcacauuuuuccugacccagggcgcccuucugaaugacaagcauuccaacggcacaauuaaagauagaagcccuuaucggacccucaugucuugucccaucggggaggugccuucccccuacaacagccgcuuugaauccguugcuuggucugccagcgcuugccacgacggaauuaauuggcugacgaucggcaucuccgggccugauaacggagccguggcgguccugaaguauaauggcauuaucaccgacacaauuaagagcuggagaaacaauauccuccggacccaagagucugagugugccugcgugaacggguccuguuucacagugaugaccgauggaccgagcgacggccaggcuucuuacaaaauuuuucgcaucgaaaagggcaaaaucgucaagagcguugagaugaaugcccccaacuaucauuacgaagagugcuccuguuacccugauucuagcgagauuacgugcgugugcagagacaauuggcacggguccaaccggcccugggugagcuucaaucagaaccuggaauaucagaucggauacauucgcucuggcaucuuuggggauaauccuagacccaacgacaaaacaggauccuguggcccggucagcucuaauggggcuaacggagugaagggcuucuccuuuaaguauggcaacgggguuuggauuggacggaccaaaagcaucuccucucgcaauggcuucgagaugauuugggauccuaacggguggacaggaaccgacaauaacuuuagcaucaagcaagacaucgugggcauuaaugaaugguccggguacucuggcagcuucguccagcaucccgagcuuaccggacuggauugcaucagaccuuguuucuggguggaacucauucggggccgccccaaagagaacacaaucuggacguccgggagcucuauuuccuuuugcggaguuaauagcgacaccgugggcuggucuuggcccgauggggccgagcugccuuucacaaucgacaaguga

SEQ ID NO: 213466 - RNA, 1410 nt, Artificial Sequence
  derived and/or modified CDS sequence (opt5) from neuraminidase__InfluenzaA__AEW25343
augaaccccaaucagaagaucauuaccaucggcagcgugugcaugacaauugggauggccaaccugauccuccaaauuggaaauaucaucuccauuuggaucucucacagcauucagcugggcaaccagaaucagaucgagacguguaaccaauccgucauuaccuacgaaaauaacacauggguuaaucagaccuaugugaacaucucuaauacaaacuucgcugccgggcagagcguggucuccgugaaacuugcgggaaauucuagccugugcccuguuuccggcugggcuauuuacagcaaggacaacucuaucagaaucggguccaaaggagauguguuugucauucgggagccguucaucagcuguucuccccucgaaugccgcaccuuuuuccugacacagggcgcccuucugaaugacaagcauuccaacggcaccauuaaagauagaagcccuuaucggacgcucaugucuugucccaucggggaggugccuucccccuacaacagccgcuccgaaucuguugccuggagcgcuuccgccugccacgacggaauuaauuggcugaccaucggcaucagcgggccugauaacggagcuguggccguccugaaguauaauggcauuaucacagacaccauuaagucuuggagaaacaauauccuccggacacaagaguccgugugugcgugcgugaacgggagcuguuuuaccgucaugacggauggaccgucugacggccaggccagcuacaaaauuuuccgcaucgagaagggcaaaaucguuaaguccguggaaaugaaugcucccaacuaucauuacgaggaaugcucuuguuacccugauagcuccgagauuacaugcgugugcagagacaauuggcacgggagcaaccggcccugggucucuuuuaaucagaaccuggaguaucagaucggauacauuuguuccggcaucuucggggauagcccucgccccaaugacaaaaccggaucuugcggcccgguguccagcaacggggccaauggaguuaagggcuuuuccuucaaguauggcaacgggguguggauuggaagaacaaaaucuaucagcucccggaacggcuuugaaaugauuugggauccuaauggguggaccggaaccgacaacaauuucucuaucaagcaagacaucgucggcauuaacgaguggagcggguacuccggcagcuuugugcagcaucccgaacuuacaggacuggauuguauccgcccuugcuucuggguugagcucauuagaggccggcccaaagaaaauacgaucuggaccucuggguccagcauuucuuucuguggagugaacuccgacacagucggcuggagcuggcccgauggggcugagcugccuuuuaccaucgacaaguga

SEQ ID NO: 213467 - RNA, 1410 nt, Artificial Sequence
  derived and/or modified CDS sequence (opt5) from neuraminidase__InfluenzaA__AEW25351
augaaccccaaucagaagaucauuaccaucggcagcgugugcaugacaauugggauggccaaccugauccuccaaauuggaaauaucaucuccauuuggaucucucacagcauucagcugggcaaccagaaucagaucgagacguguaaccaauccgucauuaccuacgaaaauaacacauggguuaaucauaccuaugugaacaucucuaauacaaacuucgcugccgggcagagcguggucuccgugaaacuugcgggaaauucuagccugugcccuguuuccggcugggcuauuuacagcaaggacaacucuaucagaaucggguccaaaggagauguguuugucauucgggagccguucaucagcuguucuccccucgaaugccgcaccuuuuuccugacacagggcgcccuucugaaugacaagcacuccaacggcaccauuaacgauagaagcccuuaucggacgcucaugucuugucccaucggggaggugccuucccccuacaauagccgcuuugaauccguugccuggucugcuagcgccugccaugacggaauuaacuggcugaccaucggcaucuccgggccugauaauggagcuguggccguccugaaauauaacggcauuaucacagacaccauuaagagcuggagaaauaacauccuccggacacaggagucugagugugcgugcgugaauggguccuguuucaccgugaugacggauggaccgagcgacggccaagccucuuacaagauuuuucgcaucgaaaaaggcaagaucgucaaaagcguugagaugaacgcucccaauuaucacuacgaagagugcuccuguuacccugauucuagcgagauuacaugcgugugcagagacaacuggcauggguccaaucggcccugggugagcuucaaccagaaucuggaauaucagaucggauacauuuguucuggcaccuuuggggauaacccucgccccaaugacaagacaggauccugcggcccggucagcucuaacggggccaacggagugaaaggcuucuccuuuaaguauggcaaugggguuuggaucggaagaaccaagagcauuuccucucggaacggcuucgagaugaucugggauccuaauggguggaccggaacagacaacaauuuuagcauuaaacaggacaucgugggcaucaacgaaugguccggguacucuggcagcuucguccaacaccccgagcuuacgggacuggauuguauucgcccuugcuucuggguggaacucaucagaggccggcccaaggagaauaccauuuggacauccgggagcucuaucuccuuuuguggaguuaacagcgacaccgugggcuggucuuggcccgauggggcugagcugccuuucacaauugacaaauga

SEQ ID NO: 213468 - RNA, 1410 nt, Artificial Sequence
  derived and/or modified CDS sequence (opt5) from neuraminidase__InfluenzaA__AEW25358
augaaccccaaucagaagaucauuaccaucggcagcgugugcaugacaauugggauggccaaccugauccuccaaauuggaaauaucaucuccauuugggucucucacagcauccagcugggcaaccagaaucagauugagacguguaaccaauccguuaucaccuacgaaaauaacacaugggugaaucagaccuaugugaacauuucuaauacaaacuucgcugccgggcagagcgucguguccguuaaacuugcgggaaauucuagccugugcccuguguccggcugggcuaucuacagcaaggacaacucuauuagaaucggguccaaaggagaugucuuugugauccgggagccguucaccagcuguucuccccucgaaugccgcacauuuuuccugacccagggcgcccuucugaaugacaagcauuccaacggcacgauuaaagauagaagcccuuaucggacccucaugucuugucccaucggggagguuccuucccccuacaacagccgcuuugaauccguggccuggucugcuagcgccugccacgacggaauuaauuggcugacaaucggcauuuccgggccugauaacggagcugucgccgugcugaaguauaauggcaucaucaccgacacaauuaagagcuggagaaacaauauccuccggacccaagagucugagugugcgugcgugaacggguccuguuucacggucaugacagauggaccgagcgacggccaggccucuuacaaaauuuuucgcaucgaaaagggcaaaauuguuaagagcguggagaugaaugcucccaacuaucauuacgaagagugcuccuguuacccugauucuagcgagauuaccugcgugugcagagacaauuggcacggguccaaccggcccugggucagcuucaaucagaaccuggaauaucagaucggauacaucuguucuggcaucuuuggggauaauccucgccccaacgacaaaacaggauccugcggcccggugagcucuaauggggccaacggaguuaagggcuucuccuuuaaguauggcaacgggguguggauuggaagaaccaaaagcaucuccucucggaauggcuucgagaugauuugggauccuaacggguggaccggaacagacaauaacuuuagcaucaagcaagacauugucggcaucaaugaaugguccggguacucuggcagcuucgugcagcaucccgagcuuacgggacuggauuguauccgcccuugcuucuggguugaacucauuagaggccggcccaaagagaacaccaucuggacauccgggagcucuauuuccuuuuguggagugaauagcgacaccgucggcuggucuuggcccgauggggcugagcugccuuucacaaucgugaaguga

SEQ ID NO: 213469 - RNA, 1410 nt, Artificial Sequence; identical to SEQ ID NO: 208810
  derived and/or modified CDS sequence (opt5) from neuraminidase__InfluenzaA__AEW25361

SEQ ID NO: 213470 - RNA, 1410 nt, Artificial Sequence
  derived and/or modified CDS sequence (opt5) from neuraminidase__InfluenzaA__AEW25379
augaaccccaaucagaagaucauuaccaucggcagcgugugcaugacaauugggauggccaaccugauccuccaaauuggaaauaucaucuccauuuggacgucucacagcauccagcugggcaaccagaaucagauugagaccuguaaccaauccgucaucacauacgaaaauaacaccuggguuaaucagacauaugugaacauuucuaauaccaacuucgcugccgggcagagcguggucuccgugaaacuugcgggaaauucuagccugugcccuguuuccggcugggcuaucuacagcaaggacaacucuauuagaaucggguccaaaggagauguguuugucauccgggagccguucauuagcuguucuccccucgaaugccgcacauuuuuccugacccagggcgcccuucugaaugacaagcauuccaacggcacgaucaaagauagaagcccuuaucggacccucaugucuugucccauuggggaggugccuucccccuacaacagccgcuuugaauccguugccuggucugcuagcgccugccacgacggaaucaauuggcugacaauuggcaucuccgggccugauaacggagcuguggccguccugaaguauaauggcaucauuaccgacacaaucaagagcuggagaaacaauauucuccggacccaagagucugagugugcgugcgugaacggguccuguuucacggugaugacagauggaccgagcgacggccaggccucuuacaaaaucuuucgcauugaaaagggcaaaaucgucaagagcguugagaugaaugcucccaacuaucauuacgaagagugcuccuguuacccugauucuagcgaggugaccugcgugugcagagacaauuggcacggguccaaccggcccugggucagcuucaaucagaaccuggaauaucagaucggauacauuuguucuggcaucuuuggggauaauccucgccccaacgacaaaacaggauccugcggcccggugagcucugauggggccaauggaguuaagggcuucuccuuuaaguauggcaacgggguguggauuggaagaaccaaaagcaucuccucucggaacggcuucgagaugauuugggacccuaauggguggaccggaacagacaacaauuuuagcaucaagcaagauauugucggcaucaacgaaugguccggguacucuggcagcuucgugcagcaucccgagcuuacgggacuggacuguauccgcccuugcuucuggguugaacucauuagaggccggcccaaagagaauaccaucuggacauccgggagcucuauuuccuuuuguggagugaacagcgauaccgucggcuggucuuggcccgacggggcugagcugccuuucacaaucgauaaguga

SEQ ID NO: 213471 - RNA, 1410 nt, Artificial Sequence
  derived and/or modified CDS sequence (opt5) from neuraminidase__InfluenzaA__AEW25387
augaaccccaaucagaagaucauuaccaucggcagcgugugcaugacaauugggauggccaaccugauccuccaaauuggaaauaucaucuccauuuggaucucucacagcauucagcugggcaaccagaaucagaucgagacguguaaccaauccgucauuaccuacgaaaauaacacauggguuaaucagaccuaugugaacaucucuaauacaaacuucgcugccgggcagagcguggucuccgugaaacuugcgggaaauucuagccugugcccuguuuccggcugggcuauuuacagcaaggacaacucuaucagaaucggguccaaaggagauguguuugucauucgggagccguucaucagcuguucuccccucgaaugccgcaccuuuuuccugacacagggcgcccuucugaaugacaagcauuccaacggcaccauuaaagauagaagcccuuaucggacgcucaugucuugucccaucggggaggugccuucccccuacaacagccgcuuugaauccguugccuggucugcuagcgccugccacgacggaauuaauuggcugaccaucggcaucuccgggccugauaacggagcuguggccguccugaaguauaauggcauuaucacagacaccauuaagagcuggagaaacaauauccuccggacacaagagucugagugugcgugcguggauggguccuguuucaccgugaugacggacggaccgagcgauggccaggccucuuacaaaauuuuucgcaucgaaaagggcaaaaucgucaagagcguugagaugaacgcucccaauuaucauuacgaagagugcuccuguuacccugacucuagcgagauuacaugcgugugcagagauaacuggcacggguccaaucggcccugggugagcuucaaccagaaucuggaauaucagaucggauacauuuguucuggcaucuuugaggacaacccucgccccaaugauaaaaccggguccugcggaccggucagcucuaacggcgccaauggggugaagggauucuccuuuaaguauggcaacggcguuuggauugggagaacaaaaagcaucuccucucggaacggauucgaaaugauuugggacccuaauggcuggaccgggaccgacaacaauuuuagcaucaagcaagauaucgugggaauuaacgagugguccggcuacucugggagcuucguccagcaucccgaacuuacaggccuggacuguauccgcccuugcuucuggguggagcucauuagaggacggcccaaagagaauacgaucuggaccuccggcagcucuauuuccuuuugugggguuaacagcgauacagugggauggucuuggcccgacggcgcugaacugccuuucaccaucgauaaguga

SEQ ID NO: 213472 - RNA, 1410 nt, Artificial Sequence
  derived and/or modified CDS sequence (opt5) from neuraminidase__InfluenzaA__AEW25392
augaaccccaaucagaagaucauuaccaucggcagcgugugcaugacaauugggauggccaaccugauccuccaaauuggaaauaucaucuccauuuggaucucucacagcauucagcugggcaaccagaaucagaucgagacguguaaccaauccgucauuaccuacgaaaauaacacauggguuaaucagaccuaugugaacaucucuaauacaaacuucgcugccgggcagagcguggucuccgugaaacuugcgggaaauucuagccugugcccuguuuccggcugggcuauuuacagcaaggacaacucuaucagaaucggguccaaaggagauguguuugucauucgggagccguucaucagcuguucuccccucgaaugccgcaccuuuuuccugacacagggcgcccuucugaaugacaagcauuccaacggcaccauuaaagauagaagcccuuaucggacgcucaugucuugucccaucggggaggugccuucccccuacaacagccgcuuugaauccguugccuggucugcuagcgccugccacgacggaauuaauuggcugaccaucggcaucuccgggccugauaacggagcuguggccguccugaaguauaauggcauuaucacagacaccauuaagagcuggagaaacaauauccuccggacacaagagucugagugugcgugcgugaacggguccuguuucaccgugaugacggauggaccgagcgacggccaggccucuuacaaaauuuuucgcaucgaaaagggcaaaaucgucaagagcguugagaugaaugcucccaacuaucauuacgaagagugcuccuguuacccugauucuagcgagauuacaugcgugugcagagacaauuggcacggguccaaccggcccugggugagcuucaaucagaaccuggaauaucagaucggauacauuuguucuggcaucuuuggggauaauccucgccccaacgacaaaaccggauccugcggcccggucagcucuaauggggccaacggagugaagggcuucuccuuuaaguauggcaacgggguuuggauuggaagaacaaaaagcaucuccucucggaauggcuucgagaugauuugggauccuaacggguggaccggaaccgacaauaacuuuagcaucaagcaugacaucgugggcauuaaugaaugguccggguacucuggcagcuucguccaacaccccgagcuuacaggacuggauuguauccgcccuugcuucuggguggaacucauuagaggccggcccaaagagaacacgaucuggaccuccgggagcucuauuuccuuuuguggaguuaauagcgacacagugggcuggucuuggcccgauggggcugagcugccuuucaccaucgacaaguga

SEQ ID NO: 213473 - RNA, 1410 nt, Artificial Sequence
  derived and/or modified CDS sequence (opt5) from neuraminidase__InfluenzaA__AEW25397
augaaccccaaucagaagaucauuaccaucggcagcgugugcaugacaauugggauggccaaccugauccuccaaauuggaaauaucaucuccauuuggaucucucacagcauucagcugggcaaccagaaucagaucgagacguguaaccaauccgucauuaccuacgaaaauaacacauggguuaaucagaccuaugugaacaucucuaauacaaacuucgcugccgggcagagcguggucuccgugaaacuugcgggaaauucuagccugugcccuguuuccggcugggcuauuuacagcaaggacaacucuaucagaaucggguccaaaggagauguguuugucauucgggagccguucaucagcuguucuccccucgaaugccgcaccuuuuuccugacacagggcgcccuucugaaugacaagcauuccaacggcaccauuaaagauagaagcccuuaucggacgcucaugucuugucccaucggggaggugccuucccccuacaacagccgcuuugaaccuguugccugguccgcuucugccugccacgacggaauuaauuggcugaccaucggcaucagcgggccggauaacggagcuguggccguccugaaguauaauggcauuaucacagacaccauuaaguccuggagaaacaauauccuccggacacaagagagcgagugugcgugcgugaacgggucuuguuucaccgugaugacggauggacccuccgacggccaggccagcuacaaaauuuuucgcaucgaaaagggcaaaaucgucaagucuguugagaugaaugcuccuaacuaucauuacgaagagugcagcuguuaccccgauuccucugagauuacaugcgugugcagagacaauuggcacgggagcaaccggccuuggguguccuucaaucagaaccuggaauaucagaucggauacauuuguagcggcaucuuuggggauucuccccgcccgaaugacaaaaccggauccugcggcccugucagcucuaacggggccaauggagugaagggcuucuccuuuaaguauggcaacgggguuuggauuggaagaacaaaaagcaucuccucucggaacggcuucgagaugauuugggaucccaauggguggaccggaaccgacaacaauuuuagcaucaagcaagacaucgugggcauuaacgaaugguccggguacucuggcagcuucguccagcauccugagcuuacaggacuggauuguauccgccccugcuucuggguggaacucauuagaggccggcccaaagagaauacgaucuggaccuccgggagcucuauuuccuuuuguggaguuaacagcgacaaugugggcuggucuuggccugauggggcugagcugccguucacaaucgacaaguga

SEQ ID NO: 213474 - RNA, 1410 nt, Artificial Sequence; identical to SEQ ID NO: 208810
  derived and/or modified CDS sequence (opt5) from neuraminidase__InfluenzaA__AEW25402

SEQ ID NO: 213475 - RNA, 1410 nt, Artificial Sequence; identical to SEQ ID NO: 208810
  derived and/or modified CDS sequence (opt5) from neuraminidase__InfluenzaA__AEW25407

SEQ ID NO: 213476 - RNA, 1410 nt, Artificial Sequence
  derived and/or modified CDS sequence (opt5) from neuraminidase__InfluenzaA__AEW25418
augaaccccaaucagaagaucauuaccaucggcagcgugugcaugacaauugggauggccaaccugauccuccaaauuggaaauaucaucuccauuuggaucucucacagcauucagcugggcaaccagaaucagaucgagacguguaaccaauccgucauuaccuacgaaaauaacacauggguuaaucauaccuaugugaacaucucuaauacaaacuucgcugccgggcagagcguggucuccgugaaacuugcgggaaauucuagccugugcccuguuuccggcugggcuauuuacagcaaggacaacucuaucagaaucggguccaaaggagauguguuugucauucgggagccguucaucagcuguucuccccucgaaugccgcaccuuuuuccugacacagggcgcccuucugaaugacaagcacuccaacggcaccauuaaagauagaagcccuuaucggacgcucaugucuugucccaucggggaggugccuucccccuacaacagccgcuuugaauccguugccuggucugcuagcgccugccaugacggaauuaauuggcugaccaucggcaucuccgggccugauaacggagcuguggccguccugaaguauaauggcauuaucacagacaccauuaagagcuggagaaacaauauccuccggacacaggagucugagugugcgugcgugaacggguccuguuucaccgugaugacggauggaccgagcgacggccaagccucuuacaaaauuuuucgcaucggcaaggggaaaaucgucaagagcguugaaaugaaugcucccaacuaucacuacgaggaaugcuccuguuacccugauucuagcgagauuacaugcgugugcagagacaauuggcauggauccaaccggcccugggugagcuucaaucagaaccuggaguaucagaucggcuacauuuguucugggaucuuuggagauaauccucgccccaacgacaaaaccggcuccugcgggccggucagcucuaauggagaaaacggcgugaagggcuucuccuuuaaguaugggaacggaguuuggauuggcagaacaaaaagcaucuccucucggaauggguucgagaugauuugggauccuaacggauggaccggcaccgacaauaacuuuagcaucaagcaggacaucguggggauuaaugaaugguccggcuacucuggcagcuucguccaacaccccgagcuuacaggacuggauuguauccgcccuugcuucuggguggaacucauuagagggcggcccaaagagaacacgaucuggaccuccggaagcucuauuuccuuuuguggcguuaauagcgacacaguggggugguucuggcccgauggagccgagcugccuuuuaccaucgacaaguga

SEQ ID NO: 213477 - RNA, 1410 nt, Artificial Sequence
  derived and/or modified CDS sequence (opt5) from neuraminidase__InfluenzaA__AEW25423
augaaccccaaucagaagaucauuaccaucggcagcgugugcaugacaauugggauggccaaccugauccuccaaauuggaaauaucaucuccauuuggaucucuaacagcauucagcugggcaaucagaaccagaucgagacguguaaucaauccgucauuaccuacgaaaacaauacauggguuaaccagaccuaugugaauaucucuaacacaaauuucgcugccgggcagagcguggucuccgugaaacuugcgggaaacucuagccugugcccuguuuccggcugggcuauuuacagcaaggacaauucuaucagaaucggguccaaaggagauguguuugucauucgggagccguucaucagcuguucuccccucgaaugccgcaccuuuuuccugacacagggcgcccuucugaacgacaagcacuccaacggcaccauuaaagauagaagcccuuaucggacgcucaugucuugucccaucggggaggugccuucccccuacaauagccgcuuugaauccguugccuggucugcuagcgccugccaugacggaauuaacuggcugaccaucggcaucuccgggccugauaauggagcuguggccguccugaaguauaacggcauuaucacagacaccauuaagagcuggagaaauaacauccuccggacacaagagucugagugugcgugcgugaauggguccuguuucaccgugaugacggauggaccgagcgacggccaggccucuuacaaaauuuuucgcaucgaaaagggcaaaaucgucaagagcguugagaugaacgcucccaauuaucacuacgaagagugcuccuguuacccugauucuagcgagauuacaugcgugugcagagacaacuggcauggguccaaucggcccugggugagcuucaaccagaaucuggaauaucagaucggauacauuuguucuggcaucuuuggggauaacccucgccccaaugacaaaaccggauccugcggcccggucagcucuaacggggccaacggagugaagggcuucuccuuuaaguauggcaaugggguuuggauuggaagaacaaaaagcaucuccucucggaacggcuucgagaugauuugggauccuaauggguggaccggaaccgacaacaauuuuagcaucaagcaagacaucgugggcauuaacgaaugguccggguacucuggcagcuucguccagcaccccgagcuuacaggacuggauuguauccgcccuugcuucuggguggaacucauuagaggccggcccaaagagaauacgaucuggaccuccgggagcucuauuuccuuuuguggaguuaacagcgacacagugggcuggucuuggcccgauggggcugagcugccuuucaccaucgacaaguga

SEQ ID NO: 213478 - RNA, 1410 nt, Artificial Sequence; identical to SEQ ID NO: 208810
  derived and/or modified CDS sequence (opt5) from neuraminidase__InfluenzaA__AEW25426

SEQ ID NO: 213479 - RNA, 1410 nt, Artificial Sequence
  derived and/or modified CDS sequence (opt5) from neuraminidase__InfluenzaA__AEW25432
augaaccccaaucagaagaucauuaccaucggcagcgugugcaugacaauugggauggccaaccugauccuccaaauuggaaauaucaucuccauuuggacgucucacagcauccagcugggcaaccagaaucagauugagaccuguaaccaauccgucaucacauacgaaaauaacaccuggguuaaucagacauaugugaacauuucuaauaccaacuucgcugccgggcagagcguggucuccgugaaacuugcgggaaauucuagccugugcccuguuuccggcugggcuaucuacagcaaggacaacucuauuagaaucggguccaaaggagauguguuugucauccgggagccguucauuagcuguucuccccucgaaugccgcacauuuuuccugacccagggcgcccuucugaaugacaagcauuccaacggcacgaucaaagauagaagcccuuaucggacccucaugucuugucccauuggggaggugccuucccccuacaacagccgcuuugaauccguugccuggucugcuagcgccugccacgacggaaucaauuggcugacaauuggcaucuccgggccugauaacggagcuguggccguccugaaguauaauggcaucauuaccgacacaaucaagagcuggagaaacaauauucuccggacccaagagucugagugugcgugcgugaacggguccuguuucacggugaugacagauggaccgagcgacggccaggccucuuacaaaaucuuucgcauugaaaagggcaaaaucgucaagagcguugagaugaaugcucccaacuaucauuacgaagagugcuccuguuacccugauucuagcgagauuaccugcgugugcagagacaauuggcacggguccaaccggcccugggugagcuucaaucagaaccuggaauaucagaucggauacaucuguucuggcauuuuuggggauaauccucgccccaacgacaaaacaggauccugcggcccggucagcucuaauggggccaacggagugaagggcuucuccuuuaaguauggcaacgggguuuggaucggaagaaccaaaagcauuuccucucggaauggcuucgagaugaucugggauccuaacggguggaccggaacagacaauaacagcuccauuaagcaagacaucgugggcaucaaugaauggucuggguacagcggcuccuuuguccagcaucccgagcuuacgggacuggauuguauucgcccuugcuucuggguggaacucaucagaggccggcccaaagagaacaccauuuggacaagcgggucuuccaucagcuucuguggaauuaauucugacgcuguuggcugguccuggcccgauggggccgagcugccuuuuaccaucgacaaguga

SEQ ID NO: 213480 - RNA, 1410 nt, Artificial Sequence
  derived and/or modified CDS sequence (opt5) from neuraminidase__InfluenzaA__AEW25436
augaaccccaaucagaagaucauuaccaucggcagcgugugcaugacaauugggauggccaaccugauccuccaaauuggaaauaucaucuccauuuggaucucucacagcauucagcugggcaaccagaaucagaucgagacguguaaccaauccauuaucaccuacgaaaauaacacaugggucaaucagaccuauguuaacauuucuaauacaaacuucgcugccgggcagagcgugguguccgucaaacuugcgggaaauucuagccugugcccuguguccggcugggcuaucuacagcaaggacaacucuaucagaauuggguccaaaggagauguuuuugugauccgggagccguucauuagcuguucuccccucgaaugccgcaccuuuuuccugacacagggcgcccuucugaaugacaagcauuccaacggcaccaucaaagauagaagcccuuaucggacgcucaugucuugucccauuggggaggucccuucccccuacaacagccgcuuugaauccguggccuggucugcuagcgccugccacgacggaaucaauuggcugaccaucggcauuuccgggccugauaacggagcuguugccgugcugaaguauaauggcaucauuacagacaccaucaagagcuggagaaacaauauucuccggacacaagagucugagugugcgugcgucaacggguccuguuucaccgugaugacggauggaccgagcgacggccaggccucuuacaaaaucuuucgcaucgaaaagggcaaaauugucaagagcguggagaugaaugcucccaacuaucauuacgaagagugcuccuguuacccugauucuagcgagaucacaugcguuugcagagacaauuggcacggguccaaccggcccugggugagcuucaaucagaaccuggaauaucgcauuggauacaucuguucuggcauuuuuggggauaauccuagacccaacgacaaaaccggauccugcggcccggugagcucuaauggggccaacggagucaagggcuucuccuuuaaguauggcaacgggguguggaucggacggacaaaaagcauuuccucucgcaauggcuucgagaugaucugggauccuaacggguggaccggaaccgacaauaacuuuagcaucaagcaggacauuguuggcacaaaugaaugguccggguacucuggcagcuucgugcaacaucccgagcuuacgggacuggauuguaucagaccuugcuucugggucgaacucauucggggccgccccaaagagaacaccaucuggacauccgggagcucuauuuccuuuuguggagugaauagcgacaccaugggcuggucuuggcccgauggggcugagcugccuuucacaaucgacaaguga

SEQ ID NO: 213481 - RNA, 1410 nt, Artificial Sequence; identical to SEQ ID NO: 208810
  derived and/or modified CDS sequence (opt5) from neuraminidase__InfluenzaA__AEW25440

SEQ ID NO: 213482 - RNA, 1410 nt, Artificial Sequence
  derived and/or modified CDS sequence (opt5) from neuraminidase__InfluenzaA__AEW25448
augaaccccaaucagaagaucauuaccaucggcagcgugugcaugacaauugggauggccaaccugauccuccaaauuggaaauaucaucuccauuuggaucucucacagcauucagcugggcaaccagaaucagaucgagacguguaaccaauccgucauuaccuacgaaaauaacacauggguuaaucagaccuaugugaacaucucuaauacaaacuucgcugccgggcagagcguggucuccgugaaacuugcgggaaauucuagccugugcccuguuuccggcugggcuauuuacagcaaggacaacucuaucagaaucggguccaaaggagauguguuugucauucgggagccguucaucagcuguucuccccucgaaugccgcaccuuuuuccugacacagggcgcccuucugaaugacaagcauuccaacggcaccauuaaagauagaagcccuuaucggacgcucaugucuugucccaucggggaggugccuucccccuacaacagccgcuuugaauccguugccuggucugcuagcgccugccacgacggaauuaauuggcugaccaucggcaucuccgggccugauaacggagcuguggccguccugaaguauaauggcauuaucacagacaccauuaagagcuggagaaacaauauccuccggacacaagagucugagugugcgugcgugaacggguccuguuucaccgugaugacggauggaccgagcgacggccaggccucuuacaaaauuuuucgcaucgaaaagggcaaaaucgucaagagcguugagaugaaugcucccaacuaucauuacgaagagugcuccuguuacccugauucuagcgagauuacaugcgugugcagagacaauuggcacggguccaaccggcccugggugagcuucaaucagaaccuggaauaucagaucggauacauuuguucuggcaucuuuggggauaauccucgccccaacgacaaaaccggauccugcggcccggucagcucuaauggggccaacggagugaagggcuucuccuuuaaguauggcaacgggguuuggauuggaagaacaaaaagcaucuccucucggaauggcuucgagaugauuugggauccuaacggguggaccggaaccgacaauaacuuuagcaucaagcaagacaucgugggcauuaaugaaugguccggguacucuggcagcuucguccagcaucccgagcuuacaggacuggauuguauccgcccuugcuucuggguggaacucauuagaggccggcccaaagagaacacgaucuggaccuccgggagcucuauuuccuuuuguggaguuaauagcgacacagugggcuggucuuggcccgauggggcugagcugccuuucaccacagacaaguga

SEQ ID NO: 213483 - RNA, 1410 nt, Artificial Sequence; identical to SEQ ID NO: 208810
  derived and/or modified CDS sequence (opt5) from neuraminidase__InfluenzaA__AEW25456

SEQ ID NO: 213484 - RNA, 1410 nt, Artificial Sequence
  derived and/or modified CDS sequence (opt5) from neuraminidase__InfluenzaA__AEW25464
augaaccccaaucagaagaucauuaccaucggcagcgugugcaugacaauugggauggccaaccugauccuccaaauuggaaauaucaucuccauuuggaucucucacagcauucagcugggcaaccagaaucagaucgagacguguaaccaauccgucauuaccuacgaaaauaacacauggguuaaucagaccuaugugaacaucucuaauacaaacuucgcugccgggcagagcguggucuccgugaaacuugcgggaaauucuagccugugcccuguuuccggcugggcuauuuacagcaaggacaacucuaucagaaucggguccaaaggagauguguuugucauucgggagccguucaucagcuguucuccccucgaaugccgcaccuuuuuccugacacagggcgcccuucugaaugacaagcauuccaacggcaccauuaaagauagaagcccuuaucggacgcucaugucuugucccaucggggaggugccuucccccuacaacagccgcuuugaauccguugccuggucugcuagcgccugccacgacggaauuaauuggcugaccaucggcaucuccgggccugauaacggagcuguggccguccugaaguauaauggcauuaucacagacaccauuaagagcuggagaaacaauauccuccggacacaagagucugagugugcgugcgugaacggguccuguuucaccgugaugacggauggaccgagcgacggccaggccucuuacaaaauuuuucgcaucgaaaagggcaaaaucgucaagagcguugagcugaaugcucccaacuaucauuacgaagagugcuccuguuacccugauucuagcgagauuacaugcgugugcagagacaauuggcacggguccaaccggcccugggugagcuucaaucagaaccuugaauaucagaucggauacauuuguucuggcaucuuuggggauaauccucgccccaacgacaaaaccggauccugcggcccggucagcucuaauggggccaacggagugaagggcuucuccuuuaaguauggcaacgggguuuggauuggaagaacaaaaagcaucuccucucggaauggcuucgagaugauuugggauccuaacggguggaccggaaccgacaauaacuuuagcaucaagcaagacaucgugggcauuaaugaaugguccggguacucuggcagcuucguccagcaucccgagcugacaggacucgauuguauccgcccuugcuucuggguggaacugauuagaggccggcccaaagagaacacgaucuggaccuccgggagcucuauuuccuuuuguggaguuaauagcgacacagugggcuggucuuggcccgauggggcugagcuuccuuucaccaucgacaaguga

SEQ ID NO: 213485 - RNA, 1410 nt, Artificial Sequence
  derived and/or modified CDS sequence (opt5) from neuraminidase__InfluenzaA__AEW25474
augaaccccaaucagaagaucauuaccaucggcagcgugugcaugacaauugggauggccaaccugauccuccaaauuggaaauaucaucuccauuuggaucucucacagcauucagcugggcaaccagaaucagaucgagacguguaaccaauccgucauuaccuacgaaaauaacacauggguuaaucagaccuaugugaacaucucuaauacaaacuucgcugccgggcagagcguggucuccgugaaacuugcgggaaauucuagccugugcccuguuuccggcugggcuauuuacagcaaggacaacucuaucagaaucggguccaaaggagauguguuugucauucgggagccguucaucagcuguucuccccucgaaugccgcaccuuuuuccugacacagggcgcccuucugaaugacaagcauuccaacggcaccauuaaagauagaagcccuuaucggacgcucaugucuugucccaucggggaggugccuucccccuacaacagccgcuuugaauccguugccuggucugcuagcgccugccacgacggaauuaauuggcugaccaucggcaucuccgggccugauaacggagcuguggccguccugaaguauaauggcauuaucacagacaccauuaagagcuggagaaacaauauccuccggacacaagagucugagugugcgugcgugaacggguccuguuucaccgugaugacggauggaccgagcgacggccaggccucuuacaaaauuuuucgcaucgaaaagggcaaaaucgucaagagcguugagaugaaugcucccaacuaucauuacgaagagugcuccuguuacccugauucuagcgagauuacaugcgugugcagagacaauuggcacggguccaaccggcccugggugagcuucaaucagaaccuggaauaucagaucggauacauuuguucuggcaucuuuggggauaauccucgccccaacgacaaaaccggauccugcggcccggucagcucuaauggggccaacggagugaagggcuucuccuuuaaguauggcaacgggguuuggauuggaagaacaaaaagcaucuccucucggaauggcuucgagaugauuugggauccuaacggguggaccggaaccgacaauaacuuuagcaucaagcaagacaucgugggcauuaaugaaugguccggguacucuggcagcuucguccagcaucccgagcuuacaggacuggauuguauccgcccuugcuucuggguggaacucauuagaggccggcccaaagagaacacgaucuggaccuccgggagcucuauuuccuuuuguggaguuaauagcgacacagugggcuggucuuggcccgauggggcugagcugccuuccaccaucgacaaguga

SEQ ID NO: 213486 - RNA, 1410 nt, Artificial Sequence
  derived and/or modified CDS sequence (opt5) from neuraminidase__InfluenzaA__AEW25484
augaaccccaaucagaagaucauuaccaucggcagcgugugcaugacaauugggauggccaaccugauccuccaaauuggaaauaucaucuccauuuggaucucucacagcauucagcugggcaaccagaaucagaucgagacguguaaccaauccgucauuaccuacgaaaauaacacauggaucaaucagaccuauguuaacauuucuaauacaaacuucgcugccgggcagagcgugguguccgucaaacuugcgggaaauucuagccugugcccuguguccggcugggcuaucuacagcaaggacaacucuaucagaauuggguccaaaggagauguuuuugugauccgggagccguucauuagcuguucucaucucgaaugccgcaccuuuuuccugacacagggcgcccuucugaaugacaagcacuccaacggcaccaucaaagauagaagccccuaucggacgcucaugucuuguccuauuggggagguccccuccccuuacaacagccgcuuugaauccguggccuggucugcuagcgccugccaugacggaaucaauuggcugaccaucggcauuuccgggcccgaucacggagcuguugccgugcugaaguauaacggcaucauuacagacaccaucaagagcuggagaaauaacauucuccggacacaagagucugagugugcgugcgucaauggguccuguuucaccgugaugacggauggaccuagcgacggccaggccucuuacaaaaucuuucgcaucgaaaagggcaaaauugucaagagcguggagaugaacgcuccgaauuaucauuacgaagagugcuccuguuaccccgauucuagcgagaucacaugcguuugcagagacaacuggcacggguccaaucggccuugggugagcuucaaccagaaucuggaauaucagauuggauacaucuguucuggcauuuuuggggauaacccccgcccuaaugacaaaaccggauccugcggccccgugagcucuaacggggccaauggagucaagggcuucuccuuuaaguauggcaacgggguguggaucggaagaacaaaaagcauuuccucucggaacggcuucgagaugaucugggauccgaauggguggaccggaaccgacaacaauuuuagcaucaagcaagacauuguuggcaucaacgaaugguccggguacucuggcagcuucgugcagcacccugagcuuacaggacuggauuguauucgccccugcuucugggucgaacucaucagaggccggccuaaagagaauacgauuuggaccuccgggagcucuaucuccuuuuguggagugaacagcgacacaguuggcuggucuuggcccgauggggcugagcugcccuucaccaucgacaaguga

SEQ ID NO: 213487 - RNA, 1410 nt, Artificial Sequence
  derived and/or modified CDS sequence (opt5) from neuraminidase__InfluenzaA__AEW25494
augaaccccaaucagaagaucauuaccaucggcagcgugugcaugacaauugggauggccaaccugauccuccaaauuggaaauaucaucuccauuuggaucucucacagcauucagcugggcaaccagaaucagaucgagacguguaaccaauccgucauuaccuacgaaaauaacacauggguuaaucagaccuaugugaacaucucuaauacaaacuucgcugccgggcagagcguggucuccgugaaacuugcgggaaauucuagccugugcccuguuuccggcugggcuauuuacagcaaggacaacucuaucagaaucggguccaaaggagauguguuugucauucgggagccguucaucagcuguucuccccucgaaugccgcaccuuuuuccugacacagggcgcccuucugaaugacaagcauuccaacggcaccauuaaagauagaagcccuuaucggacgcucaugucuugucccaucggggaggugccuucccccuacaacagccgcuuugaauccguugccuggucugcuagcgccugccacgacggaauuaauuggcugaccaucggcaucuccgggccugauaacggagcuguggccguccugaaguauaauggcauuaucacagacagcauuaagucuuggagaaacaauauccuccggacccaagaguccgagugugcgugcgugaacgggagcuguuucacagugaugaccgauggaccgucugacggccaggccagcuacaaaauuuuucgcaucgaaaagggcaaaaucgucaaguccguugagaugaaugcucccaacuaucauuacgaagagugcucuuguuacccugauagcuccgagauuacgugcgugugcagagacaauuggcacgggagcaaccggcccugggugucuuucaaucagaaccuggaauaucagaucggauacauuuguuccggcacauuuggggauaauccucgccccaacgacaaaaccggaagcugcggcccggucucuuccaauggggccaacggagugaagggcuucagcuuuaaguauggcaacgggguuuggaucggaagaacaaaauccauuucuagccggaauggcuucgagaugaucugggauccuaacggguggaccggaaccgacaauaacuuuuccauuaagcaagacaucgugggcaucaaugaauggucuggguacagcggcuccuucguccagcaucccgagcuuacaggacuggauuguauucgcccuugcuucuggguggaacucaucagaggccggcccaaagagaacacgauuuggaccagcgggucuuccaucagcuuuuguggaguuaauucugacacagugggcugguccuggcccgauggggcugagcugccuuucaccauugacaaguga

SEQ ID NO: 213488 - RNA, 1410 nt, Artificial Sequence
  derived and/or modified CDS sequence (opt5) from neuraminidase__InfluenzaA__AEW25503
augaaccccaaucagaagaucauuaccaucggcagcgugugcaugacaauugggauggccaaccugauccuccaaauuggaaauaucaucuccauuuggaucucucacagcauucagcugggcaaccagaaucagaucgagacguguaaccaauccgucauuaccuacgaaaauaacacauggguuaaucagaccuaugugaacaucucuaauacaaacuucgcugccgggcagagcguggucuccgugaaacuugcgggaaauucuagccugugcccuguuuccggcugggcuauuuacagcaaggacaacucuaucagaaucggguccaaaggagauguguuugucauucgggagccguucaucagcuguucuccccucgaaugccgcaccuuuuuccugacacagggcgcccuucugaaugacaagcauuccaacggcaccauuaaagauagaagcccuuaucggacgcucaugucuugucccaucggggaggugccuucccccuacaacagccgcuuugaauccguugccuggucugcuagcgccugccacgacggaauuaauuggcugaccaucggcaucuccgggccugauaacggagcuguggccguccugaaguauaauggcauuaucacagacaccauuaagagcuggagaaacaauauccuccggacacaagagucugagugugcgugcgugaacggguccuguuucaccgugaugacggauggaccgagcgacggccaggccucuuacaaaauuuuucgcaucgaaaagggcaaaaucgucaagagcguugagaugaaugcucccaacuaucauuacgaagagugcuccuguuacccugauucuagcgagauuacaugcgugugcagagacaauuggcacggguccaaccggcccugggugagcuucaaucagaaccuggaauaucagaucggauacauuuguucuggcaucuuuggggauaauccucgccccaacgacaaaaccggauccugcggcccggucagcucuaauggggccaacggagugaagggcuucuccuuuaaguauggcaacggggcuuggauuggaagaacaaaaagcaucuccucucggaauggcuucgagaugauuugggauccuaacggguggaccggaaccgacaauaacuuuagcaucaagcaagacaucguuggcauuaaugaaugguccggguacucuggcagcuucgugcagcaucccgagcuuacaggacuggauuguauccgcccuugcuucugggucgaacucauuagaggccggcccaaagagaacacgaucuggaccuccgggagcucuauuuccuuuuguggagugaauagcgacacaguuggcuggucuuggcccgauggggccgagcugccuuucaccaucgacaaguga

SEQ ID NO: 213489 - RNA, 1410 nt, Artificial Sequence
  derived and/or modified CDS sequence (opt5) from neuraminidase__InfluenzaA__AEW25511
augaaccccaaucagaagaucauuaccaucggcagcgugugcaugacaauugggauggccaaccugauccuccaaauuggaaauaucaucuccauuuggaucucucacagcauucagcugggcaaccagaaucagaucgagacguguaaccaauccgucauuaccuacgaaaauaacacauggguuaaucauaccuaugugaacaucucuaauacaaacuucgcugccgggcagagcguggucuccgugaaacuugcgggaaauucuagccugugcccuguuuccggcugggcuauuuacagcaaggacaacucuaucagaaucggguccaaaggaguggucuuugugauucgggagccguucaucagcuguucuccccucgaaugccgcaccuuuuuccugacacagggcgcccuucugaaugauaagcacuccaacggcaccauuaaagacagaagcccuuaucggacgcucaugucuugucccaucggggagguuccuucccccuacaacagccgcuuugaauccguggccuggucugcuagcgccugccaugauggaauuaauuggcugaccaucggcaucuccgggccugacaacggagcugucgccgugcugaaguauaauggcauuaucacagauaccauuaagagcuggagaaacaauauccuccggacacaggagucugagugugcgugcgugaacggguccuguuucaccgucaugacggacggaccgagcgauggccaagccucuuacaaaauuuuucgcaucgaaaagggcaaaaucguuaagagcguggagaugaaugcucccaacuaucacuacgaagagugcuccuguuacccugacucuagcgagauuacaugcgugugcagagauaauuggcauggguccaaccggcccugggucagcuucaaucagaaccuggaauaucagaucggauacauuuguucuggcaucuuuggggacaauccucgccccaacgauaaaaccggauccugcggcccggugagcucuaauggggccaacggaguuaagggcuucuccuuuaaguauggcaacgggguguggauuggaagaacaaaaagcaucuccucucggaauggcuucgagaugauuugggacccuaacggguggaccggaaccgauaauaacuuuagcaucaagcaggacaucgucggcauuaaugaaugguccggguacucuggcagcuucgugcaacaccccgagcuuacaggacuggacuguauccgcccuugcuucuggguugaacucauuagaggccggcccaaagagaacacgaucuggaccuccgggagcucuauuuccuuuuguggagugaauagcgauacagucggcuggucuuggcccgacggggcugagcugccuuucaccaucgauaaguga

SEQ ID NO: 213490 - RNA, 1410 nt, Artificial Sequence
  derived and/or modified CDS sequence (opt5) from neuraminidase__InfluenzaA__AEW25530
augaaccccaaucagaagaucauuaccaucggcagcgugugcaugacaauugggauggccaaccugauccuccaaauuggaaauaucaucuccauuuggaucucucacagcauucagcugggcaaccagaaucagaucgagacguguaaccaauccgucauuaccuacgaaaauaacacauggguuaaucauaccuaugugaacaucucuaauacaaacuucgcugccgggcagagcguggucuccgugaaacuugcgggaaauucuagccugugcccuguuuccggcugggcuauuuacagcaaggacaacucuaucagaaucggguccaaaggagauguguuugucauucgggagccguucaucagcuguucuccccucgaaugccgcaccuuuuuccugacacagggcgcccuucugaaugacaagcacuccaacggcaccauuaaagauagaagcccuuaucggacgcucaugucuugucccaucggggaggugccuucccccuacaacagccgcuuugaauccguugccuggucugcuagcgccugccaugacggaauuaauuggcugaccaucggcaucuccgggccugauaacggagcuguggccguccugaaguauaauggcauuaucacagacaccauuaagagcuggagauacaacauccuccggacacaggagucugagugugcgugcgugaauggguccuguuucaccgugaugacggauggaccgagcgacggccaagccucuuauaaaauuuuucgcaucgaaaagggcaaaaucgucaagagcguugagaugaacgcucccaauuaccacuacgaagagugcuccuguuauccugauucuagcgagauuacaugcgugugcagagacaacuggcauggguccaaucggcccugggugagcuucaaccagaaucuggaauaccagaucggauauauuuguucuggcaucuuuggggauaacccucgccccaaugacaaaaccggauccugcggcccggucagcucuaacggggagaauggagugaagggcuucuccuuuaaguacggcaacgggguuuggauuggaagaacaaaaagcaucuccucucggaacggcuucgaaaugauuugggauccuaauggguggaccggaaccgacaacaauuuuagcaucaagcaggacaucgugggcauuaacgagugguccggguauucuggcagcuucguccaacaccccgaacuuacaggacuggauuguauccgcccuugcuucuggguggagcucauuagaggccggcccaaagagaauacgaucuggaccuccgggagcucuauuuccuuuuguggaguuaacagcgacacagugggcuggucuuggcccgauggggccgaacugccuuucaccaucgacaaguga

SEQ ID NO: 213491 - RNA, 1410 nt, Artificial Sequence
  derived and/or modified CDS sequence (opt5) from neuraminidase__InfluenzaA__AEW25537
augaaccccaaucagaagaucauuaccaucggcagcgugugcaugacaauugggauggccaaccugauccuccaaauuggaaauaucaucuccauuuggaucucucacagcauucagcugggcaaccagaaucagaucgagacguguaaccaauccgucauuaccuacgaaaauaacacauggguuaaucagaccuaugugaacaucucuaauacaaacuucgcugccgggcagagcguggucuccgugaaacuugcgggaaauucuagccugugcccuguuuccggcugggcuauuuacagcaaggacaacucuaucagaaucggguccaaaggagauguguuugucauucgggagccguucaucagcuguucuccccucgaaugccgcaccuuuuuccugacacagggcgcccuucugaaugacaagcauuccaacggcaccauuaaagauagaagcccuuaucggacgcucaugucuugucccaucggggaggugccuucccccuacaacagccgcuuugaauccguugccuggucugcuagcgccugccacgacggaauuaauuggcugaccaucggcaucuccgggccugauaacggagcuguggccguccugaaguauaauggcauuaucacagacaccauuaagagcuggagaaacaauauccuccggacacaagagucugagugugcgugcgugaacggguccuguuucaccgugaugacggauggaccgagcgacggccaggccucuuacaaaauuuuucgcaucgaaaagggcaaaaucgucaagagcguugagaugaaugcucccaaccaucacuaugaagagugcuccuguuacccugauucuagcgagauuacaugcgugugcagagacaauuggcauggguccaaccggcccugggugagcuucaaucagaaccuggaauaccagaucggauauauuuguucuggcaucuuuggggauaauccucgccccaacgacaaaaccggauccugcggcccggucagcucuaauggggccaacggagugaagggcuucuccuuuaaguacggcaacgggguuuggauuggaagaacaaaaagcaucuccucucggaauggcuucgagaugauuugggauccuaacggguggaccggaaccgacaauaacuuuagcaucaagcaagacaucgugggcauuaaugaaugguccggguauucuggcagcuucguccagcaccccgagcuuacaggacuggauuguauccgcccuugcuucuggguggaacucauuagaggccggcccaaagagaacacgaucuggaccuccgggagcucuauuuccuuuuguggaguuaauagcgacacagugggcuggucuuggcccgauggggcugagcugccuuucaccaucgacaaguga

SEQ ID NO: 213492 - RNA, 1410 nt, Artificial Sequence; identical to SEQ ID NO: 208810
  derived and/or modified CDS sequence (opt5) from neuraminidase__InfluenzaA__AEW25547

SEQ ID NO: 213493 - RNA, 1410 nt, Artificial Sequence; identical to SEQ ID NO: 208810
  derived and/or modified CDS sequence (opt5) from neuraminidase__InfluenzaA__AEW25556

SEQ ID NO: 213494 - RNA, 1410 nt, Artificial Sequence; identical to SEQ ID NO: 208810
  derived and/or modified CDS sequence (opt5) from neuraminidase__InfluenzaA__AEW25566

SEQ ID NO: 213495 - RNA, 1410 nt, Artificial Sequence
  derived and/or modified CDS sequence (opt5) from neuraminidase__InfluenzaA__AEW25584
augaaccccaaucagaagaucauuaccaucggcagcgugugcaugacaauugggauggccaaccugauccuccaaauuggaaauaucaucuccauuuggaucucucacagcauucagcugggcaaccagaaucagaucgagacguguaaccaauccgucauuaccuacgaaaauaacacauggguuaaucagaccuaugugaacaucucuaauacaaacuucgcugccgggcagagcguggucuccgugaaacuugcgggaaauucuagccugugcccuguuuccggcugggcuauuuacagcaaggacaacucuaucagaaucggguccaaaggagauguguuugucauucgggagccguucaucagcuguucuccccucgaaugccgcaccuuuuuccugacacagggcgcccuucugaaugacaagcauuccaacggcaccauuaaagauagaagcccuuaucggacgcucaugucuugucccaucggggaggugccuucccccuacaacagccgcuuugaauccguugccuggucugcuagcgccugccacgacggaauuaauuggcugaccaucggcaucuccgggccugauaacggagcuguggccguccugaaguauaauggcauuaucacagacaccauuaagagcuggagaaacaauauccuccggacacaagagucugagugugcgugcgugaacggguccuguuucaccgugaugacggauggaccgagcgacggccaggccucuuacaaaauuuuucgcaucgaaaagggcaaaaucgucaagagcguugagaugaaugcucccaacuaucauuacgaagagugcuccuguuacccugauucuagcgagauuacaugcgugugcagagacaauuggcacggguccaaccggcccugggugagcuucaaucagaaccuggaauaucagaucggauacauuuguucuggcaucuuuggggauaauccucgccccaacgacaaaaccggauccugcggcccggucagcucuaauggggccaacggagugaagggcuucuccuuuaaguauggcaacgggguuuggauuggaagaacaaaaagcaucuccucucggaauggcuucgagaugauuugggauccuaacggguggaccggaaccgacaauaacuuuagcaucaagcaaggcaucguggggauuaaugaaugguccggcuacggaggcucuuucguccagcaucccgagcuuacagggcuggacuguauccgcccuugcuucuggguggaacucauuagaggacggcccaaagagaacacgaucuggaccagcggcuccagcauuucuuuuugugggguuaauuccgauacagugggauggagcuggcccgacggcgcugagcugccuuucaccaucgauaaguga

SEQ ID NO: 213496 - RNA, 1410 nt, Artificial Sequence; identical to SEQ ID NO: 208810
  derived and/or modified CDS sequence (opt5) from neuraminidase__InfluenzaA__AEW25592

SEQ ID NO: 213497 - RNA, 1410 nt, Artificial Sequence
  derived and/or modified CDS sequence (opt5) from neuraminidase__InfluenzaA__AEW25602
augaaccccaaucagaagaucauuaccaucggcagcgugugcaugacaauugggauggccaaccugauccuccaaauuggaaauaucaucuccauuuggaucucucacagcauucagcugggcaaccagaaucagaucgagacguguaaccaauccgucauuaccuacgaaaauaacacauggguuaaucagaccuaugugaacaucucuaauacaaacuucgcugccgggcagagcguggucuccgugaaacuugcgggaaauucuagccugugcccuguuuccggcugggcuauuuacagcaaggacaacucuaucagaaucggguccaaaggagauguguuugucauucgggagccguucaucagcuguucuccccucgaaugccgcaccuuuuuccugacacagggcgcccuucugaaugacaagcauuccaacggcaccauuaaagauagaagcccuuaucggacgcucaugucuugucccaucggggaggugccuucccccuacaacagccgcuuugaauccguugccuggucugcuagcgccugccacgacggaauuaauuggcugaccaucggcaucuccgggccugauaacggagcuguggccguccugaaguauaauggcauuaucacagacaccauuaagagcuggagaaacaauauccuccggacacaagagucugagugugcgugcgugaacggguccuguuucaccgugaugacggauggaccgagcgacggccaggccucuuacaaaauuuuucgcaucgaaaagggcaaaaucgucaagagcguugagaugaaugcucccaacuaucauuacgaagagugcuccuguuacccugauucuagcgagauuacaugcgugugcagagacaauuggcacggguccaaccggcccugggugagcuucaaucagaaccuggaauaucagaucggauacauuuguucuggcaucuuuggggauaauccucgccccaacgacaaaaccggauccugcggcccggucagcucuaauggggccaacggagugaagggcuucuccuuuaaguauggcaacgggguuuggauuggaagaacaaaaagcaucuccucucggaauggcuucgagaugauuugggauccuaacggguggaccggaaccgacaagaauuuuagcaucaaacaagacaucgugggcauuaacgaaugguccggguacucuggcagcuucguccagcaucccgagcuuacaggacuggauuguauccgcccuugcuucuggguggaacucauuagaggccggcccaaggagaauacgaucuggaccuccgggagcucuauuuccuuuuguggaguuaacagcgacacagugggcuggucuuggcccgauggggcugagcugccuuucaccaucgacaaauga

SEQ ID NO: 213498 - RNA, 1410 nt, Artificial Sequence
  derived and/or modified CDS sequence (opt5) from neuraminidase__InfluenzaA__AEW25612
augaaccccaaucagaagaucauuaccaucggcagcgugugcaugacaauugggauggccaaccugauccuccaaauuggaaauaucaucuccauuuggaucucucacagcauucagcugggcaaccagaaucagaucgagacguguaaccaauccgucauuaccuacgaaaauaacacauggguuaaucagaccuaugugaacaucucuaauacaaacuucgcugccgggcagagcguggucuccgugaaacuugcgggaaauucuagccugugcccuguuuccggcugggcuauuuacagcaaggacaacucuaucagaaucggguccaaaggagauguguuugucauucgggagccguucaucagcuguucuccccucgaaugccgcaccuuuuuccugacacagggcgcccuucugaaugacaagcauuccaacggcaccauuaaagauagaagcccuuaucggacgcucaugucuugucccaucggggaggugccuucccccuacaacagccgcuuugaauccguugccuggucugcuagcgccugccacgacggaauuaauuggcugaccaucggcaucuccgggccugauaacggagcuguggccguccugaaguauaauggcauuaucacagacaccauuaagagcuggagaaacaauauccuccggacacaagagucugagugugcgugcgugaacggguccuguuucaccgugaugacggauggaccgagcgaccgccaggccucuuacaaaauuuuuagaaucgaaaagggcaaaaucgucaagagcguugagaugaaugcucccaacuaucauuacgaagagugcuccuguuacccugauucuagcgagauuacaugcgugugccgggacaauuggcacggcuccaaccgccccugggugagcuucaaucagaaccuggaauaucagaucggguacauuuguucuggaaucuuuggcgauaauccuagacccaacgacaaaaccggguccugcggaccggucagcucuaauggcgccaacggggugaagggauucuccuuuaaguauggcaacggcguuuggauugggcggacaaaaagcaucuccucucgcaauggauucgagaugauuugggauccuaacggcuggaccgggaccgacaauaacuuuagcaucaagcaagacaucgugggaauuaaugaaugguccggcuacucugggagcuucguccagcaucccgagcuuacaggccuggauuguaucagaccuugcuucuggguggaacucauucggggacgccccaaagagaacacgaucuggaccuccggcagcucuauuuccuuuugugggguuaauagcgacacagugggauggucuuggcccgauggcgcugagcugccuuucaccaucgacaaguga

SEQ ID NO: 213499 - RNA, 1410 nt, Artificial Sequence
  derived and/or modified CDS sequence (opt5) from neuraminidase__InfluenzaA__AEW25622
augaaccccaaucagaagaucauuaccaucggcagcgugugcaugacaauugggauggccaaccugauccuccaaauuggaaauaucaucuccauuuggaucucucacagcauucagcugggcaaccagaaucagaucgagacguguaaccaauccgucauuaccuacgaaaauaacacauggguuaaucagaccuaugugaacaucucuaauacaaacuucgcugccgggcagagcguggucuccgugaaacuugcgggaaauucuagccugugcccuguuuccggcugggcuauuuacagcaaggacaacucuaucagaaucggguccaaaggagauguguuugucauucgggagccguucaucagcuguucuccccucgaaugccgcaccuuuuuccugacacagggcgcccuucugaaugacaagcauuccaacggcaccauuaaagauagaagcccuuaucggacgcucaugucuugucccaucggggaggugccuucccccuacaacagccgcuuugaauccguugccuggucugcuagcgccugccacgacggaauuaauuggcugaccaucggcaucuccgggccugauaacggagcuguggccguccugaaguauaauggcauuaucacagacaccauuaagagcuggagaaacaauauccuccggacacaagagucugagugugcgugcgugaacggguccuguuucaccgugaugacggauggaccgagcgacggccaggccucuuacaaaauuuuucgcaucgaaaagggcaaaaucgucaagagcguugagaugaaugcucccaacuaucauuacgaagagugcuccuguuacccugauucuagcgagauuacaugcgugugcagagacaauuggcacggguccaaccggcccugggugagcuucaaucagaaccuggaauaucagaucggauacauuuguucuggcaucuuuggggauaauccucgccccaacgacaaaaccggauccugcggcccggucagcucuaauggggccaacggagugaagggcuucuccuuuaaguauggcaacgggguuuggauuggaagaacaaaaagcaucuccucucggaauggcuucgagaugauuugggauccuaacggguggaccggaaccgacaauaacuuuagcaucaagcaagacaucgugggcauuaaugaaugguccggguacucuggcagcuucguccagcaucccgagcuuacaggacuggauuguauccgcccuugcuucuggguggaacucauuagaggccggcccaaagagaacuccaucuggacgagcgggucuuccauuagcuuuuguggaguuaauucugacaccgugggcugguccuggcccgauggggcugagcugccuuucacaaucgacaaguga

SEQ ID NO: 213500 - RNA, 1410 nt, Artificial Sequence
  derived and/or modified CDS sequence (opt5) from neuraminidase__InfluenzaA__AEW25631
augaaccccaaucagaagaucauuaccaucggcagcgugugcaugacaauugggauggccaaccugauccuccaaauuggaaauaucaucuccauuuggaucucucacagcauucagcugggcaaccagaaucagaucgagacguguaaccaauccgucauuaccuacgaaaauaacacauggguuaaucagaccuaugugaacaucucuaauacaaacuucgcugccgggcagagcguggucuccgugaaacuugcgggaaauucuagccugugcccuguuuccggcugggcuauuuacagcaaggacaacucuaucagaaucggguccaaaggagauguguuugucauucgggagccguucaucagcuguucuccccucgaaugccgcaccuuuuuccugacacagggcgcccuucugaaugacaagcauuccaacggcaccauuaaagauagaagcccuuaucggacgcucaugucuugucccaucggggaggugccuucccccuacaacagccgcuuugaauccguugccuggucugcuagcgccugccacgacggaauuaauuggcugaccaucggcaucuccgggccugauaacggagcuguggccguccugaaguauaauggcauuaucacagacaccauuaagagcuggagaaacaauauccuccggacacaagagucugagugugcgugcgugaacggguccuguuucaccgugaugacggauggaccgagcgacggccaggccucuuacaaaauuuuucgcaucgaaaagggcaaaaucgucaagagcguugagaugaaugcucccaacuaucauuacgaagagugcuccuguuacccugauucuagcgagauuacaugcgugugcagagacaauuggcacggguccaaccggcccugggugagcuucaaucagaaccuggaauaucagaucggauacauuuguucuggcaucuuuggggauaauccucgccccaacgacaaaaccggauccugcggcccggucagcucuaauggggccuccggagugaagggcuucagcuuuaaguauggcaacgggguuuggauuggaagaacaaaauccaucucuagccggaacggcuucgagaugauuugggauccuaauggguggaccggaaccgacaacaauuuuuccaucaagcaagacaucgugggcauuaacgaauggucuggguacagcggcuccuucguccagcaucccgagcuuacaggacuggauuguauccgcccuugcuucuggguggaacucauuagaggccggcccaaagagaauacgaucuggaccagcgggucuuccauuagcuuuuguggaguuaacucugacacagugggcugguccuggcccgauggggcugagcugccuuucaccaucgacaaguga

SEQ ID NO: 213501 - RNA, 1410 nt, Artificial Sequence; identical to SEQ ID NO: 208810
  derived and/or modified CDS sequence (opt5) from neuraminidase__InfluenzaA__AEW25639

SEQ ID NO: 213502 - RNA, 1410 nt, Artificial Sequence
  derived and/or modified CDS sequence (opt5) from neuraminidase__InfluenzaA__AEW25648
augaaccccaaucagaagaucauuaccaucggcagcgugugcaugacaauugggauggccaaccugauccuccaaauuggaaauaucaucuccauuuggaucucucacagcauucagcugggcaaccagaaucagaucgagacguguaaccaauccgucauuaccuacgaaaauaacacauggguuaaucauaccuaugugaacaucucuaauacaaacuucgcugccgggcagagcguggucuccgugaaacuugcgggaaauucuagccugugcccuguuuccggcugggcuauuuacagcaaggacaacucuaucagaaucggguccaaaggagauguguuugucauucgggagccguucaucagcuguucuccccucgaaugccgcaccuuuuuccugacacagggcgcccuucugaaugacaagcacuccaacggcaccauuaaagauagaagcccuuaucggacgcucaugucuugucccaucggggaggugccuucccccuacaacagccgcuuugaauccguugccuggucugcuagcgccugccaugacggaauuaauuggcugaccaucggcaucuccgggccugauaacggagcuguggccguccugaaguauaauggcauuaucacagacaccauuaagagcuggagaaacaauauccuccggacacaggagucugagugugcgugcgugaacggguccuguuucaccgugaugacggauggaccgagcgacggccaagccucuuacaaaauuuuucgcaucgaaaagggcaaaaucgucaagagcguugagaugaaugcucccaacuaucacuacgaagagugcuccuguuacccugauucuagcgagauuacaugcgugugcagagacaauuggcauggguccaaccggcccugggugagcuucaaucagaaccuggaauaucagaucggauacauuuguucuggcaucuuuggggauaauccucgccccaacgacaaaaccggauccugcggcccggucagcucuaauggggccaacggagugaagggcuucuccuuuaaguauggcaacgggguuuggauuggaagaacaaaaagcaucuccucucggaauggcuucgagaugauuugggauccuaacggguggaccggaaccgacaauaacuuuagcaucaagcaggacaucgugggcauuaaugaaugguccggguacucuggcagcuucguccaacaccccgagcuuacaggacuggauuguauccgcccuugcuucuggguggaacucauuagaggccggcccaaagagaacacgaucuggaccuccgggagcucuauuuccuuuuguggaguuaauagcgacacagugggcuggucuuggcccgauggggcugagcugccuuucaccaucgacaaguga

SEQ ID NO: 213503 - RNA, 1410 nt, Artificial Sequence
  derived and/or modified CDS sequence (opt5) from neuraminidase__InfluenzaA__AEW25656
augaaccccaaucagaagaucauuaccaucggcagcgugugcaugacaauugggauggccaaccugauccuccaaauuggaaauaucaucuccauuuggaucucucacagcauucagcugggcaaccagaaucagaucgagacguguaaccaauccgucauuaccuacgaaaauaacacauggguuaaucagaccuaugugaacaucucuaauacaaacuucgcugccgggcagagcguggucuccgugaaacuugcgggaaauucuagccugugcccuguuuccggcugggcuauuuacagcaaggacaacucuaucagaaucggguccaaaggagauguguuugucauucgggagccguucaucagcuguucuccccucgaaugccgcaccuuuuuccugacacagggcgcccuucugaaugacaagcauuccaacggcaccauuaaagauagaagcccuuaucggacgcucaugucuugucccaucggggaggugccuucccccuacaacagccgcuuugaauccguugccuggucugcuagcgccugccacgacggaauuaauuggcugaccaucggcaucuccgggccugauaacggagcuguggccguccugaaguauaauggcauuaucacagacaccauuaagagcuggagaaacaauauccuccggacacaagagucugagugugcgugcgugaacggguccuguuucaccgugaugacggauggaccgagcgacggccaggccucuuacaaaauuuuucgcaucgaaaagggcaaaaucgucaagagcguugagaugaaugcucccaacuaucauuacgaagagugcuccuguuacccugauucuagcgagauuacaugcgugugcagagacaauuggcacggguccaaccggcccugggugagcuucaaucagaaccuggaauaucagaucggauacauuuguucuggcaucuuuggggauaauccucgccccaacgacaaaaccggauccugcggcccggucagcucuaauggggccaacggagugaagggcuucuccuuuaaguauggcaacgggguuuggauuggaagaacaaaaagcaucuccucucggaauggcuucgagaugauuugggauccuaacggguggaccggaaccgacaauaacuuucccaucaagcaagacaucgugggcauuaaugaauggagcggguacuccggcucuuucguccagcauccugagcuuacaggacuggauuguauccgccccugcuucuggguggaacucauuagaggccggcccaaagagaacacgaucuggaccagcggguccagcauuucuuuuuguggaguuaauuccgacacagugggcuggagcuggccugauggggcugagcugccguucaccaucgacaaguga

SEQ ID NO: 213504 - RNA, 1410 nt, Artificial Sequence
  derived and/or modified CDS sequence (opt5) from neuraminidase__InfluenzaA__AEW25664
augaaccccaaucagaagaucauuaccaucggcagcgugugcaugacaauugggauggccaaccugauccuccaaauuggaaauaucaucuccauuuggaucucucacagcauucagcugggcaaccagaaucagaucgagacguguaaccaauccgucauuaccuacgaaaauaacacauggguuaaucagaccuaugugaacaucucuaauacaaacuucaccgcugggcagagcguggucuccgugaaacuugccggaaauucuagccugugcccuguuuccggcugggcgauuuacagcaaggacaacucuaucagaaucggguccaaaggagauguguuugucauucgggagccguucaucagcuguucuccccucgaaugccgcacauuuuuccugacccagggcgcccuucugaaugacaagcauuccaacggcacgauuaaagauagaagcccuuaucggacccucaugucuugucccaucggggaggugccuucccccuacaacagccgcuuugaauccguugcuuggucugccagcgcuugccacgacggaauuaauuggcugacaaucggcaucuccgggccugauaacggagccguggcuguccugaaguauaauggcauuaucaccgacacaauuaagagcuggagaaacaauauccuccggacccaagagucugagugugccugcgugaacggguccuguuucacggugaugacagauggaccgagcgacggccaggcgucuuacaaaauuuuucgcaucgaaaagggcaaaaucgucaagagcguugagaugaaugcccccaacuaucauuacgaagagugcuccuguuacccugauucuagcgagauuaccugcgugugcagagacaauuggcacggguccaaccggcccugggugagcuucaaucagaaccuggaauaucagaucggauacauuuguucuggcaucuuuggggauaauccucgccccaacgacaaaacaggauccugcggcccggucagcucuaauggggcuaacggagugaagggcuucuccuuuaaguauggcaacgggguuuggauuggaagaaccaaaagcaucuccucucggaauggcuucgagaugauuugggauccuaacggguggaccggaacagacaauaacuuuagcaucaagcaagacaucgugggcauuaaugaaugguccggguacucuggcagcuucguccagcaucccgagcuuacgggacuggauuguauccgcccuugcuucuggguggaacucauuagaggccggcccaaagagaacaccaucuggacauccgggagcucuauuuccuuuuguggaguuaauagcgacaccggcggguggucuuggcccgauggagccgagcugccuuucacaaucgacaaguga

SEQ ID NO: 213505 - RNA, 1410 nt, Artificial Sequence; identical to SEQ ID NO: 213499
  derived and/or modified CDS sequence (opt5) from neuraminidase__InfluenzaA__AEW25671

SEQ ID NO: 213506 - RNA, 1410 nt, Artificial Sequence; identical to SEQ ID NO: 209987
  derived and/or modified CDS sequence (opt5) from neuraminidase__InfluenzaA__AEW25680

SEQ ID NO: 213507 - RNA, 1410 nt, Artificial Sequence
  derived and/or modified CDS sequence (opt5) from neuraminidase__InfluenzaA__AEW25689
augaaccccaaucagaagaucauuaccaucggcagcgugugcaugacaauugggauggccaaccugauccuccaaauuggaaauaucaucuccauuuggaucucucacagcauucagcugggcaaccagaaucagaucgagacguguaaccaauccgucauuaccuacgaaaauaacacauggguuaaucagaccuaugugaacaucucuaauacaaacuucgcugccgggcagagcguggucuccgugaaacuugcgggaaauucuagccugugcccuguuuccggcugggcuauuuacagcaaggacaacucuaucagagugggguccaaaggagaugucuuugugauccgggagccguucauuagcuguucuccccucgaaugccgcaccuuuuuccugacacagggcgcccuucugaaugacaagcauuccaacggcaccaucaaagauagaagcccuuaucggacgcucaugucuugucccauuggggagguuccuucccccuacaacagccgcuuugaauccguggccuggucugcuagcgccugccacgacggaaucaauuggcugaccauuggcaucuccgggccugauaacggagcugucgccgugcugaaguauaauggcaucauuacagacaccaucaagagcuggagaaacaauauucuccggacacaagagucugagugugcgugcgugaacggguccuguuucaccgucaugacggauggaccgagcgacggccaggccucuuacaaaaucuuucgcauugaaaagggcaaaaucguuaagagcguggagaugaaugcucccaacuaucauuacgaagagugcuccuguuacccugauucuagcgagaucacaugcgugugcagagacaauuggcacggguccaaccggcccugggucagcuucaaucagaaccuggaauaucagauuggauacaucuguucuggcauuuuuggggauaauccucgccccaacgacaaaaccggauccugcggcccggugagcucuaauggggccaacggaguuaagggcuucuccuuuaaguauggcaacgggguguggaucggaagaacaaaaagcauuuccucucggaauggcuucgagaugaucugggauccuaacggguggaccggaaccgacaauaacuuuagcauuaagcaagacaucgucggcaucaaugaaugguccggguacucuggcagcuucgugcagcaucccgagcuuacaggacuggauuguauucgcccuugcuucuggguugaacucaucagaggccggcccaaagagaacacgauuuggaccuccgggagcucuaucuccuuuuguggagugaauagcgacacagucggcuggucuuggcccgauggggcugagcugccuuucaccauugacaaguga

SEQ ID NO: 213508 - RNA, 1410 nt, Artificial Sequence; identical to SEQ ID NO: 213502
  derived and/or modified CDS sequence (opt5) from neuraminidase__InfluenzaA__AEW25698

SEQ ID NO: 213509 - RNA, 1410 nt, Artificial Sequence; identical to SEQ ID NO: 208810
  derived and/or modified CDS sequence (opt5) from neuraminidase__InfluenzaA__AEW25708

SEQ ID NO: 213510 - RNA, 1410 nt, Artificial Sequence; identical to SEQ ID NO: 208810
  derived and/or modified CDS sequence (opt5) from neuraminidase__InfluenzaA__AEX09177

SEQ ID NO: 213511 - RNA, 1413 nt, Artificial Sequence
  derived and/or modified CDS sequence (opt5) from neuraminidase__InfluenzaA__AEX33324
augaaccccaaucagaagaucauuaccaucggcagcauuuccaucgccauugggaucaucucucugaugcuccaaauuggaaacaucauuagcaucugggcuucccacucuauucagacaggcagccagaaucauacggggaucugcaaccagagaauuaucaccuacgaaaauuccacaugggugaaccacaccuaugucacaaucaauaacaccaauguuguggccggaaaagacaagacaucugugacccuggcgggcaacagcucccuuuguagcauuucugggugggcuaucuacacgaaagauaauuccauucggaucggaagcaagggcgacgucuucgugauucgcgagccuuuuaucucuugcucccaucuggaguguagaaccuucuuucucacacaaggcgcccugcuuaacgauaaacacagcaaugggaccguuaaggaccggucuccguaucgcgcccugauguccugcccccucggagaagcuccuagccccuacaacuccaaguucgagucuguggccuggagcgcuuccgccugucaugauggcaugggguggcugacaaucggaauuagcggcccugacaauggggcggucgccgugcugaaauauaacggaaucauuaccgaaacgaucaagucuuggaaaaagcggauucucagaacacaggaguccgagugcguuugugugaacggcagcugcuuuaccaucaugacagauggccccucuaauggggcugccagcuacaaaaucuucaagauugaaaagggaaaagucaccaaguccaucgagcugaacgcuccuaauuuucacuaugaagaguguucuugcuacccggacaccggcacagugaugugugugugccgcgauaacuggcacgggagcaauagacccugggucuccuucaaccagaaucuugacuaccagauuggauauaucugcagcggcguuuuuggggauaacccucggcccaaagacggagagggcucuuguaauccugugacgguggauggcgccgacggggucaagggauucuccuacaaauauggcaacgggguguggauuggacgcaccaagagcaauagacugcggaaaggcuuugaaaugaucugggaccccaacggguggacagauaccgacucugauuucuccguuaagcaagacguggucgcgauuacagauuggagcggcuacuccggaucuuuugugcagcauccggagcucaccggccuggacugcauccgcccuuguuucuggguugaacuugugagagggcugccccgggagaauacgacaaucuggaccagcggauccucuauuagcuucugcggcgucaacuccgauaccgccaauuggagcuggccugacggggcugaacuccccuuuacaaucgauaaguga

SEQ ID NO: 213512 - RNA, 1413 nt, Artificial Sequence
  derived and/or modified CDS sequence (opt5) from neuraminidase__InfluenzaA__AEX33368
augaaccccaaucagaagaucauuaccaucggcagcauuuccaucgccauugggaucaucucucugaugcuccaaauuggaaacaucauuagcaucugggcuucccacucuauucagacaggcagccagaaucauacggggaucugcaaccagagaauuaucaccuacgaaaauuccacaugggugaaccacaccuaugucaauaucaacaauacaaacguuguggccggaaaagacaagaccucugugacacuggcgggcaauagcucccuuugugcuauuagcgggugggccaucuacaccaaagauaacucuauucggaucggauccaagggcgacgucuucgugauucgcgagccuuuuaucagcugcucucaucuggaguguagaacguucuuucucacccaaggcgcccugcuuaaugauaaacacuccaacgggacaguuaaggaccggagcccguaucgcgcucugaugucuugcccccucggagaagccccuucccccuacaauagcaaguucgaguccguggcuuggucugccagcgcgugucaugauggcaugggguggcugaccaucggaauuuccggcccugacaacggggccgucgcugugcugaaauauaacggaaucauuacagaaaccaucaagagcuggaaaaagcggauucucagaacgcaggagucugagugcguuugugugaauggcuccugcuuuacaaucaugaccgauggccccagcaacggggccgcuucuuacaaaaucuucaagauugaaaagggaaaagucacaaagagcaucgagcugaaugccccuaacuuucacuaugaagaguguuccugcuacccggacaccggcaccgugaugugugugugccgcgauaauuggcacgggucuaacagacccugggucagcuucaaucagaaccuugacuaccagauuggauauaucugcuccggcguuuuuggggauaauccucggcccaaagacggagagggcagcuguaacccugugacaguggauggcgcggacggggucaagggauucucuuacaaauauggcaaugggguguggauuggacgcacgaaguccaacagacugcggaaaggcuuugaaaugaucugggaccccaauggguggaccgauacagacagcgauuucucuguuaagcaagacguggucgccauuaccgauugguccggcuacagcggauccuuugugcagcauccggagcucacaggccuggacugcauccgcccuuguuucuggguugaacuugugagagggcugccccgggagaacaccacgaucuggacaucuggaagcuccauuucuuucugcggcgucaauagcgauaccgcuaacugguccuggccugacggggccgaacuccccuuuaccaucgauaaguga

SEQ ID NO: 213513 - RNA, 1413 nt, Artificial Sequence
  derived and/or modified CDS sequence (opt5) from neuraminidase__InfluenzaA__AEX33379
augaaccccaaucagaagaucauuaccaucggcagcauuuccaucgccauugggaucaucucucugaugcuccaaauuggaaacaucauuagcaucugggcuucccacucuauucagacaggcauccagaaucauacggggauuugcaaccagagaaucaucaccuacgagaauagcacaugggugaaccacaccuaugucacaauuaauaacaccaauguuguggccggaaaagacaagacauccgugacccuggcgggcaacucuagccuuuguuccaucagcgggugggcuauuuacacgaaagauaauucuauccggauuggauccaagggcgacgucuucgugauccgcgaaccuuuuaucagcugcucucaucuggaguguagaaccuucuuucucacacaaggcgcccugcuuaacgauaaacacuccaaugggaccguuaaggaccggagcccguaucgcgcccugaugucuugcccccucggagaagcuccuucccccuacaacagcaaguucgaguccguggccuggucugcuagcgccugucaugauggcaugggguggcugacaauuggaaucuccggcccugacaauggggcggucgccgugcugaaauauaacggaauuaucaccgaaacgauuaagagcuggaaaaagagaauccuccggacacaggagucugagugcguuugugugaacggcuccugcuuuaccaucaugacagauggccccagcaauggggcugccucuuacaaaauuuucaagaucgaaaagggaaaagucaccaagagcauugagcugaacgcuccuaauuuucacuaugaagaguguuccugcuacccggacaccggcacagugaugugugugugccgcgauaacuggcacgggucuaauagacccugggucagcuucaaccagaaucuugacuaccagaucggauauauuugcuccggcguuuuuggggauaacccucggccccgcgacggagagggcagcuguaauccugugacgguggauggcgccgacggggucaaaggauucucuuacaaguauggcaacgggguguggaucggaagaaccaaauccaaucggcugcgcaagggcuuugaaaugauuugggaccccaacggguggacagauaccgacagcgauuucucuguuaaacaagacguggucgcgaucacagauugguccggcuacagcggauccuuugugcagcauccggagcucaccggccuggacugcaucagaccuuguuucuggguugaacuugugcgggggcugccccgcgagaauacgacaauuuggaccucuggaagcuccaucucuuucugcggcgucaacagcgauaccgccaauugguccuggccugacggggcugaacuccccuuuacaauugauaaguga

SEQ ID NO: 213514 - RNA, 1413 nt, Artificial Sequence; identical to SEQ ID NO: 213513
  derived and/or modified CDS sequence (opt5) from neuraminidase__InfluenzaA__AEX33390

SEQ ID NO: 213515 - RNA, 1413 nt, Artificial Sequence; identical to SEQ ID NO: 213513
  derived and/or modified CDS sequence (opt5) from neuraminidase__InfluenzaA__AEX33401

SEQ ID NO: 213516 - RNA, 1413 nt, Artificial Sequence; identical to SEQ ID NO: 213513
  derived and/or modified CDS sequence (opt5) from neuraminidase__InfluenzaA__AEX33412

SEQ ID NO: 213517 - RNA, 1413 nt, Artificial Sequence; identical to SEQ ID NO: 213513
  derived and/or modified CDS sequence (opt5) from neuraminidase__InfluenzaA__AEX33423

SEQ ID NO: 213518 - RNA, 1413 nt, Artificial Sequence; identical to SEQ ID NO: 213513
  derived and/or modified CDS sequence (opt5) from neuraminidase__InfluenzaA__AEX33434

SEQ ID NO: 213519 - RNA, 1413 nt, Artificial Sequence; identical to SEQ ID NO: 213513
  derived and/or modified CDS sequence (opt5) from neuraminidase__InfluenzaA__AEX33445

SEQ ID NO: 213520 - RNA, 1410 nt, Artificial Sequence
  derived and/or modified CDS sequence (opt5) from neuraminidase__InfluenzaA__AEX33544
augaaccccaaucagaagaucauuaccaucggcagcuucucccugacaauugccgcuaucugcuuucucaugcaaauugccauccuggugacgaccgucacacuucacuucaaacagcaugaguguaacucuccuccgaauaaccagguuaugcugugcgaacccaccaucauugagagaaauaucacagaaauuguguaccucaccaacacaaccaucgagaaggaaauuuguccuaaacuggcggaguaucggaauuggagcaagccccagugcaacaucacgggguuugcuccuuucuccaaagacaauucuauucgccuuagcgccggaggcgauaucugggugaccagagagcccuacgucuccugugacccugauaagugcuaucaauuugcccuggggcagggaacaacccucaacaauggccacucuaacgacacagugcaugaucggaccccguaccgcacgcugcugaugaaugaacucgggguucccuuccaccugggaacaagacagguguguaucgcuuggagcuccagcucuugccaugacggcaaggccuggcuucacgucugugugaccggcgaugacaaaaacgcuacagccuccuuuauuuauaaugggcggcugguugauagcaucggaucuugguccaagaaaauucuccgcacccaggagagcgaaugcguguguaucaacgggaccugcacagucgugaugacggacggcucugcguccggaaaggccgauaccaaaauucuguucaucgaggagggcaagaucgugcacauuagcacacuuuccgggucugcucaacaugucgaagagugcagcuguuacccuagauaucccggaguucggugcgugugucgcgacaacuggaagggcuccaauagaccuaucguggauauuaacgucaaagacuacagcaucgugucuuccuacguuugcagcggccuggugggggacacaccccggaagaaugauucuuuuagcuccucucacugucucgacccgaacaaugaagagggaggccauggggucaaaggaugggccuucgaugacggcaacgauguguggauggggcgcaccauuagcgaaaagcugagauccggauaugagaccuuuaaaguuaucgagggcuggagcaagccuaauucuaaacugcagaucaaccgccaggugauugucgaacggggcaauagauccggguacagcggaaucuucucuguggagggcaaguccugcauuaaccgguguuuuuaugucgaacucaucagagggcgcaaggagaaaacggaagugugguggacaagcaauuccauuguuguguucugcggaaccucuggcaccuacgggacaggcagcuggcccgacggagcugauaucaaccugaugccuauuuga

SEQ ID NO: 213521 - RNA, 1410 nt, Artificial Sequence; identical to SEQ ID NO: 206786
  derived and/or modified CDS sequence (opt5) from neuraminidase__InfluenzaA__AEX33555

SEQ ID NO: 213522 - RNA, 1410 nt, Artificial Sequence
  derived and/or modified CDS sequence (opt5) from neuraminidase__InfluenzaA__AEX33610
augaaccccaaucagaagaucauuaccaucggcagcgugucccugacaauuucuacgaucugcuucuuuaugcaaauugccauccucaucaccacagucacccugcacuucaaacaguacgaguuuaacccuccgcccaauaaccagguuaugcuuugugaaccuacaauuaucgagagaaauauuaccgaaaucguguaucugacaaacaccacgauugagaaggaaaucugccccaaacucgcugaguaccggaauuggagcaagccucagugugacauuaccggguucgcccccuuuuccaaagauaacucuauccgccugagcgcgggaggcgacaucugggugacaagagagccuuaugucuccugcgauccggacaaguguuaccaauucgcucuugggcagggaaccacacugaauaacgugcauucuaaugauaccguucacgaccggacgcccuaucgcacacuccugaugaacgaacugggcgugccuuuucaucucgggaccaagcaggucugcauugccuggagcuccagcucuugucacgauggaaaagccuggcugcaugugugcguuacaggcgacgauaagaaugcuaccgccuccuucaucuacaacggcagacuuguggacagcauugucucuugguccaaaaagauccugcggacccaggagagcgaaugugugugcauuaaugggacauguacgguggucaugaccgauggaucugcuuccggcaaagccgacacaaagauccucuuuaucgaggaggggaagauuguucacaccagcacacuguccggaucugcgcaacacguggaagagugcagcugcuauccccgcuacccuggcgugagaugugucugccgggauaacuggaaaggguccaaccgccccaucguggacauuaauaucaaggacuacaacauuguuagcucuuauguguguuccggacuugucggcgauaccccgcggaaaaaugacagcucuagcuccucucauugccuggauccuaacaaugaagagggcgggcacggagugaagggcugggccuucgacgaugggaacgacguuuggaugggaagaacgaucagcgaaaaacuccgcuccggcuacgagacauuuaaggugaucgggggauggagcaaucccaacucuaaacugcagauuaauagacaggucaucguggaucggggcaaccgcuccggcuauagcgggauuuucucugucgagggaaaguccuguaucaauagaugcuuuuacguggaacugauucggggcagaaaggaggaaaccgagguucucuggaccagcaacuccaucguggucuucugugggacaucuggaaccuauggcacagggagcuggccugacggcgcugauauuaaucugaugcccaucuga

SEQ ID NO: 213523 - RNA, 1410 nt, Artificial Sequence
  derived and/or modified CDS sequence (opt5) from neuraminidase__InfluenzaA__AEX33828
augaaccccaaucagaagaucauuaccaucggcagcgugucccugacaauuucuacgaucugcuucuuuaugcaaauugccauccucaucaccacagucacccugcacuucaaacaguacgaguuuaacccuccgcccaauaaccagguuaugcuuugugaaccuacaauuaucgagagaaauauuaccgaaaucguguaucugacaaacaccacgauugagaaggaaaucugccccaaacucgcugaguaccggaauuggagcaagccucagugugacauuaccggguucgcccccuuuuccaaagauaacucuauccgccugagcgcgggaggcgacaucugggugacaagagagccuuaugucuccugcgauccggacaaguguuaccaauucgcucuugggcagggaaccacacugaauaacgugcauucuaaugauaccguucacgaccggacgcccuaucgcacacuccugaugaacgaacugggcgugccuuuucaucucgggaccaagcaggucugcauugccuggagcuccagcucuugucacgauggaaaagccuggcugcaugugugcguuacaggcgacgauaagaaugcuaccgccuccuucaucuacaacggcagacuuguggacagcauugucucuugguccaaagagauccugcggacccaggaaagcgagugugugugcauuaaugggacauguacgguggucaugaccgauggaucugcuuccggcaaggccgacacaaaaauccucuuuaucgaggaagggaagauuguucacaccagcacacuguccggaucugcgcaacacguggaggaaugcagcugcuauccccgcuacccuggcgugagaugugucugccgggauaacuggaagggguccaaccgccccaucguggacauuaauaucaaagacuacagcauuguuucuuccuauguguguagcggacuugucggcgauaccccgagaaagaacgacucuagcuccucuagccauugccuggauccuaauaacgaggaaggcgggcacggagugaaaggcugggccuucgacgaugggaaugacguuuggaugggacggacgaucuccgagaagcuccgcagcggcuacgagacauuuaaagugaucgaaggguggucuaaccccaauuccaagcugcagauuaacagacaggucaucguggaucggggaaaucgcagcggcuauucuggcauuuucuccgucgaggggaaaagcuguaucaacagaugcuuuuacguggaacugauucggggaagaaaggaggaaaccgagguucucuggaccuccaauucuaucguggucuucuguggcacaagcgggaccuauggaacaggcuccuggccugacggggcugauauuaaccugaugcccaucuga

SEQ ID NO: 213524 - RNA, 1410 nt, Artificial Sequence; identical to SEQ ID NO: 206784
  derived and/or modified CDS sequence (opt5) from neuraminidase__InfluenzaA__AEX33839

SEQ ID NO: 213525 - RNA, 1413 nt, Artificial Sequence
  derived and/or modified CDS sequence (opt5) from neuraminidase__InfluenzaA__AEX33861
augaaccccaaucagaagaucauuaccaucggcagcauuuccaucgccauugggacaaucucucugaugcuccaagugggaaacaucauuagcaucugggcuucccacucuauucagacgggcagccagaaucauaccgggaucugcaaccagagaauuaucacauacgagaauagcaccugggucaaccacacauauguuaauauuaacaauaccaacgugguggccggaaaagacaagacaucugucgcgcuggcuggcaauagcucccuuuguagcaucucugggugggccaucuacaccaaagauaacuccauucggaucggaagcaagggcgacguguucguuauucgcgaaccuuuuaucucuugcucccaucuggaguguagaacguucuuucucacccaaggcgcccugcuuaaugauaaacacagcaacgggacagugaaggaccggucuccguaucgcgcucugauguccugcccccucggagaagccccuagccccuacaauuccaaguucgagucugucgcuuggagcgccuccgcgugucaugauggcaugggguggcugaccauuggaaucagcggcccugacaacggggccguggcuguucugaaauauaacggaaucauuacagaaaccaucaagucuuggaaaaagcggauucucagaacgcaggaguccgagugcgugugugucaauggcagcugcuuuacaaucaugaccgauggccccucuaacggggccgcuagcuacaaaauuuucaagaucgaaaagggacaggugacaaaauccguggagcugaaugccccuaacuuucacuaugaagaguguucuugcuacccggacaccggcaccgucauguguguuugccgcgauaauuggcacgggagcaacagacccuggguguccuucaaucagaaccuugacuaccaaaucggauauauuugcagcggcguguuuggggauaauccucggcccaaggacggaaaaggcucuuguaacccugucacaguggauggcgcggacgggguuaagggauucuccuacaaauauggcaaugggguguggaucggacgcacgaaguccaacagacugcggaaaggcuuugagaugauuugggaccccaauggguggaccgauacagacucugauuucuccgucaagcaggacgugguugccaucaccgauuggagcggcuacuccggaucuuuugugcagcauccggaacucacaggccuggacugcauucgcccuuguuucugggucgagcuugugagagggcugccccgggaaaacaccacgaucuggacaagcggauccucuauuagcuucugcggcgucgauuccgacaccgcuaauuggagcuggccugauggggccgagcuccccuuuaccaucgacaaguga

SEQ ID NO: 213526 - RNA, 1410 nt, Artificial Sequence
  derived and/or modified CDS sequence (opt5) from neuraminidase__InfluenzaA__AEX33872
augaaccccaaucagaagaucauuaccaucggcagcgugucccugacaauuucuacgaucugcuucuuuaugcaaauugccauccucaucaccacagucacccugcacuucaaacaguacgaguuuaacagcccuccgaauaaccagguuaugcagugugaacccacaauuaucgagagaaauauuaccgaaaucguguaucuuacaaacaccacgauugagaaggaaaucugcccuaaacuggcugaguaccggaauugguccaagccccaaugugacauuaccggguucgccccuuuuucuaaagauaacagcauccgccucuccgcgggaggcgacaucugggugacaagagagcccuaugucucuugcgauccugacaaguguuaccaguucgcucuggggcagggaaccacacuuaauaacgugcauagcaaugauaccguucacgaccggacgccguaucgcacacugcucaugaacgaacugggcgugcccuuucaucuggggaccaagcaggucugcauugccugguccucuagcuccugucacgauggaaaagccuggcuccaugugugcguuacaggcgacgauaagaaugcuaccgccagcuucaucuacaacggcagacugguggacucuauugucuccuggagcaaagagauccuucggacccaagaaucugagugugugugcauuaaugggacauguacgguggucaugaccgauggauccgcuagcggcaaggccgacacaaaaauccuguuuaucgaggaagggaagauuguucacaccuccacacucucuggaagcgcgcagcacguggaggaaugcuccugcuauccucgcuaccccggcgugagaugugucugccgggauaacuggaaggggagcaaccgcccuaucguggacauuaauaucaaagacuacucuauuguuuccagcuauguguguucuggacuggucggcgauacccccagaaagaacgacagcuccucuagcucccauugccuuaauccgaacaaugaggaaggcgggcacggagugaaaggcugggccuucgaugacgggaacgauguuuggaugggacggacgaucagcgagaagcugcgccucggcuacgagacauuuaaagugaucgaaggguggucuaauccuaacuccaagcugcagauuaauagacaggucaucguggaccggggaaaccgcagcggcuauucuggcauuuucuccgucgaggggaaaagcuguaucaauagaugcuuuuacguggaacugauucggggaagaaaggaggaaaccgagguucucuggaccuccaacucuaucguggucuucuguggcacaagcgggaccuauggaacaggcuccuggcccgauggggcugacauuaaucugaugccuaucuga

SEQ ID NO: 213527 - RNA, 1410 nt, Artificial Sequence; identical to SEQ ID NO: 206784
  derived and/or modified CDS sequence (opt5) from neuraminidase__InfluenzaA__AEX33883

SEQ ID NO: 213528 - RNA, 1410 nt, Artificial Sequence
  derived and/or modified CDS sequence (opt5) from neuraminidase__InfluenzaA__AEX33894
augaaccccaaucagaagaucauuaccaucggcagcgugucccugacaauuucuacgaucugcuucuuuaugcaaauugccauccucaucaccacagucacccugcacuucaaacaguacgaguuuaacagcccuccgaauaaccagguuaugcuuugugaacccacaauuaucgagagaaauauuaccgaaaucguguaucugacaaacaccacgauugagaaggaaaucugcccuaaacucgcugaguaccggaauugguccaagccccaguguaacauuaccggguucgccccuuuuucuaaagacaauagcauccgccuguccgcgggaggcgauaucugggugacaagagagcccuaugucucuugcgacccugauaaguguuaccaauucgcucuugggcagggaaccacacugaacaaugugcauagcaacgacaccguucacgaucggacgccguaucgcacacuccugaugaaugaacugggcgugcccuuucaucucgggaccaagcaggucugcauugccugguccucuagcuccugucacgacggaaaagccuggcugcaugugugcguuacaggcgaugacaagaacgcuaccgccagcuucaucuacaauggcagacuuguggauucuauugucuccuggagcaaagagauccugcggacccaggaaucugagugugugugcauugacgggacauguacgguggucaugaccgauggauccgcuagcggcaaggccgacacaaaaauccucuuuaucgaggaagggaagauuguucacaccuccacacugucuggaagcgcgcaacacguggaggaaugcuccugcuauccucgcuaccccggcgugagaugugucugccgggauaacuggaaggggagcaaccgcccuaucguggacauuaauaucaaagacuacucuauuguuuccagcuauguguguucuggacuugucggcgauacccccagaaagaacgacagcuccucuagcucccauugccuggauccgaauaacgaggaaggcgggcacggagugaaaggcugggccuucgacgaugggaaugacguuuggaugggacggacgaucagcgagaagcuccgcucuggcuacgagacauuuaaagugaucgaagggugguccaacccuaauagcaagcugcagauuaacagacaggucaucguggaucggggaaaucgcucuggcuauuccggcauuuucagcgucgaggggaaauccuguaucaacagaugcuuuuacguggaacugauucggggaagaaaggaggaaaccgagguucucuggaccucuaauagcaucguggucuucuguggcacauccgggaccuauggaacaggcucuuggcccgacggggcugauauuaaccugaugccuaucuga

SEQ ID NO: 213529 - RNA, 1413 nt, Artificial Sequence
  derived and/or modified CDS sequence (opt5) from neuraminidase__InfluenzaA__AEX33916
augaaccccaaucagaagaucauuaccaucggcagcauuuccaucgccauugggaucaucucucugauucuccaaaucggaaacauuaucagcauuugggcuucccacucuauccagacaggcagccagaaucauacggggauuugcaaccagagaaucaucaccuacgaaaauuccacaugggugaacaauaccuaugucaacauuaauaacacaaauguuguggccgagaaagacaagaccucugugacacuggcgggaaacagcucccuuuguagcaucucuggcugggcuauuuacaccaaagauaauuccauccggauugggagcaagggagacgucuucgugauccgcgagccuuuuaucucuugcucccaccuggaauguagaacguucuuucucacccaaggcgcccugcuuaacgauaaacauagcaauggcacaguuaaggaccggucuccguaucgcgcccugauguccugcccccucggggaggcuccuagccccuacaacuccagauucgaaucuguggccuggagcgcuuccgccugucacgauggaaugggcuggcugaccauugggaucagcggaccugacaacggcgcggucgccgugcugaaguauaaugggauuaucacagagaccauuaaaucuuggaagaaacggauccuccgcacgcaggaguccgaaugcguuuguaugaacggaagcugcuuuacaaucaugaccgauggccccucuaauggcgcugccagcuacaagauuuucaaaaucgagaaggggaaggugacaaaaaccauugaacugaacgcuccuaauuuucauuaugaggaguguuccugcuacccggacaccggaacagucaugugugugugcagagauaacuggcacggcucuaaucggcccugggugagcuucaaccagaaucuugacuaccagacgggguauaucugcuccggagucuuuggcgauaacccucgccccaaggacggggaaggaagcuguaauccuaugaccguugauggcgccgacggcgugaaaggguucucuuacaaguauggaaacggcguguggauugggagaacaaaauccaaucggcugcgcaagggauuugagaugaucugggaccccaacggcuggaccaauacagauagcgacuucucugucaaacaagaugugguugcgauuaccgacugguccggguacagcggcuccuuugugcagcacccggaacucacgggacuggauugcaucagaccuuguuucugggucgagcuugugcggggccugccccgcgaaaacacaaccaucuggaccucugggagcuccauuucuuucugcggaguuaacagcggcacagccaauugguccuggccugacggggcugagcuccccuuuaccaucgauaaguga

SEQ ID NO: 213530 - RNA, 1413 nt, Artificial Sequence; identical to SEQ ID NO: 207941
  derived and/or modified CDS sequence (opt5) from neuraminidase__InfluenzaA__AEX33927

SEQ ID NO: 213531 - RNA, 1413 nt, Artificial Sequence
  derived and/or modified CDS sequence (opt5) from neuraminidase__InfluenzaA__AEX33938
augaaccccaaucagaagaucauuaccaucggcagcauuuccaucgccauugggaucaucucucugauucuccaaaucggaaacauuaucagcauuugggcuucccacucuauccagacaggcagccagaaucauacggggauuugcaaccagagaaucaucaccuacgaaaauuccacaugggugaacaauaccuaugucaacauuaauaacacaaauguugugguggagaaagacaagaccucugucacacuggccggaaacagcucccuuuguagcaucucuggcugggcgauuuacaccaaagauaauuccauccggauugggagcaagggagacguguucguuauccgcgagccuuuuaucucuugcucccaccuggaauguagaacguucuuucucacccaaggcgcucugcuuaacgauaaacauagcaauggcacagugaaggaccggucuccguaucgcgcccugauguccugcccccucggggaggccccuagccccuacaacuccagauucgaaucugucgcuuggagcgccuccgcuugucacgauggaaugggcuggcugaccauugggaucagcggaccugacaacggcgccguggcgguucugaaguauaaugggauuaucacagagaccauuaaaucuuggaagaaacggauccuccgcacgcaggaguccgaaugcguguguaugaacggaagcugcuuuacaaucaugaccgauggccccucuaauggcgccgcuagcuacaagauuuucaaaaucgagaaggggaaggucacaaaaaccauugaacugaacgccccuaauuuucauuaugaggaguguuccugcuacccggacaccggaacagugaugugugugugcagagauaacuggcacggcucuaaucggcccugggucagcuucaaccagaaucuugacuaccagaucggguauauuugcuccggaguuuuuggcgauaacccucgccccaaggacggggaaggaagcuguaauccugugacgguggauggcgcugacggcgucaaaggguucucuuacaaguauggaaacggcguguggaucgggagaaccaaauccaaucggcugcgcaagggauuugagaugauuugggaccccaacggcuggacaaauaccgauagcgacuucucuguuaaacaagauguggucgccaucacagacugguccggguacagcggcuccuuugugcagcacccggaacucaccggacuggauugcaucagaccuuguuucuggguugagcuugugcggggccugccccgcgaaaacacgacaauuuggaccucugggagcuccaucucuuucugcggagucaacagcggcaccacaaauugguccuggccugacggggcggagcuccccuuuaccauugauaaguga

SEQ ID NO: 213532 - RNA, 1413 nt, Artificial Sequence
  derived and/or modified CDS sequence (opt5) from neuraminidase__InfluenzaA__AEX33949
augaaccccaaucagaagaucauuaccaucggcagcauuuccaucgccauugggaucaucucucugauucuccaaaucggaaacauuaucagcauuugggcuucccacucuauccagacaggcagccagaaucauacggggauuugcaaccagagaaucaucaccuacgaaaauuccacaugggugaacaauaccuaugucaacauuaauaacacaaauguugugguggagaaagacaagaccucugucacacuggccggaaacagcucccuuuguagcaucucuggcugggcgauuuacaccaaagauaauuccauccggauugggagcaagggagacguguucguuauccgcgagccuuuuaucucuugcucccaccuggaauguagaacguucuuucucacccaaggcgcucugcuuaacgauaaacauagcaauggcacagugaaggaccggucuccguaucgcgcccugauguccugcccccucggggaggccccuagccccuacaacuccagauucgaaucugucgcuuggagcgccuccgcuugucacgauggaaugggcuggcugaccauugggaucagcggaccugacaacggcgccguggcgguucugaaguauaaugggauuaucacagagaccgugaaaucuuggaagaaacggauucuccgcacgcaggaguccgaaugcgucuguaugaacggaagcugcuuuacaaucaugaccgauggccccucuaauggcgccgcuagcuacaagaucuucaaaauugagaaggggaaggugacaaaaaccaucgaacugaacgccccuaauuuucauuaugaggaguguuccugcuacccggacaccggaacagugaugugugucugcagagauaacuggcacggcucuaaucggcccuggguuagcuucaaccagaaucuugacuaccagauuggguauaucugcuccggaguguuuggcgauaacccucgccccaaggacggggaaggaagcuguaauccugugacggucgauggcgcugacggcgugaaaggguucucuuacaaguauggaaacggcguuuggauugggagaaccaaauccaaucggcugcgcaagggauuugagaugaucugggaccccaacggcuggacaaauaccgauagcgacuucucugugaaacaagaugucguggccauuacagacugguccggguacagcggcuccuuuguucagcacccggaacucaccggacuggauugcaucagaccuuguuucuggguggagcuuguccggggccugccccgcgaaaacacgacaaucuggaccucugggagcuccauuucuuucugcggagugaacagcggcaccgcgaauugguccuggccugacggggccgagcuccccuuuacaaucgauaaguga

SEQ ID NO: 213533 - RNA, 1410 nt, Artificial Sequence
  derived and/or modified CDS sequence (opt5) from neuraminidase__InfluenzaA__AEX33971
augaaccccaaucagaagaucauuaccaucggcagcgugucccugacaauuucuacgaucugcuucuuuaugcaaauugccauccucaucaccacagucacccugcacuucaaacaguacgaguuuagcuccccuccgaacaaucagguuaugcuuugugaacccgcuauuaucgagagaaacauuacagaaaccguguaucugacaaauaccacgaccgagaaggaaaucugcccuaaacucgccgaguaccggaacuggucuaagccccagugugacauuacaggguucgcgccuuuuagcaaagauaauuccauccgccugucugcuggaggcgacauuugggugaccagagagcccuaugucagcugcgauccugacaaguguuaccaauucgcccuugggcagggaacaacccugaacaaugugcauuccaacgauacgguucacgaccggacaccguaucgcacccuccugaugaaugaacugggcgugcccuuucaucucgggacaaagcaggucugcaucgccuggucuagcuccagcugucacgauggaaaggcuuggcugcaugugugcguuaccggcgacgauaaaaacgccaccgcuucuuucaucuacaauggcagacuuguggacuccauugucagcuggucuaaagagauccugcggacacaggaauccgagugugugugcauuaacgggacguguaccguggucaugacagauggaagcgccuccggcaaggcggacaccaaaauccucuuuauugaggaagggaagaucguucacacaucuacccugagcggauccgcccaacacguggaggaaugcagcugcuauccucgcuaccccggcgugagaugugucugccgggauaauuggaaggggucuaaccgcccuaucguggacauuaacaucaaagacuacuccauuguuagcagauauguguguucuggaaucgucggcgauacgccccggaagaaugacagcuccucuagcucccauugccuugauccgaacaaugaggaaggcgggcacggagugaaaggcugggcuuucgacgaugggaacgacguuuggaugggacgcacaauuagcgagaagucuagauccggcuacgagaccuuuaaagugaucgaaggguggagcaauccuaacucuaagcugcagaucaaucggcaggucauuguggaucgcggaaacagauccggcuauagcggcaucuucuccgucgaggggaaaucuuguauuaaucggugcuuuuacguggaacucaucagaggacgcaaggaggaaaccgagguucuguggacaagcaacuccauuguggucuucuguggcaccucugggacauauggaacgggcagcuggcccgacggggccgauaucaaucugaugccuauuuga

SEQ ID NO: 213534 - RNA, 1410 nt, Artificial Sequence
  derived and/or modified CDS sequence (opt5) from neuraminidase__InfluenzaA__AEX33993
augaaccccaaucagaagaucauuaccaucggcagcgugucccugacaauuucuacgaucugcuucuuuaugcaaauugccauccucaucaccacagucacccugcacuucaaacaguacgaguuuaacagcccuccgaauaaccagguuaugcuuugugaacccacaauuaucgagagaaauauuaccgaaaucguguaucugacaaacaccacgauugagaaggaaaucugcccuaaacucgcugaguaccggaauugguccaagccccagugugacauuaccggguucgccccuuuuucuaaagauaacagcauccgccuguccgcgggaggcgacaucugggugacaagagagcccuaugucucuugcgauccugacaaguguuaccaauucgcucuugggcagggaaccacacugaauaacgugcauagcaaugauaccguucgggaccgcacgccguauagaacacuccugaugaacgaacugggcgugcccuuucaccucgggaccaagcaggucugcauugccugguccucuagcuccugucaugauggaaaagccuggcugcacgugugcaucacaggcgacgauaagaaugcuaccgccagcuucauuuacaacggccggcuuguugacucuaucguguccuggagcaaagagauucugcgcacccaggaaucugagugugucugcaucaaugggacauguacgguggugaugaccgauggauccgcuagcggcgaggccgacacaaagauccucuuuauugaagaggggaaaaucguccauaccuccacacugucuggaagcgcgcaacacguugaagagugcuccugcuauccuagauaccccggcgugcggugugugugccgcgauaacuggaaggggagcaacagaccuauugucgacaucaauauuaaggaccacucuaucguguccagcuacguuuguucuggacuugugggcgauacgccccggaaaaacgacagcuccucuagcucccauugccuggauccgaauaacgaagagggcgggcacggagucaagggcugggccuucgacgaugggaaugacguguggaugggacgcaccaucagcgagaaaucuagacucggcuaugaaacauuuaagguuauugaggggugguccaacccuaaaagcaagcugcagaucaaucgccaggugauugucgaucggggaaacagaucuggcuacuccggcaucuucagcguggaagggaaauccuguauuaaucggugcuuuuaugucgagcugaucagaggacgcaaggaagagaccgaggugcucuggaccucuaacagcauuguuguguucuguggcacauccgggaccuacggaacaggcucuuggcccgacggggcugauaucaaucugaugccugucuga

SEQ ID NO: 213535 - RNA, 1410 nt, Artificial Sequence; identical to SEQ ID NO: 208584
  derived and/or modified CDS sequence (opt5) from neuraminidase__InfluenzaA__AEX34026

SEQ ID NO: 213536 - RNA, 1410 nt, Artificial Sequence
  derived and/or modified CDS sequence (opt5) from neuraminidase__InfluenzaA__AEX34036
augaaccccaaucagaagaucauuaccaucggcagcgugucccugacaauuucuacgaucugcuucuuuaugcaaauugccauccucaucaccacagucacccugcacuucaaacaguacgaguuuagcuccccuccgaacaaucagguuaugcuuugugaacccacaauuaucgagagaaacauuaccgaaaucguguaucugacaaauaccacgauugagaaggaaaucugcccuaaacucgcugaguaccggaacuggucuaagccccagugugacauuaccggguucgccccuuuuagcaaagauaauuccauccgccugucugcgggaggcgacaucugggugacaagagagcccuaugucagcugcgauccugacaaguguuaccaauucgcucuugggcagggaaccacacugaacaaugugcauuccaacgauaccguucacggccggacgccguaucgcacacuccugaugaaugaacugggggugcccuuucaucucggaaccaagcaggucugcauugccuggucuagcuccagcugucacgacggcaaagccuggcugcaugugugcguuacaggcgaugacaagaacgcuaccgccucuuucaucuacaaugggagacuuguggauuccauugucagcuggucuaaagagauccugcggacccaggaauccgagugugugugcauuaacggaacaugugcuguggucaugacggacggcagcgccuccgggaaggcggauaccaaaauccucuuuaucgaggaaggaaagauuguucacacaucuacccugagcggcuccgcccaacacguggaggaaugcagcugcuauccucgcuaccccggggugagaugugucugccgggacaauuggaagggaucuaaccgcccuaucguggauauuaacaucaaagacuacuccauuguuagcagauauguguguucuggccuugucggcgacacaccccggaagaaugauagcuccucuagcucccauugccuggacccgaacaaugaggaagggggacacggcgugaaagggugggcuuucgaugacggagaugacguuuggaugggccgcaccaucagcgagaagucuagauccggguacgagacguuuaaagugaucgaaggauggagcaacccuaauucuaagcuccagauuaaccggcaggucaucguggaucgcggcaauagauccggcuauagcgggauuuucuccgucgagggaaaaucuuguaucaaccggugcuuuuacguggaacugauuagaggccgcaaggaggaaacagagguucuguggaccagcaauuccaucguggucuucugugggaccucuggaacauauggcaccgggagcuggcccgacggcgccgauauuaaccucaugccuaucuga

SEQ ID NO: 213537 - RNA, 1410 nt, Artificial Sequence
  derived and/or modified CDS sequence (opt5) from neuraminidase__InfluenzaA__AEX34058
augaaccccaaucagaagaucauuaccaucggcagcgugucccugacaauuucuacgaucugcuucuuuaugcaaauugccauccucaucaccacagucacccugcacuucaaacaguacgaguuuagcuccccuccgaacaaucagguuaugcuuugugaacccgcuauuaucgagagaaacauuacagaaaucguguaucugaccaauacaaccauugagaaggaaaucugcccuaaacucacggaguaccggaacuggucuaagccccagugugacauuaccggguucgccccuuuuagcaaagauaauuccauccgccugucugcgggaggcgacaucugggugacaagagagcccuaugucagcugcgauccugacaaguguuaccaauucgcucuugggcagggaaccacacugaacaaugugcauuccaacgauaccguucacgaccggacgccguaucgcacacuccugaugaaugaacugggcgugcccuuucaucucgggaccaagcaggucugcauugccuggucuagcuccagcugucacgauggaaaagccuggcugcaugugugcguuacaggcgacgauaagaacgcuaccgccucuuucaucuacaauggcagacuuguggacuccauugucagcuggucuaaagagauccugcggacccaggaauccgagugugugugcauuaacgggacauguacgguggucaugaccgauggaagcgcuuccggcaaggccgacacaaaaauccucuuuaucgaggaagggaagauuguucacaccucuacacugagcggauccgcgcaacacguggaggaaugcagcugcuauccucgcuaccccggcgugagaugugucugccgggauaauuggaaggggucuaaccgcccuaucguggacauuaacaucaaagacuacuccauuguuagcagauauguguguucuggacuugucggcgauacgccccggaagaaugacagcuccucuagcucccauugccuggauccgaacaaugaggaaggcgggcacggagugaaaggcugggccuucgacgaugggaacgacguuuggaugggacgcaccaucagcgagaagucuagauccggcuacgagacauuuaaagugaucgaaggguggagcaauccuaacucuaagcuccagauuaaucggcaggucaucguggaucgcggaaacagauccggcuauagcggcauuuucuccgucgaggggaaaucuuguaucaaucggugcuuuuacguggaacugauuagaggacgcaaggaggaaaccgagguucuguggaccagcaacuccaucguggucuucuguggcacaucugggaccuauggaacaggcagcuggcccgacggggcugauauuaaucucaugccuaucuga

SEQ ID NO: 213538 - RNA, 1410 nt, Artificial Sequence
  derived and/or modified CDS sequence (opt5) from neuraminidase__InfluenzaA__AEX34103
augaaccccaaucagaagaucauuaccaucggcagcgugucccugacaauuucuacgaucugcuucuuuaugcaaauugccauccucaucaccacagucacccugcacuucaaacaguacgaguuuagcuccccuccgaacaaucagguuaugcuuugugaacccacaauuaucgagagaaacauuaccgaaaucguguaucugacaaauaccacgauugagaaggaagugugcccuaaacucgcugaguaccggaacuggucuaagccccagugugacaucaccggguucgccccuuuuagcaaagauaauuccauucgccugucugcgggaggcgacaucugggucacaagagagcccuaugugagcugcgauccugacaaguguuaccaauucgcucuugggcagggaaccacacugaacaauguucauuccaacgauaccgugcacgaccggacgccguaucgcacacuccugaugaaugaacugggcguccccuuucaucucgggaccaaacaggugugcaucgccuggagcagcuccagcugucacgauggaaaggccuggcugcauguuugcgugacaggcgacgauaagaacgcuaccgccucuuucauuuacaauggcagacuugucgacuccaucgugagcuggucuaaagagauucugcggacccaggaauccgagugugugugcaucaacgggacauguacggucguuaugaccgauggaagcgcuuccggcaaggccgacacaaaaauucucuuuaucgaggaagggaagaucgugcacaccucuacacugagcggaaaugcgcaacacguggaggaaugcuccugcuauccucgcuaccccggcgucagaugugugugccgggauaacuggaaggggagcaaccgcccuauuguugacaucaauauuaaagacuacucuaucguguccagauaugucuguagcggacuugugggcgauacgccccggaagaacgacucuagcuccucuagccauugccuggauccgaauaacgaggaaggcgggcacggaguuaaaggcugggccuucgacgaugggaaugacguguggaugggacgcaccauuuccgagaagucuagaucuggcuacgagacauuuaaagucaucgaagggugguccaacccuaauagcaagcuccagaucaaccgccaggugauugucgaucggggaaauagaucuggcuauuccggcaucuucagcguggaggggaaauccuguauuaaccggugcuuuuacguugaacugaucagaggacgcaaggaggaaaccaaggugcuguggaccucuaauagcauugucguguucuguggcacauccgggaccuauggaacaggcucuuggcccgacggggcugauaucaaccucaugccuauuuga

SEQ ID NO: 213539 - RNA, 1410 nt, Artificial Sequence
  derived and/or modified CDS sequence (opt5) from neuraminidase__InfluenzaA__AEX34114
augaaccccaaucagaagaucauuaccaucggcagcgugucccugacaauuucuacgaucugcuucuuuaugcaaauugccauccucaucaccacagucacccugcacuucaaacaguacgaguuuagcuccccuccgaacaaucagguuaugcuuugugaacccgcuauuaucgagagaaacauuacagaaaucguguauccuaccaauacaaccauugagaaggaaaucugccccaaacuggccgaguaccggaacuggucuaagccucagugugacauuacgggguucgcgcccuuuagcaaagauaauuccauccgccucucugcuggaggcgacaucugggugaccagagagccuuaugucagcugcgauccggacaaguguuaccaauucgcccuggggcagggaacaacccuuaacaaugugcauuccaacgauacaguucacgaccggacccccuaucgcacgcugcucaugaaugaacugggcgugccuuuucaucuggggacaaagcaggucugcauugccuggucuagcuccagcugucacgauggaaaggcuuggcuccaugugugcguuaccggcgacgauaaaaacgccacagcuucuuucaucuacaauggcagacugguggacuccauugucagcuggucuaaagagauccuucggacccaggaauccgagugugugugcauuaacgggaccuguacaguggucaugacggauggaagcgccuccggcaaggcggacaccaaaauccuguuuaucgaggaagggaagauuguucacacaucuacccucagcggauccgcccaacacguggaggaaugcagcugcuauccccgcuacccuggcgugagaugugucugccgggauaauuggaaggggucuaaccgccccaucguggacauuaacaucaaagacuacuccauuguuagcagauauguguguucuggacuggucggcgauacaccgcggaagaaugacagcuccucuagcucccauugccuugauccuaacaaugaggaaggcgggcacggagugaaaggcugggcuuucgacgaugggaacgacguuuggaugggacgcaccaucagcgagaagucuagauccggcuacgagacguuuaaagugaucgaaggguggagcaaucccaacucuaagcugcagauuaaucggcaggucaucguggaucgcggaaacagauccggcuauagcggcauuuucuccgucgaggggaaaucuuguaucaaucggugcuuuuacguggaacucauuagaggacgcaaggaggaaacagagguucuguggaccagcaacuccaucguggucuucuguggcaccucugggacauauggaaccggcagcuggccugacggggccgauauuaaucugaugcccaucuga

SEQ ID NO: 213540 - RNA, 1410 nt, Artificial Sequence
  derived and/or modified CDS sequence (opt5) from neuraminidase__InfluenzaA__AEX34137
augaaccccaaucagaagaucauuaccaucggcagcgugucccugacaauuucuacgaucugcuucuuuaugcaaauugccauccucaucaccacagucacccugcacuucaaacaguacgaguuuaacagcccuccgaauaaccagguuaugcuuugugaacccacaauuaucgagagaaauauuaccgaaaucguguaucugacaaacaccacgauugagaaggaaaucugcccuaaacucgcugaguaccggaauugguccaagccccagugugacauuaccggguucgccccuuuuucuaaagauaacagcauccgccuguccgcgggaggcgacaucugggugacaagagagcccuaugucucuugcgauccugacaaguguuaccaauucgcucuugggcagggaaccacacugaauaacgugcauagcaaugauaccguucggggccgcacgccguauagaacacuccugaugaacgaacugggggugcccuuucaccucggaaccaagcaggucugcauugccugguccucuagcuccugucaugacggcaaagccuggcugcacgugugcaucacaggcgaugacaagaaugcuaccgccagcuucauuuacaacgggcggcuuguugauucuaucguguccuggagcaaagagauucugcgcacccaggaaucugagugugucugcaucaauggaacauguacgguggugaugaccgacggcuccgcuagcgggaaggccgauacaaaaauccucuuuauugaggaaggaaagaucguccauaccuccacacugucuggcagcgcgcaacacguugaggaaugcuccugcuauccuagauaccccggggugcggugugugugccgcgacaacuggaagggaagcaacagaccuauugucgauaucaauauuaaagaccacucuaucguguccagcuacguuuguucuggccuugugggcgacacgccccggaagaacgauagcuccucuagcucccauugccuggacccgaauaacgaggaagggggacacggcgucaaagggugggccuucgaugacggaaaugauguguggaugggccgcaccaucagcgagaagucuagacucggguaugagacauuuaaaguuauugaaggaugguccaacccuaagagcaaacugcagaucaaucgccaggugauugucgaccggggcaacagaucuggcuacuccgggaucuucagcguggagggaaaguccuguauuaaucggugcuuuuaugucgaacugaucagaggccgcaaggaggaaaccgaggugcucuggaccucuaacagcauuguuguguucugugggacauccggaaccuacggcacagggucuuggcccgauggcgcugacaucaaucugaugccuaucuga

SEQ ID NO: 213541 - RNA, 1410 nt, Artificial Sequence
  derived and/or modified CDS sequence (opt5) from neuraminidase__InfluenzaA__AEX34191
augaaccccaaucagaagaucauuaccaucggcagcgugucccugucuauuagcacaaucugcuucuuuaugcaaauugccauccucaucacgaccgucacacugcacuucaaacaguacgaguuuaacuccucuccuaauaaccagguuaugcuuugugaaccgaccauuaucgagagaaauauuacagaaaucguguaucugaccaacacaaccauugagaaggaaaucugccccaaacucgcugaguaccggaauuggagcaagccucagugugacauuacgggguucgcccccuuuuccaaagauaacucuauccgccugagcgcgggaggcgacaucugggugaccagagagccuuaugucuccugcgaucccgacaaguguuaccaauucgcucuugggcagggaacaacccugaauaacgugcauagcaauaacacaguucgggaucgcaccccuuauagaacgcuccugaugaaugaacugggcgugccguuucaccucgggacaaagcaggucugcauugccuggucuuccagcucuugucaugacggaaaagccuggcugcacgugugcaucaccggcgaugacaagaacgcuacagccuccuucauuuacaauggccggcuuguugauagcaucgugucuugguccaaagagauucugcgcacccaggaaagcgagugugucugcaucaacgggaccuguacaguggugaugacggacggauccgcuucuggcaaggccgauaccaaaauccucuuuauugaggaagggaagaucguccauacaagcacccuguccggaagcgcgcaacacguugaggaaugcucuugcuaucccagauacccuggcgugcggugugugugccgcgacaacuggaagggguccaauagacccauugucgauaucaacauuaaagaccacagcaucgugucuagcuacguuuguuccggacuugugggcgacacaccucggaagaaugauucuagcuccagcucucauugccuggaccccaacaaugaggaaggcgggcacggagucaaaggcugggccuucgaugacgggaacgauguguggaugggacgcaccaucuccgaaaagagcagacucggcuaugagacguuuaaaguuauugagggguggucuaauccgaaguccaaacugcagaucaaccgccaggugauugucgaccggggaaauagaagcggcuacuccggcaucuucucuguggagggaaagagcuguauuaaccggugcuuuuaugucgaacugaucagagggcgcaaggaggaaacagaggugcucuggaccuccaauucuauuguuguguucuguggcaccagcgggacauacggaaccggcuccuggccugauggggcugacaucaaccugaugcccaucuga

SEQ ID NO: 213542 - RNA, 1410 nt, Artificial Sequence
  derived and/or modified CDS sequence (opt5) from neuraminidase__InfluenzaA__AEX34224
augaaccccaaucagaagaucauuaccaucggcagcgugucccugacaauuucuacgaucugcuucuuuaugcaaauugccauccucaucaccacagucacccugcacuucaaacaguacgaguuuagcuccccuccgaacaaucagguuaugcuuugugaacccacaauuaucgagagaaacauuaccgaaaucguguaucugacaaauaccacgauugagaaggaaaucugcccuaaacucgcugaguaccggaacuggucuaagccccagugugacauuaccggguucgccccuuuuagcaaagauaauuccauccgccugucugcgggaggcgacaucugggugacaagagagcccuaugucagcugcgauccugacaaguguuaccaauucgcucuugggcagggaaccacacugaacaaugugcauuccaacgauaccguucacggccggacgccguaucgcacacuccugaugaaugaacugggggugcccuuucaucucggaaccaagcaggucugcauugccuggucuagcuccagcugucacgacggcaaagccuggcugcaugugugcguuacaggcgaugacaagaacgcuaccgccucuuucaucuacaaugggagacuuguggauuccauugucagcuggucuaaagagauccugcggacccaggaauccgagugugugugcauuaacggaacauguacgguggucaugaccgacggcagcgcuuccgggaaggccgauacaaaaauccucuuuaucgaggaaggaaagauuguucacaccucuacacugagcggcuccgcgcaacacguggaggaaugcagcugcuauccucgcuaccccggggugagaugugucugccgggacaauuggaagggaucuaaccgcccuaucguggauauuaacaucaaagacuacuccauuguuagcagauauguguguucuggccuugucggcgacacgccccggaagaaugauagcuccucuagcucccauugccuggacccgaacaaugaggaagggggacacggcgugaaagggugggccuucgaugacggaaacgauguuuggaugggccgcaccaucagcgagaagcucagaucuggguacgagacauuuaaagugaucgaaggaugguccaauccuaacagcaagcugcagauuaaucggcaggucaucguggaccgcggcaacagaucuggcuauuccgggauuuucagcgucgagggaaaauccuguaucaaucggugcuuuuacguggaacugauuagaggccgcaaggaggaaaccgagguucucuggaccucuaacagcaucguggucuucugugggacauccggaaccuauggcacagggucuuggcccgauggcgcugacauuaaucugaugccuaucuga

SEQ ID NO: 213543 - RNA, 1410 nt, Artificial Sequence
  derived and/or modified CDS sequence (opt5) from neuraminidase__InfluenzaA__AEX34235
augaaccccaaucagaagaucauuaccaucggcagcgugucccugacaauuucuacgaucugcuucuuuaugcaaauugccauccucaucaccacagucacccugcacuucaaacaguacgaguuuagcuccccuccgaacaaucagguuaugcuuugugaacccgcuauuaucgagagaaacauuacagaaaucguguaucugaccaauacaaccauugagaaggaaaucugcccuaaacucgccgaguaccggaacuggucuaagccccagugugacauuacgggguucgcgccuuuuagcaaagauaauuccauccgccugucugcuggaggcgacaucugggugaccagagagcccuaugucagcugcgauccugacaaguguuaccaauucgcccuugggcagggaacaacccugaacaaugugcauuccaacgauacaguucacgaccggaccccguaucgcacgcuccugaugaaugaacugggcgugcccuuucaucucgggacaaagcaggucugcauugccuggucuagcuccagcugucacgauggaaaggcuuggcugcaugugugcguuaccggcgacgauaagaacgccacagcuucuuucaucuacaauggcagacuuguggacuccauugucagcuggucuaaagagauccugcggacccaggaauccgagugugugugcauuaacgggaccuguacaguggucaugacggauggaagcgccuccggcaaggcggacaccaaaauccucuuuaucgaggaagggaagauuguucacacaucuacccugagcggauccgcccaacacguggaggaaugcagcugcuauccucgcuaccccggcgugagaugugucugccgggauaauuggaaggggucuaaccgcccuaucguggacauuaacaucaaagacuacuccauuguuagcagauauguguguucuggacuugucggcgauacaccccggaaaagcgacuccucuagcuccagccauugccuggauccgaauaacgaggaaggcgggcacggagugaaaggcugggcuuucgacgaugggaaugacguuuggaugggacgcaccaucucugagaaguccagaagcggcuacgagacguuuaaagugaucgaaggguggucuaacccuaauuccaagcuccagauuaaccggcaggucaucguggaucgcggaaauagaagcggcuauuccggcauuuucucugucgaggggaaaagcuguaucaaccggugcuuuuacguggaacugauuagaggacgcaaggaggaaacagagguucuguggaccuccaauucuaucguggucuucuguggcaccagcgggacauauggaaccggcuccuggcccgacggggccgauauuaaccucaugccuaucuga

SEQ ID NO: 213544 - RNA, 1410 nt, Artificial Sequence
  derived and/or modified CDS sequence (opt5) from neuraminidase__InfluenzaA__AEX34246
augaaccccaaucagaagaucauuaccaucggcagcgugucccugacaauuucuacgaucugcuucuuuaugcaaauugccauccucaucaccacagucacccugcacuucaaacaguacgaguuuaacagcccuccgaauaaccagguuaugcuuugugaacccacaauuaucgagagaaauauuaccgaaaucguguaucugacaaacaccacgauugagaaggaaaucugcccuaaacucgcugaguaccggaauugguccaagccccagugugacauuaccggguucgccccuuuuucuaaagauaacagcauccgccuguccgcgggaggcgacaucugggugacaagagagcccuaugucucuugcgauccugacaaguguuaccaauucgcucuugggcagggaaccacacugaauaacgugcauagcaaugauaccguucggggccgcacgccguauagaacacuccugaugaacgaacugggggugcccuuucaccucggaaccaagcaggucugcauugccugguccucuagcuccugucaugacggcaaagccuggcugcacgugugcaucacaggcgaugacaagaaugcuaccgccagcuucauuuacaacgggcggcuuguugauucuaucguguccuggagcaaagagauucugcgcacccaggaaucugagugugucugcaucaauggaacauguacgguggugaugaccgacggcuccgcuagcgggaaggccgauacaaaaauccucuuuauugaggaaggaaagaucguccauaccuccacacugucuggcagcgcgcaacacguugaggaaugcuccugcuauccuagauaccccggggugcggugugugugccgcgacaacuggaagggaagcaacagaccuauugucgauaucaauauuaaagaccacucuaucguguccagcuacguuuguucuggccuugugggcgacacgccccggaagaacgauagcuccucuagcucccauugccuggacccgaauaacgaggaagggggacacggcgucaaagggugggccuucgaugacggaaaugauguguggaugggccgcaccaucagcgagaagucuagacucggguaugagacauuuaaaguuauugaaggaugguccaacccuaagagcaaacuccaggugaaucggcaggucaucguggaccgcggcaacagaucuggcuacuccgggauuuucagcgucgagggaaaguccuguaucaaucggugcuuuuauguggaacugauuagaggccgcaaggaggaaaccgagguucuguggaccucuaacagcaucguggucuucugugggacauccggaaccuacggcacagggucuuggcccgauggcgcugacauuaaucugaugccuaucuga

SEQ ID NO: 213545 - RNA, 1410 nt, Artificial Sequence
  derived and/or modified CDS sequence (opt5) from neuraminidase__InfluenzaA__AEX34257
augaaccccaaucagaagaucauuaccaucggcagcgugucccugacaauuucuacgaucugcuucuuuaugcaaauugccauccucaucaccacagucacccugcacuucaaacaguacgaguuuaacagcuccccuaauaaccagguuaugcuuugugaaccgacaauuaucgagagaaauauuaccgaaaucguguaucugacaaacaccacgauugagaaggaaaucugccccaaacucgcugaguaccggaauuggucuaagccucagugugacauuaccggguucgcccccuuuagcaaagauaacuccauccgccugucugcgggaggcgacaucugggugacaagagagccuuaugucagcugcgaucccgacaaguguuaccaauucgcucuugggcagggaaccacacugaauaacgugcauuccaauaacaccguucggaaucgcacgccuuauagaacacuccugaugaacgaacugggcgugccguuucaccucgggaccaagcaggucugcauugccuggucuagcuccagcugucaugauggaaaagccuggcugcacgugugcaucacaggcgacgauaagaaugcuaccgccucuuucauuuacaacggccggcuuguugacuccaucgugagcuggucuaaagagauucugcgcacccaggaauccgagugugucugcaucaacgggacauguacgguggugaugaccgauggaagcgcuuccggcaaggccgacacaaaaauccucuuuauugaggaagggaagaucguccauaccucuacacugagcggauccgcgcaacacguugaggaaugcagcugcuaucccagauacccuggcgugcggugugugugccgcgauaauuggaaggggucuaacagacccauugucgacaucaauauuaaagaucacuccaucgugagcucuuacguuuguagcggacuugugggcgacaccccucggaagaacgacuccucuagcuccagccauugccuggaucccaauaacgaggaaggcgggcacggagucaaaggcugggccuucgacgaugggaaugacguguggaugggacgcacgaucucugagaaguccagacucggcuaugagacauuuaaaguuauugaaggguggagcaacccgaagucuaaacugcagaucaaucgccaggugauugucgaucggggaaacagauccggcuacagcggcaucuucuccguggaggggaagucuuguauuaaucggugcuuuuaugucgaacugaucagaggacgcaaggaggaaaccgaggugcucuggaccagcaacuccauuguuguguucuguggcacaucugggaccuacggaacaggcagcuggccugacggggcugauaucaaucugaugcccaucuga

SEQ ID NO: 213546 - RNA, 1410 nt, Artificial Sequence
  derived and/or modified CDS sequence (opt5) from neuraminidase__InfluenzaA__AEX34268
augaaccccaauaagaaaaucauuaccaucggcagcgugucccugacaauuucuacgaucugcuucuuuaugcagauugccauccucaucaccacagucacccugcacuucaagcaauacgaguuuaacagcccuccgaauaaccagguuaugcuuugugaacccacaauuaucgagagaaauauuaccgaaaucguguaucugacaaacaccacgauugagaaagaaaucugcccuaagcucgcugaguaccggaauugguccaaaccccagugugacauuaccggguucgccccuuuuucuaaggauaacagcauccgccuguccgcgggaggcgacaucugggugacaagagagcccuaugucucuugcgauccugacaaguguuaccaguucgcucuugggcaaggaaccacacugaauaacgugcauagcaaugauaccguucggaaccgcacgccguauagaacacuccugaugaaugaacugggcgugcccuuucaccucgggaccaaacaggucugcauugccugguccucuagcuccugucaugacggaaaggccuggcugcacgugugcaucacaggcgaugacaaaaacgcuaccgccagcuucauuuacaauggccggcuuguugauucuaucguguccuggagcaaggagauucugcgcacccaggaaucugagugugucugcaucaacgggacauguacgguggugaugaccgacggauccgcuagcggcaaagccgauacaaagauccucuuuauugaggaagggaagaucguccauaccuccaaacugucuggaagcgcgcagcacguugaggaaugcuccugcuauccuagauaccccggcgugcggugugugugccgcgacaacuggaaggggagcaauagaccuauugucgauaucaacauuaaagaccacucuaucguguccagcuacguuuguucuggacuugugggcgacacaccccggaagaaugauagcuccucuagcucccauugccuggacccgaacaaugaggaaggcgggcacggagucaaaggcugggccuucgaugacgggaacgauguguggaugggacgcaccaucagcgagaagucuagacucggcuaugagacguuuaaaguuauugaagggugguccaauccuaagagcaagcugcaaaucaaccgccaggugauugucgaccggggaaauagaucuggcuacuccggcaucuucagcguggaggggaaauccuguauuaaccggugcuuuuaugucgaacugaucagaggacgcaaggaggaaacagaggugcucuggaccucuaauagcauuguuguguucuguggcaccuccgggacauacggaaccggcucuuggcccgauggggcugacaucaaccugaugccuaucuga

SEQ ID NO: 213547 - RNA, 1410 nt, Artificial Sequence
  derived and/or modified CDS sequence (opt5) from neuraminidase__InfluenzaA__AEX34278
augaaccccaaucagaagaucauuaccaucggcagcgugucccugacaauuucuacgaucugcuucuuuaugcaaauugccauccucaucaccacagucacccugcacuucaaacaguacgaguuuagcuccccuccgaacaaucagguuaugcuuugugaacccgcuauuaucgagagaaacauuacagaaaucguguaucugaccaauacaaccauugagaaggaaaucugcccuaaacucgccgaguaccggaacuggucuaagccccagugugacauuacgggguucgcgccuuuuagcaaagauaauuccauccgccugucugcuggaggcgacaucugggugaccagagagcccuaugucagcugcgauccugacaaguguuaccaauucgcccuugggcagggaacaacccugaacaaugugcauuccaacgauacaguucacgaccggaccccguaucgcacgcuccugaugaaugaacugggcgugcccuuucaucucgggacaaagcaggucugcauugccuggucuagcuccagcugucacgauggaaaggcuuggcugcaugugugcguuaccggcgacgauaaaaacgccacagcuucuuucaucuacaauggcagacuuguggacuccauugucagcuggucuaaagagauccugcggacccaggaauccgagugugugugcauuaacgggaccuguacaguggucaugacggauggaagcgccuccggcaaggcggacaccaaaauccucuuuaucgaggaagggaagauuguucacacaucuacccugagcggauccgcccaacacguggaggaaugcagcugcuauccucgcuaccccggcgugagaugugucugccgggauaauuggaaggggucuaaccgcccuaucguggacauuaacaucaaagacuacuccauuguuagcagauauguguguucuggacuugucggcgauacaccccggaagaaugacagcuccucuagcucccauugccuggauccgaacaaugagaaaggcgggcacggagugaagggcugggcuuucgacgaugggaacgacguuuggaugggacgcaccaucagcgaaaaaucuagauccggcuacgagacguuuaaggugaucgagggguggagcaauccuaacucuaaacuccagauuaaucggcaggucaucguggaucgcggaaacagauccggcuauagcggcauuuucuccgucgaagggaagucuuguaucaaucggugcuuuuacguggagcugauuagaggacgcaaggaagagacagaaguucuguggaccagcaacuccaucguggucuucuguggcaccucugggacauauggaaccggcagcuggcccgacggggccgauauuaaucucaugccuaucuga

SEQ ID NO: 213548 - RNA, 1413 nt, Artificial Sequence
  derived and/or modified CDS sequence (opt5) from neuraminidase__InfluenzaA__AEX34310
augaaccccaaucagaagaucauuaccaucggcagcauuuccaucgccauugggaucaucucucugaugcuccaaauuggaaacaucauuagcaucugggcuucccacucuauucagacaggcacgcagaaucauaccgggaucugcaaccagagaauuaucacauacgagaauagcaccugggugaaccacacauaugucaauaucaacaauaccaacguuguggccggaaaagacaagacaccugugacccuggucggcaauuccucucuuuguagcauuuccgggugggcgaucuacacgaaagauaacagcauucggaucggaucuaagggcgacguguucguuauucgcgaaccguuuaucuccugcagccaucuggaguguaaaaccuucuuucucacacaaggcgcucugcuuaaugauaagcacucuaacgggaccgugaaggacagaucccccuaucgggcccugaugagcugcccucucggagaagcccccucuccuuacaauuccaaauucgagagcgucgcuugguccgccucugcuugucaugauggcaucggguggcugacaauuggaaucagcggccccgacaacggggccguggcgguucugaaguauaaaggaauuaucaccggcacgauuaaguccuggaaaaagcagauccuccgcacacaggaaagcgagugcguguguaugaacggcucuugcuuuaccaucaugacagaugggccuuccaauggagccgcuagcuacaagauuuucaaaaucgagaagggcaaagucaccaagucuauggaacugaacgccccgaauuuucacuaugaggaauguagcugcuaccccgacaccgggacagugaugugugugugcagagauaacuggcacggauccaaucggccuugggucucuuucaaccagaaucuugacuaccaaauuggcuauaucugcagcgggguuuuuggagauaacccccgcccuaaagacagagagggcuccuguaaucccgugacgguggauggcgcuaacggggucaagggauucagcuacaaauauggcaaugggguguggauuggacggaccaagucuaaccgcaucagaaagggcuuugagaugauuugggacccgaauggguggacaaacaccgacuccgauuucagcguuaaacaggacaucguggccaucacagauuggucuggcuacuccggcagcuuuguccagcauccugaacugaccggacucgacugcauucggcccuguuucuggguggagcugguucgcgggcuuccuggagaaaauacgacaaucuggaccuccggcucuagcauuuccuucugcggggugaacggagauaucgcgaacuggucuuggcccgacggcgccgagcugcccuuuaccauugauaaguga

SEQ ID NO: 213549 - RNA, 1413 nt, Artificial Sequence
  derived and/or modified CDS sequence (opt5) from neuraminidase__InfluenzaA__AEX34321
augaaccccaaucagaagaucauuaccaucggcagcauuuccaucgccauugggaucaucucucugaugcuccaaauuggaaacaucauuagcaucugggugucccacucuauucagacaggcagccagaauaacacggggaucugcaaucagagaauuaucaccuacgagaacuccacaugggucaaucauaccuauguuaacaucaauaacacaaaugugguggcuggagaagacaaaaccucugucacacuggccggcaacagcucccuuuguagcauuucugggugggcgaucuacaccaaggauaauuccauucggaucggaagcaaaggcgacguguucguuauucgcgagccuuuuaucucuugcucccaccuggaauguagaacguucuuucucacccaaggcgcucugcuuaacgauaagcauagcaaugggacagugaaagaccggucuccguaucgcgcccugauguccugcccccucggagaggccccuagccccuacaacuccaaguucgaaucugucgcuuggagcgccuccgcuugucacgauggcaugggguggcugaccaucggaauuagcggcccugacaacggggccguggcgguucugaaguauaauggaaucauuacaggcaccaucaaaucuuggaagaaacagauucucagaacgcaggaguccgagugcguguguaugaacggcagcugcuuuacaaucaugaccgaugggcccucuaauaaggccgcuagcuacaaaaucuucaagauugaaaagggaaaagucacaaaguccaucgagcugaacgccccuaauuuuuauuacgaagaguguucuugcuacccggacaccggcauugugaugugugugugccgggauaacuggcaugggagcaaucgccccugggucuccuucaaccagaaucuugacuaucaaaucggauacauuugcagcggcguuuuuggggauaacccuagacccgaggacggagaaggcucuuguaauccugugaccguggauggcgcuaacggggucaaaggauucuccuauaaguacggcaaugggguguggaucggacggacaaaaagcaaccgccugagaaagggcuuugagaugauuugggaccccaauggguggacgaacaccgacucugauuucuccguuaaacaggacguggucgccaucacagauuggagcggcuauuccggaucuuuugugcagcacccggaacucaccggccuggacugcauccggccuuguuucuggguugagcuugugcgcgggcugcccagagaaaacacaaccauuuggacgagcggauccucuaucagcuucugcggcgucaauuccgauacagcgaacuggagcuggccugacggggccgagcuccccuuuaccauugauaaguga

SEQ ID NO: 213550 - RNA, 1410 nt, Artificial Sequence; identical to SEQ ID NO: 208129
  derived and/or modified CDS sequence (opt5) from neuraminidase__InfluenzaA__AEX34356

SEQ ID NO: 213551 - RNA, 1410 nt, Artificial Sequence
  derived and/or modified CDS sequence (opt5) from neuraminidase__InfluenzaA__AEX34367
augaaccccaaucagaagaucauuaccaucggcagcgugucccugacaauuucuacgaucugcuucuuuaugcaaauugccauccucaucaccacagucacccugcacuucaaacaguacgaguuuaacagcccuccgaauaaccagguuaugcuuugugaacccacaauuaucgagagaaauauuaccgaaaucguguaucugacaaacaccacgauugagaaggaaaucugcccuaaacucgcugaguaccggaauugguccaagccccagugugacauuaccggguucgccccuuuuucuaaagauaacagcauccgccuguccgcgggaggcgacaucugggugacaagagagcccuaugucucuugcgauccugacaaguguuaccaauucgcucuugggcagggaaccacacugaauaacgugcauagcaaugauaccguucgggaccgcacgccguauagaacacuccugaugaacgaacugggcgugcccuuucaccucgggaccaagcaggucugcauugccugguccucuagcuccugucaugauggaaaagccuggcugcacgugugcaucacaggcgacgauaagaaugcuaccgccagcuucauuuacaacggccggcuuguugacucuaucguguccuggagcaaagagauucugcgcacccaggaaucugagugugucugcaucaaugggacauguacgguggugaugaccgauggauccgcuagcggcaaggccgacacaaaaauccucuuuauugaggaagggaagaucguccauaccuccacacugucuggaagcgcgaagcacguugaggaaugcuccugcuauccuagacaccccggcgugcggugugugugccgcgauaacuggaaagggagcaacagaccuauugucgacaucaauauuaaggaccauucuaucguguccagcuacguuuguucuggacuugugggcgauacgccccggaaaaacgacagcuccucuagcucccacugccuggauccgaauaacgaggaaggcgggcauggagucaagggcugggccuucgacgaugggaaugacguguggaugggacgcaccaucagcgagaaaucuagacucggcuacgagacauuuaagguuauugaagggugguccaacccuaaaagcaagcugcaaaucaaucgccaggugauugucgaucggggaaacagaucuggcuauuccggcaucuucagcguggaggggaaguccuguauuaaucggugcuuuuacgucgaacugaucagaggacgcaaagaggaaaccgaggugcucuggaccucuaacagcauuguuguguucuguggcacauccgggaccuauggaacaggcucuuggcccgacggggcugauaucaaucugaugccuaucuga

SEQ ID NO: 213552 - RNA, 1410 nt, Artificial Sequence
  derived and/or modified CDS sequence (opt5) from neuraminidase__InfluenzaA__AEX34378
augaaccccaaucagaagaucauuaccaucggcagcgugucccugacaauuucuacgaucugcuucuuuaugcaaauugccauccucaucaccacagucacccugcacuucaaacaguacgaguuuaacagcccuccgaauaaccagguuaugcuuugugaacccacaauuaucgagagaaauauuaccgaaaucguguaucugacaaacaccacgauugagaaggaaaucugcccuaaucucgcugaguaccggaacugguccaaaccccagugugacauuaccggguucgccccuuuuucuaaggauaauagcauccgccuguccgcgggaggcgacaucugggugacaagagagcccuaugucucuugcgauccugacaaauguuaccaauucgcucuugggcagggaaccacacugaacaaugugcauagcaacgauaccguucgggaccgcacgccguauagaacacuccugaugaaugaacugggcgugcccuuucaccucgggaccaagcaggucugcauugccugguccucuagcuccugucaugauggaaaggccuggcugcacgugugcaucacaggcgacgauaaaaacgcuaccgccagcuucauuuacaauggccggcuuguugacucuaucguguccuggagcaaggagauucugcgcacccaggaaucugagugugucugcaucaacgggacauguacgguggugaugaccgauggauccgcuagcggcaaagccgacacaaagauccucuuuauugaggaagggaaaaucguccauaccuccacacugucuggaagcgcgaagcacguugaggaaugcuccugcuauccuagacaccccggcgugcggugugugugccgcgauaacuggaaggggagcaauagaccuauugucgacaucaacauuaaagaccauucuaucguguccagcuacguuuguucuggacuugugggcgauacgccccggaagaaugacagcuccucuagcucccacugccuggauccgaacaaugaggaaggcgggcauggagucaaaggcugggccuucgacgaugggaacgacguguggaugggacgcaccaucagcgagaagucuagacucggcuacgagacauuuaaaguuauugaagggugguccaauccuaagagcaaacugcaaaucaaccgccaggugauugucgaucggggaaauagaucuggcuauuccggcaucuucagcguggaggggaaguccuguauuaaccggugcuuuuacgucgaacugaucagaggacgcaaggaggaaaccgaggugcucuggaccucuaauagcauuguuguguucuguggcacauccgggaccuauggaacaggcucuuggcccgacggggcugauaucaaccugaugccuaucuga

SEQ ID NO: 213553 - RNA, 1410 nt, Artificial Sequence
  derived and/or modified CDS sequence (opt5) from neuraminidase__InfluenzaA__AEX34400
augaaccccaaucagaagaucauuaccaucggcagcgugucccugacaauuucuacgaucugcuucuuuaugcaaauugccauccucaucaccacagucacccugcacuucaaacaguacgaguuuaacagcccuccgaauaaccagguuaugcuuugugaacccacaauuaucgagagaaauauuaccgaaaucguguaucugacaaacaccacgauugagaaggaaaucugcccuaaacucgcugaguaccggaauugguccaagccccagugugacauuaccggguucgccccuuuuucuaaagauaacagcauccgccuguccgcgggaggcgacaucugggugacaagagagcccuaugucucuugcgauccugacaaguguuaccaauucgcucuugggcagggaaccacacugaauaacgugcauagcaaugauaccguucggggccgcacgccguauagaacacuccugaugaacgaacugggggugcccuuucaccucggaaccaagcaggucugcauugccugguccucuagcuccugucaugacggcaaagccuggcugcacgugugcaucacaggcgaugacaagaaugcuaccgccagcuucauuuacaacgggcggcuuguugauucuguggucuccuggagcaaagagauccugcgcacccaggaaucugagugugugugcauuaauggaacauguacgguggucaugaccgacggcuccgcuagcgggaaggccgauacaaaaauccucuuuaucaaggagggaaagauuguucauaccuccacacugucuggcagcgcgcaacacguggaagagugcuccugcuauccuagauaccccggggugcggugugucugccgcgacaacuggaaaggaagcaacagaccuaucguggauauuaauaucaaggaccacucuauuguuuccagcuacguguguucuggccuugucggcgacacgccccggaaaaacgauagcuccucuagcucccauugccuggacccgaauaacgaagaagggggacacggcgugaaggggugggccuucgaugacggaaaugauguuuggaugggccgcaccaucagcgagaaaucuagacucggguaugagacauuuaaggugaucgagggaugguccaacccuaaaagcaagcugcagauuaaucggcaggucaucguggaccgcggcaacagaucuggcuacuccgggauuuucagcgucgaaggaaaguccuguaucaaucggugcuuuuauguggagcugauuagaggccgcaaagaagagaccgaaguucucuggaccucuaacagcaucguggucuucugugggacauccggaaccuacggcacagggucuuggcccgauggcgcugacauuaaucugaugccuaucuga

SEQ ID NO: 213554 - RNA, 1413 nt, Artificial Sequence
  derived and/or modified CDS sequence (opt5) from neuraminidase__InfluenzaA__AEX34432
augaaccccaaucagaagaucauuaccaucggcagcauuuccaucgccauugggaucaucucucugauucuccaaaucggaaacauuaucagcauuugggcuucccacucuauccagacaggcagccagaaucauacggggauuugcaaccagagaaucaucaccuacgaaaauuccacaugggugaacaauaccuaugucaacauuaauaacacaaauguugugguggagaaagacaagaccucugucacacuggccggaaacagcucccuuuguagcaucucuggcugggcgauuuacaccaaagauaauuccauccggauugggagcaagggagacguguucguuauccgcgagccuuuuaucucuugcucccaccuggaauguagaacguucuuucucacccaaggcgcucugcuuaacgauaaacauagcaauggcacagugaaggaccggucuccguaucgcgcccugauguccugcccccucggggaggccccuagccccuacaacuccagauucgaaucugucgcuuggagcgccuccgcuugucacgauggaaugggcuggcugaccauugggaucagcggaccugacaacggcgccguggcgguucugaaguauaaugggauuaucacagagaccauuaaaucuuggaagaaacggauccuccgcacgcaggaguccgaaugcguguguaugaacggaagcugcuuuacaaucaugaccgauggccccucuaauggcacagccagcuacaagauuuucaaaaucgagaaggggaaggucaccaaaaccauugaacugaacgcuccuaauuuucauuaugaggaguguuccugcuacccggacacaggaacggugaugugugugugcagagauaacuggcacggcucuaaucggcccugggucagcuucaaccagaaucuugacuaccagaucggguauauuugcuccggaguuuuuggcgauaacccucgccccaaggacggggaaggaagcuguaauccugugaccguggauggcgccgacggcgucaaaggguucucuuacaaguauggaaacggcguguggaucgggagaacaaaauccaaucggcugcgcaagggauuugagaugauuugggaccccaacggcuggaccaauacagauagcgacuucucuguuaaacaagauguggucgcuaucaccgacugguccggguacagcggcuccuuugugcagcacccggaacucacgggacuggauugcaucagaccuuguuucuggguugagcuugugcggggccugccccgcgaaaacacaaccauuuggaccucugggagcuccaucucuuucugcggagucaacagcggcacagccaauugguccuggccugacggggcggagcuccccuuuaccauugauaaguga

SEQ ID NO: 213555 - RNA, 1413 nt, Artificial Sequence; identical to SEQ ID NO: 213554
  derived and/or modified CDS sequence (opt5) from neuraminidase__InfluenzaA__AEX34443

SEQ ID NO: 213556 - RNA, 1410 nt, Artificial Sequence; identical to SEQ ID NO: 208675
  derived and/or modified CDS sequence (opt5) from neuraminidase__InfluenzaA__AEX34454

SEQ ID NO: 213557 - RNA, 1413 nt, Artificial Sequence
  derived and/or modified CDS sequence (opt5) from neuraminidase__InfluenzaA__AEX34465
augaaccccaaucagaagaucauuaccaucggcagcauuuccaucgccauugggaucaucucucugaugcuccaaauuggaaacaucauuagcaucugggcuucccacucuauucagacaggcagccagaaucauacggggaucugcaaccagagaauuaucaccuacgagaauagcacaugggugaaccacaccuaugugaauaucaacaauacaaacguuguggccggaaaagacaagaccucugugacacuggcgggcaauagcucccuuuguagcauuucugggugggcuaucuacaccaaagauaacuccauucggaucggaagcaagggcgacgucuucgugauucgcgaaccuuuuaucucuugcucccaucuggaguguagaacguucuuucucacccaaggcgcccugcuuaaugauaaacacagcaacgggacaguuaaggaccggucuccguaucgcgcccugauguccugcccccucggagaagcuccuagccccuacaauuccaaguucgagucuguggccuggagcgcuuccgccugucaugauggcaugggguggcugaccaucggaauuagcggcccugacaacggggcggucgccgugcugaaauauaacggaaucauuacagaaaccaucaagucuuggaaaaagcggauucucagaacgcaggaguccgagugcguuugugugaauggcagcugcuuuacaaucaugaccgauggccccucuaacggggcugccagcuacaaaaucuucaagauugaaaagggaaaagucacaaaguccaucgagcugaaugcuccuaacuuucacuaugaagaguguucuugcuacccggacaccggcaccgugaugugugugugccgcgauaauuggcacgggagcaacagacccugggucuccuucaaucagaaccuugacuaccagauuggauauaucugcagcggcguuuuuggggauaauccucggcccaaagacggagagggcucuuguaacccugugacaguggauggcgccgacgggauuaagggauucuccuacaaauauggcaauggggucuggaucggacgcacgaaguccaacagacugcggaaaggcuuugaaaugauuugggaccccaauggguggaccgauacagacucugauuucuccgugaagcaagacguuguggcgaucaccgauuggagcggcuacuccggaucuuuuguccagcauccggagcucacaggccuggacugcaugcgcccuuguuucuggguggaacuuguuagagggcugccccgggagaacaccacgaucuggacaagcggauccucuauuagcuucugcggcgucaauuccgauaccgccaacuggagcuggccugacggggcugaacuccccuuuaccaucgauaaguga

SEQ ID NO: 213558 - RNA, 1413 nt, Artificial Sequence; identical to SEQ ID NO: 213511
  derived and/or modified CDS sequence (opt5) from neuraminidase__InfluenzaA__AEX34476

SEQ ID NO: 213559 - RNA, 1413 nt, Artificial Sequence; identical to SEQ ID NO: 213513
  derived and/or modified CDS sequence (opt5) from neuraminidase__InfluenzaA__AEX34487

SEQ ID NO: 213560 - RNA, 1413 nt, Artificial Sequence; identical to SEQ ID NO: 213513
  derived and/or modified CDS sequence (opt5) from neuraminidase__InfluenzaA__AEX34498

SEQ ID NO: 213561 - RNA, 1413 nt, Artificial Sequence; identical to SEQ ID NO: 213513
  derived and/or modified CDS sequence (opt5) from neuraminidase__InfluenzaA__AEX34509

SEQ ID NO: 213562 - RNA, 1413 nt, Artificial Sequence; identical to SEQ ID NO: 213513
  derived and/or modified CDS sequence (opt5) from neuraminidase__InfluenzaA__AEX34520

SEQ ID NO: 213563 - RNA, 1413 nt, Artificial Sequence; identical to SEQ ID NO: 213513
  derived and/or modified CDS sequence (opt5) from neuraminidase__InfluenzaA__AEX34531

SEQ ID NO: 213564 - RNA, 1413 nt, Artificial Sequence; identical to SEQ ID NO: 213513
  derived and/or modified CDS sequence (opt5) from neuraminidase__InfluenzaA__AEX34542

SEQ ID NO: 213565 - RNA, 1413 nt, Artificial Sequence; identical to SEQ ID NO: 213513
  derived and/or modified CDS sequence (opt5) from neuraminidase__InfluenzaA__AEX34553

SEQ ID NO: 213566 - RNA, 1413 nt, Artificial Sequence; identical to SEQ ID NO: 213513
  derived and/or modified CDS sequence (opt5) from neuraminidase__InfluenzaA__AEX34564

SEQ ID NO: 213567 - RNA, 1413 nt, Artificial Sequence; identical to SEQ ID NO: 213513
  derived and/or modified CDS sequence (opt5) from neuraminidase__InfluenzaA__AEX34575

SEQ ID NO: 213568 - RNA, 1413 nt, Artificial Sequence; identical to SEQ ID NO: 213513
  derived and/or modified CDS sequence (opt5) from neuraminidase__InfluenzaA__AEX34586

SEQ ID NO: 213569 - RNA, 1413 nt, Artificial Sequence; identical to SEQ ID NO: 213513
  derived and/or modified CDS sequence (opt5) from neuraminidase__InfluenzaA__AEX34597

SEQ ID NO: 213570 - RNA, 1413 nt, Artificial Sequence; identical to SEQ ID NO: 213513
  derived and/or modified CDS sequence (opt5) from neuraminidase__InfluenzaA__AEX34608

SEQ ID NO: 213571 - RNA, 1413 nt, Artificial Sequence; identical to SEQ ID NO: 213513
  derived and/or modified CDS sequence (opt5) from neuraminidase__InfluenzaA__AEX34619

SEQ ID NO: 213572 - RNA, 1413 nt, Artificial Sequence; identical to SEQ ID NO: 213513
  derived and/or modified CDS sequence (opt5) from neuraminidase__InfluenzaA__AEX34630

SEQ ID NO: 213573 - RNA, 1413 nt, Artificial Sequence; identical to SEQ ID NO: 213513
  derived and/or modified CDS sequence (opt5) from neuraminidase__InfluenzaA__AEX34641

SEQ ID NO: 213574 - RNA, 1413 nt, Artificial Sequence
  derived and/or modified CDS sequence (opt5) from neuraminidase__InfluenzaA__AEX34653
augaaccccaaucagaagaucauuaccaucggcagcauuuccaucgccauugggaucaucucucugaugcuccaagugggaaacauuaucagcauuugggcuucccacucuauccagacaggcagccagaaucauacggggauuugcaaccagagaaucauuaccuacgaaaauuccacaugggucaaccacaccuauguuaauaucaacaauacaaacgugguggccggaaaagacaagaccucugucgcgcuggcuggcaauagcucccuuuguagcaucucugggugggccauuuacacaaaagauaacuccauccggauuggaagcaagggcgacguguucguuauccgcgagccuuuuauuucuugcucccaucuggaguguagaaccuucuuucucacgcaaggcgcccugcuuaaugauaaacacagcaacgggaccgugaaggaccggucuccguaucgcgcucugauguccugcccccucggagaagccccuagccccuacaauuccaaguucgagucugucgcuuggagcgccuccgcgugucaugauggccugggguggcugacaaucggaaucagcggcccugacaacggggccguggcuguucucaaauauaacggaauuaucaccgaaacaauuaagucuuggaaaaagagaauccugcggacccaggaguccgagugcgugugugucaauggcagcugcuuuacgauuaugacagauggccccucuaacggggccgcuagcuacaaaaucuucaagaucgaaaagggacaggugaccaaauccguggagcuuaaugccccuaacuuucacuaugaagaguguucuugcuacccggacacaggcaccgucauguguguuugccgcgauaauuggcacgggagcaacagacccuggguguccuucaaucaggaccuggauuaccaaauuggauauaucugcagcggcguguuuggggacaacccucggcccaaggauggaaaaggcucuuguaauccugucaccguggacggcgcggacgggguuaagggauucuccuacaaauauggcaacgggguguggauuggacgcacaaagagcaauagacuccggaaaggcuuugagaugaucugggaucccaacggguggacggacaccgauucugacuucuccgucaagcaggaugugguugccauuacagacuggagcggcuacuccggaucuuuugugcagcauccggaacugaccggccuugauugcauccgcccuuguuucugggucgagcuggugagagggcucccccgggaaaauacaaccauuuggacgagcggauccucuaucagcuucugcggcgucgacuccgauacagcuaacuggagcuggccugacggggccgagcugcccuuuaccaucgauaaguga

SEQ ID NO: 213575 - RNA, 1413 nt, Artificial Sequence
  derived and/or modified CDS sequence (opt5) from neuraminidase__InfluenzaA__AEX34664
augaaccccaaucagaagaucauuaccaucggcagcauuuccaucgccauugggaucaucucucugaugcuccaaauuggaaacaucauuagcaucugggcuucccacucuauucagacaggcagccagaaucauacggggaucugcaaccagagaauuaucaccuacgaaaauuccacaugggugaaccacaccuaugucaauaucaacaauacaaacguuguggccggaaaagacaagaccucugugacacuggcgggcaauagcucccuuuguagcauuucugggugggcuaucuacaccaaagauaacuccauucggaucggaagcaagggcgacgucuucgugauucgcgagccuuuuaucucuugcucccaucuggaguguagaacguucuuucucacccaaggcgcccugcuuaaugauaaacacagcaacgggacaguuaaggaccggucuccguaucgcgcccugauguccugcccccucggagaagcuccuagccccuacaauuccaaguucgagucuguggccuggagcgcuuccgccugucaugauggcaugggguggcugaccaucggaauuagcggcccugacaacggggcggucgccgugcugaaauauaacggaaucauuacagaaaccaucaagucuuggaaaaagcggauucucagaacgcaggaguccgagugcguuugugugaauggcagcugcuuuacaaucaugaccgauggccccucuaacggggcugccagcuacaaaaucuucaagauugaaaagggaaaagucacaaagucccgcgagcugaaugcuccuaacuuucacuaugaagaguguucuugcuacccggacaccggcaccgugaugugugugugcagagauaauuggcacgggagcaaccggcccugggucuccuucaaucagaaccuugacuaccagaucggauauauuugcagcggcguuuuuggggauaauccucgccccaaagacggaaagggcucuuguaacccugugacagccgauggcgcggacggggugaaaggauucuccuacaaguauggcaauggggucuggaucggaagaacgaaaagcaaccggcugcgcaagggcuuugagaugauuugggaccccaauggguggaccgauacagacucugauuucuccgugaagcaagacguuguggccaucaccgauuggagcggcuacuccggaucuuuuguccagcauccggaacucacaggccuggacugcauuagaccuuguuucuggguggagcuuguucgggggcugccccgcgaaaacaccacgaucuggacaagcggauccucuaucagcuucugcggcguggauuccgacaccgcuaauuggagcuggccugauggggccgagcuccccuuuaccauugacaaauga

SEQ ID NO: 213576 - RNA, 1413 nt, Artificial Sequence; identical to SEQ ID NO: 213554
  derived and/or modified CDS sequence (opt5) from neuraminidase__InfluenzaA__AEX34686

SEQ ID NO: 213577 - RNA, 1413 nt, Artificial Sequence
  derived and/or modified CDS sequence (opt5) from neuraminidase__InfluenzaA__AEX34760
augaaccccaaucagaagaucauuaccaucggcagcauuuccaucgccauugggaucaucucucugauucuccaaaucggaaacauuaucagcauuugggcuucccacucuauccagacaggcagccagaaucauacggggauuugcaaccagagaaucaucaccuacgaaaauuccacaugggugaacaauaccuaugucaacauuaauaacacaaauguugugguggagaaagacaagaccucugucacacuggccggaaacagcucccuuuguagcaucucuggcugggcgauuuacaccaaagauaauuccauccggauugggagcaagggagacguguucguuauccgcgagccuuuuaucucuugcucccaccuggaauguagaacguucuuucucacccaaggcgcucugcuuaacgauaaacauagcaauggcacagugaaggaccggucuccguaucgcgcccugauguccugcccccucggggaggccccuagccccuacaacuccagauucgaaucugucgcuuggagcgccuccgcuugucacgauggaaugggcuggcugaccauugggaucagcggaccugacaacggcgccguggcgguucugaaguauaaugggauuaucacagagaccauuaaaucuuggaagaaacggauccuccgcacgcaggaguccgaaugcguguguaugaacggaagcugcuuuacaaucaugaccgauggccccucuaauggcgccgcuagcuacaagauuuucaaaaucgagaaggggaaggucacaaaaaccauugaacugaacgccccuaauuuucauuaugaggaguguuccugcuacccggacaccggaacagugaugugugugugcagagauaacuggcacggcucuaaucggcccugggucagcuucaaccagaaucuugacuaccagaucggguauauuugcuccggaguuuuuggcgauaacccucgccccaaggacggggaaggaagcuguaauccugugacgguggauggcgcugacggcgucaaaggguucucuuacaaguauggaaacggcguguggaucgggagaaccaaauccaaucggcugcgcaagggauuugagaugauuugggaccccaacggcuggacaaauaccgauagcgacuucucuguuaaacaagauguggucgccaucacagacugguccggguacagcggcuccuuugugcagcacccggaacucaccggacuggauugcaucagaccuuguuucuggguugagcuugugcggggccugccccgcgaaaacacgacaauuuggaccucugggagcuccaucucuuucugcggagucaacagcggcaccgugaauugguccuggccugacggggcggagcuccccuuuacaauugauaaguga

SEQ ID NO: 213578 - RNA, 1413 nt, Artificial Sequence
  derived and/or modified CDS sequence (opt5) from neuraminidase__InfluenzaA__AEX34771
augaaccccaaucagaagaucauuaccaucggcagcauuuccaucgccauugggaucaucucucugauucuccaaaucggaaacauuaucagcauuugggcuucccacucuauccagacaggcagccagaaucauacggggauuugcaaccagagaaucaucaccuacgaaaauuccacaugggugaacaauaccuaugucaacauuaauaacacaaauguugugguggagaaagacaagaccucugucacacuggccggaaacagcucccuuuguagcaucucuggcugggcgauuuacaccaaagauaauuccauccggauugggagcaagggagacguguucguuauccgcgagccuuuuaucucuugcucccaccuggaauguagaacguucuuucucacccaaggcgcucugcuuaacgauaaacauagcaauggcacagugaaggaccggucuccguaucgcgcccugauguccugcccccucggggaggccccuagccccuacaacuccagauucgaaucugucgcuuggagcgccuccgcuugucacgauggaaugggcuggcugaccauugggaucagcggaccugacaacggcgccguggcgguucugaaguauaaugggauuaucacagagaccauuaaaucuuggaagaaacggauccuccgcacgcaggaguccgaaugcguguguaugaacggaagcugcuuuacaaucaugaccgauggccccucuaauggcgccgcuagcuacaagauuuucaaaaucgagaaggggaaggucacaaaaaccauugaacugaacgccccuaauuuucauuaugaggaguguuccugcuacccggacaccggaacagugaugugugugugcagagauaacuggcacggcucuaaucggcccugggucagcuucaaccagaaucuugacuaccagaucggguauauuugcuccggaguuuuuggcgauaacccucgccccaaggacggggaaggaagcuguaauccugugacgguggauggcgcugacggcgucaaaggguucucuuacaaguauggaaacggcguguggaucgggagaaccaaauccaaucggcugcgcaagggauuugagaugauuugggaccccaacggcuggacaaauaccgauagcgacuucucuguuaaacaagauguggucgccaucacagacugguccggguacagcggcuccuuugugcagcacccggaacucaccggacuggauugcaucagaccuuguuucuggguugagcuugugcggggccugccccgcgaaaacacgacaauuuggaccucugggagcuccaucucuuucugcggagucaacagcggcaccgcgaauugguccuggccugacggggccgagcuccccuuuacaauugauaaguga

SEQ ID NO: 213579 - RNA, 1413 nt, Artificial Sequence; identical to SEQ ID NO: 209533
  derived and/or modified CDS sequence (opt5) from neuraminidase__InfluenzaA__AEX34782

SEQ ID NO: 213580 - RNA, 1413 nt, Artificial Sequence
  derived and/or modified CDS sequence (opt5) from neuraminidase__InfluenzaA__AEX34793
augaaccccaaucagaagaucauuaccaucggcagcauuuccaucgccauugggaucaucucucugaugcuccaaauuggaaacaucauuagcaucugggcuucccacucuauucagacaggcagccagaaucauacggggaucugcaaccagagaauuaucaccuacgaaaauuccacaugggugaaccacaccuaugucaauaucaacaauacaaacguuguggccggaaaagacaagaccccugugacacuggucggcaauucuagccuuuguuccauuagcgggugggcgaucuacaccaaagauaacucuauucggaucggauccaagggcgacguguucguuauucgcgagccguuuaucagcugcucucaucuggaguguaaaacguucuuucucacccaaggcgcucugcuuaaugauaagcacuccaacgggacagugaaggacagaagccccuaucgggcccugaugucuugcccucucggagaagcccccuccccuuacaauagcaaauucgaguccgucgcuuggucugccagcgcuugucaugauggcaucggguggcugaccauuggaaucuccggccccgacaacggggccguggcgguucugaaguauaaaggaauuaucacaggcaccauuaagagcuggaaaaagcagauccuccgcacgcaggaaucugagugcguguguaugaacggcuccugcuuuacaaucaugaccgaugggccuagcaauggagccgcuucuuacaagauuuucaaaaucgagaagggcaaagucacaaagagcauggaacugaacgccccgaauuuucacuaugaggaauguuccugcuaccccgacaccgggaccgugaugugugugugcagagauaacuggcacggaucuaaucggccuugggucagcuucaaccagaaucuugacuaccaaauuggcuauaucugcuccgggguuuuuggagauaacccccgcccuaaagacagagagggcagcuguaaucccgugacaguggauggcgcuaacggggucaagggauucucuuacaaauauggcaaugggguguggauuggacggacgaaguccaaccgcaucagaaagggcuuugagaugauuugggacccgaauggguggaccaacacagacagcgauuucucuguuaaacaggacaucguggccaucaccgauugguccggcuacagcggauccuuuguccagcauccugaacugacaggccucgacugcauucggcccuguuucuggguggagcugguucgcgggcuuccuagagaaaauaccacgaucuggacaucuggaagcuccauuucuuucugcggcgugaacggggauaucgcgaacuggagcuggcccgacggagccgagcugcccuuuaccauugauaaguga

SEQ ID NO: 213581 - RNA, 1413 nt, Artificial Sequence; identical to SEQ ID NO: 213580
  derived and/or modified CDS sequence (opt5) from neuraminidase__InfluenzaA__AEX34804

SEQ ID NO: 213582 - RNA, 1413 nt, Artificial Sequence
  derived and/or modified CDS sequence (opt5) from neuraminidase__InfluenzaA__AEX34815
augaaccccaaucagaagaucauuaccaucggcagcauuuccaucgccauugggaucaucucucugaugcuccaaauuggaaacaucauuagcaucugggcuucccacucuauucagacaggcagccagaauaacacggggaucugcaaucagagaauuaucaccuacgagaacuccacaugggugaaucauaccuaugugaacaucaauaacacaaauguuguggccggagaagacaaaaccucugugacacugaccggcaacagcucccuuuguagcauuucugggugggcgaucuacacgaaggauaauuccauucggaucggaagcaaaggcgacgucuucgugauucgcgagccuuuuaucucuugcucccaccuggaauguagaaccuucuuucucacacaaggcgcucugcuuaacgauaagcauagcaaugggaccguuaaagaccggucuccguaucgcgcccugauguccugcccccucggagaggccccuagccccuacaacuccaaguucgaaucuguggcuuggagcgccuccgcuugucacgauggcaugggguggcugacaaucggaauuagcggcccugacaacggggccgucgcggugcugaaguauaauggaaucauuaccggcacgaucaaaucuuggaagaaacagauucucagaacacaggaguccgagugcguuuguaugaacggcagcugcuuuaccaucaugacagaugggcccucuaauaaggccgcuagcuacaaaaucuucaagauugaaaagggaaaagugaccaaguccaucgagcugaacgccccuaauuuuuauuacgaagaguguucuugcuacccggacaccggcauugucaugugugugugccgggauaacuggcaugggagcaaucgccccuggguguccuucaaccagaaucuugacuaucaaaucggauacauuugcagcggcgucuuuggggauaacccuagacccgaggacggagaaggcucuuguaauccuguuacaguggauggcgcuaacggggugaaaggauucuccuauaaguacggcaauggggucuggaucggacggacgaaaagcaaccgccugagaaagggcuuugagaugauuugggaccccaauggguggaccaacacagacucugauuucuccgugaaacaggacguuguggccaucaccgauuggagcggcuauuccggaucuuuuguccagcacccggaacucacaggccuggacugcauccggccuuguuucuggguggagcuuguucgcgggcugcccagagaaaacaccacgauuuggacaagcggauccucuaucagcuucugcggcgucaauuccgauaccgcgaacuggagcuggccugacggggccgagcuccccuuuaccauugauaaguga

SEQ ID NO: 213583 - RNA, 1413 nt, Artificial Sequence; identical to SEQ ID NO: 213580
  derived and/or modified CDS sequence (opt5) from neuraminidase__InfluenzaA__AEX34826

SEQ ID NO: 213584 - RNA, 1413 nt, Artificial Sequence; identical to SEQ ID NO: 213580
  derived and/or modified CDS sequence (opt5) from neuraminidase__InfluenzaA__AEX34837

SEQ ID NO: 213585 - RNA, 1413 nt, Artificial Sequence
  derived and/or modified CDS sequence (opt5) from neuraminidase__InfluenzaA__AEX34859
augaaccccaaucagaagaucauuaccaucggcagcacauccauugccaucgggauuaucucucugaugcuccaaaucggaaacauuaucagcauuugggcuucccacucuauccagacgggcagccagaaucauaccgggauuugcaaccagagaaucauuacauacgaaaauuccaccugggugaaccacacauaugucaauaucaacaauaccaacguuguggccggaaaagacaagacaccugugacccugaucggcaauucuagccuuuguuccauuagcgggugggcgaucuacacgaaagauaacucuauucggaucggauccaagggcgacgucuucgugauucgcgagccguuuaucagcugcucucaucuggaguguaaaaccuucuuucucacacaaggcgcucugcuuaaugauaagcacuccaacgggaccguuaaggacagaagccccuaucgggcccugaugucuugcccucucggagaagcccccuccccuuacaauagcaaauucgaguccguggcuuggucugccagcgcuugucaugauggcaucggguggcugacaauuggaaucuccggccccgacaacggggccgucgcggugcugaaguauaaaggaauuaucaccggcacgauuaagagcuggaaaaagcagauccuccgcacacaggaaucugagugcguuuguaugaacggcuccugcuuuaccaucaugacagaugggccuagcaauggagccgcuucuuacaagauuuucaaaaucgagaagggcaaagugaccaagagcauggaacugaacgccccgaauuuucacuaugaggaauguuccugcuaccccgacaccgggacagucaugugugugugcagagauaacuggcacggaucuaaucggccuugggugagcuucaaccagaaucuugacuaccaaauuggcuauaucugcuccggggucuuuggagauaacccccgcccuaaagacagagagggcagcuguaaucccguuacgguggauggcgcuaacggggugaagggauucucuuacaaauauggcaauggggucuggauuggacggaccaaguccaaccgcaucagaaagggcuuugagaugauuugggacccgaauggguggacaaacaccgacagcgauuucucugugaaacaggacaucguugccaucacagauugguccggcuacagcggauccuuugugcagcauccugaacugaccggccucgacugcauucggcccuguuucugggucgagcuggugcgcgggcuuccuagagaaaauacgacaaucuggaccucuggaagcuccauuucuuucugcggcguuaacggggauaucgcgaacuggagcuggcccgacggagccgagcugcccuuuaccauugauaaguga

SEQ ID NO: 213586 - RNA, 1413 nt, Artificial Sequence
  derived and/or modified CDS sequence (opt5) from neuraminidase__InfluenzaA__AEX34870
augaaccccaaucagaagaucauuaccaucggcagcauuuccaucgccauugggaucaucucucugaugcuccaaauuggaaacaucauuagcaucugggcuucccacucuauucagacaggcagccagaauaacacggggaucugcaaucagagaauuaucaccuacgagaacuccacaugggugaaucauaccuaugugaacaucaauaacacaaauguuguggccggagaagacaaaauuucugugacccuggcgggcaacagcucccuuuguagcaucucugggugggcuauuuacacaaaggauaauuccauccggauuggaagcaaaggcgacgucuucgugauccgcgagccuuuuaucucuugcucccaccuggaauguagaaccuucuuucucacgcaaggcgcccugcuuaacgauaagcauagcaaugggaccguuaaagaccggucuccguaucgcgcccugauguccugcccccucggagaggcuccuagccccuacaacuccaaguucgaaucuguggccuggagcgcuuccgccugucacgauggcauuggguggcugacaaucggaauuagcggcccugacaacggggcggucgccgugcugaaguauaauggaaucauuaccggcacaaucaaaucuuggaagaaacagauccucagaacccaggaguccgagugcguuuguaugaacggcagcugcuuuacgauuaugacagaugggcccucuaauaaggcugccagcuacaaaaucuucaagauugaaaagggaaaagugaccaaguccaucgagcugaacgcuccuaauuuuuauuacgaagaguguucuugcuacccggacacaggcauugucaugugugugugccgggauaacuggcaugggagcaaucgccccuggguguccuucaaccagaaucuugacuaucaaaucggauacauuugcagcggcgucuuuggggauaacccuagacccgaggacggagaaggcucuuguaauccuguuaccguggauggcgccaacggggugaaaggauucuccuauaaguacggcaauggggucuggaucggacggaccaaaagcaaccgccugagaaagggcuuugagaugaucugggaccccaauggguggacaaacacggacucugauuucuccgugaaacaggacguuguggcgauuaccgauuggagcggcuauuccggaucuuuuguccagcacccggaacucacaggccuggacugcauccggccuuguuucuggguggagcuuguucgcgggcugcccagagaaaacaccacaauuuggaccagcggauccucuaucagcuucugcggcgucaauuccgauacggccaacuggagcuggccugacggggcugagcuccccuuuacaauugauaaguga

SEQ ID NO: 213587 - RNA, 1413 nt, Artificial Sequence
  derived and/or modified CDS sequence (opt5) from neuraminidase__InfluenzaA__AEX34881
augaaccccaaucagaagaucauuaccaucggcagcauuuccaucgccauugggaucaucucucugaugcuccaaauuggaaacaucauuagcaucugggcuucccacucuauucagacaggcagccagaaucauacggggaucugcaaccagagaauuaucaccuacgaaaauuccacaugggugaaccacaccuaugucaauaucaacaauacaaacguuguggccggaaaagacaaggcgccugugacccugauuggcaauucuagccuuuguuccaucagcgggugggcuauuuacacaaaagauaacucuauccggauuggauccaagggcgacgucuucgugauccgcgagccguuuaucagcugcucucaucuggaguguaaaaccuucuuucucacgcaaggcgcccugcuuaaugauaagcacuccaacgggaccguuaaggacagaagccccuaucgggcccugaugucuugcccucucggagaagcucccuccccuuacaauagcaaauucgaguccguggccuggucugcuagcgccugucaugauggcauuggguggcugacaaucggaauuuccggccccgacaacggggcggucgccgugcugaaguauaaaggaaucauuaccggcacaaucaagagcuggaaaaagcagauccuccgcacccaggaaucugagugcguuuguaugaacggcuccugcuuuacgauuaugacagaugggccuagcaauggagcugccucuuacaagaucuucaaaauugagaagggcaaagugaccaagagcauggaacugaacgcuccgaauuuucacuaugaggaauguuccugcuaccccgacacagggaccgucaugugugugugcagagauaacuggcacggaucuaaucggccuugggugagcuucaaccagaaucuugacuaccaaaucggcuauauuugcuccggggucuuuggagauaacccccgcccuaaagacagagagggcagcuguaaucccguuaccguggauggcgccaacggggugaagggauucucuuacaaauauggcaauggggucuggaucggacggacaaaguccaaccgcauuagaaagggcuuugagaugaucugggacccgaauggguggacgaacaccgacagcgauuucucugugaaacaggacaucguugcgauuacagauugguccggcuacagcggauccuuugugcagcauccugaacugaccggccucgacugcauccggcccuguuucugggucgagcuggugcgcgggcuuccuagagaaaauacaaccauuuggacgucuggaagcuccaucucuuucugcggcguuaacggggauauugccaacuggagcuggcccgacggagcugagcugcccuuuacaaucgauaaguga

SEQ ID NO: 213588 - RNA, 1413 nt, Artificial Sequence
  derived and/or modified CDS sequence (opt5) from neuraminidase__InfluenzaA__AEX34892
augaaccccaaucagaagaucauuaccaucggcagcauuuccaucgccauugggaucaucucucugaugcuccaaauuggaaacaucauuagcaucugggcuucccacucuauucagacaggcagccagaauaacacggggaucugcaaucagagaauuaucaccuacgagaacuccacaugggugaaucauaccuaugucaacaucaauaacacaaauguuguggccggagaagacaaaaccucugugacacuggcgggcaacagcucccuuuguagcauuucugggugggcuaucuacaccaaggauaauuccauucggaucggaagcaaaggcgacgucuucgugauucgcgagccuuuuaucucuugcucccaccuggaauguagaacguucuuucucacccaaggcgcccugcuuaacgauaagcauagcaaugggacaguuaaagaccggucuccguaucgcgcccugauguccugcccccucggagaggcuccuagccccuacaacuccaaguucgaaucuguggccuggagcgcuuccgccugucacgauggcaugggguggcugaccaucggaauuagcggcccugacaacggggcggucgccgugcugaaguauaauggaaucauuacaggcaccaucaaaucuuggaagaaacagauucucagaacgcaggaguccgagugcguuuguaugaacggcagcugcuuuacaaucaugaccgaugggcccucuaauaaggcugccagcuacaaaaucuucaagauugaaaagggaaaagugacaaaguccaucgagcugaacgcuccuaauuuuuauuacgaagaguguucuugcuacccggacaccggcauugucaugugugugugccgggauaacuggcaugggagcaaucgccccuggguguccuucaaccagaaucuugacuaucaaaucggauacauuugcagcggcgucuuuggggauaacccuagacccgaggacggagaaggcucuuguaauccuguuaccguggauggcgccaacggggugaaaggauucuccuauaaguacggcaauggggucuggaucggacggacaaaaagcaaccgccugagaaagggcuuugagaugauuugggaccccaauggguggacgaacaccgacucugauuucuccgugaaacagaacguuguggcgaucacagacuggagcggcuauuccggaucuuuuguccagcacccggaacucaccggccuggauugcauccggccuuguuucuggguggagcuuguucgcgggcugcccagagaaaauacaaccauuuggacgagcggauccucuaucagcuucugcggcgugaacuccgacacagccaauuggagcuggccugauggggcugagcuccccuuuaccauugacaaguga

SEQ ID NO: 213589 - RNA, 1413 nt, Artificial Sequence
  derived and/or modified CDS sequence (opt5) from neuraminidase__InfluenzaA__AEX34903
augaaccccaaucagaagaucauuaccaucggcagcauuuccaucgccauugggaucaucucucugaugcuccaaauuggaaacaucauuagcaucugggcuuccagaucuauucagacaggcagccagaaucacacggggaucugcaaccagcggauuaucaccuacgaaaauuccacaugggugaaccauaccuaugucaauaucaacaauacaaacguuguggccggaaaagacaagaccccugugacacuggucggcaauucuagccuuuguuccauuagcgggugggcgaucuacaccaaagauaacucuauucgcaucggauccaagggcgacguguucguuauuagagagccguuuaucagcugcucucaccuggaguguaaaacguucuuucucacccaaggcgcucugcuuaaugauaagcauuccaacgggacagugaaggaccggagccccuaucgcgcccugaugucuugcccucucggagaagcccccuccccuuacaauagcaaauucgaguccgucgcuuggucugccagcgcuugucacgauggcaucggguggcugaccauuggaaucuccggccccgacaacggggccguggcgguucugaaguauaaaggaauuaucacaggcaccauuaagagcuggaaaaagcagauccucagaacgcaggaaucugagugcguguguaugaacggcuccugcuuuacaaucaugaccgaugggccuagcaauggagccgcuucuuacaagauuuucaaaaucgagaagggcaaagucacaaagagcauggaacugaacgccccgaauuuucauuaugaggaauguuccugcuaccccgacaccgggaccgugaugugugugugccgggauaacuggcacggaucuaaucgcccuugggucagcuucaaccagaaucuugacuaccaaauuggcuauaucugcuccgggguuuuuggagauaaccccagaccuaaagaccgggagggcagcuguaaucccgugacaguggauggcgcuaacggggucaagggauucucuuacaaauauggcaaugggguguggauuggacgcacgaaguccaacagaauccggaagggcuuugagaugauuugggacccgaauggguggaccaacacagacagcgauuucucuguucgccaggacaucguggccaucaccgauugguccggcuacagcggauccuuuguccagcacccugaacugacaggccucgacugcauuagacccuguuucuggguggagcugguucgggggcuuccucgcgaaaauaccacgaucuggacaucuggaagcuccauuucuuucugcggcgugaacggggauaucgcgaacuggagcuggcccgacggagccgagcugcccuuuaccauugauaaauga

SEQ ID NO: 213590 - RNA, 1413 nt, Artificial Sequence; identical to SEQ ID NO: 209533
  derived and/or modified CDS sequence (opt5) from neuraminidase__InfluenzaA__AEX34914

SEQ ID NO: 213591 - RNA, 1413 nt, Artificial Sequence; identical to SEQ ID NO: 209533
  derived and/or modified CDS sequence (opt5) from neuraminidase__InfluenzaA__AEX34925

SEQ ID NO: 213592 - RNA, 1413 nt, Artificial Sequence; identical to SEQ ID NO: 209533
  derived and/or modified CDS sequence (opt5) from neuraminidase__InfluenzaA__AEX34936

SEQ ID NO: 213593 - RNA, 1413 nt, Artificial Sequence; identical to SEQ ID NO: 209533
  derived and/or modified CDS sequence (opt5) from neuraminidase__InfluenzaA__AEX34947

SEQ ID NO: 213594 - RNA, 1413 nt, Artificial Sequence; identical to SEQ ID NO: 209533
  derived and/or modified CDS sequence (opt5) from neuraminidase__InfluenzaA__AEX34958

SEQ ID NO: 213595 - RNA, 1413 nt, Artificial Sequence; identical to SEQ ID NO: 209533
  derived and/or modified CDS sequence (opt5) from neuraminidase__InfluenzaA__AEX34969

SEQ ID NO: 213596 - RNA, 1413 nt, Artificial Sequence; identical to SEQ ID NO: 209533
  derived and/or modified CDS sequence (opt5) from neuraminidase__InfluenzaA__AEX34980

SEQ ID NO: 213597 - RNA, 1413 nt, Artificial Sequence; identical to SEQ ID NO: 209533
  derived and/or modified CDS sequence (opt5) from neuraminidase__InfluenzaA__AEX34991

SEQ ID NO: 213598 - RNA, 1413 nt, Artificial Sequence
  derived and/or modified CDS sequence (opt5) from neuraminidase__InfluenzaA__AEX35002
augaaccccaaucagaagaucauuaccaucggcagcauuuccaucgccauugggaucaucucucugaugcuccaaauuggaaacaucauuagcaucugggcuucccacucuauucagacaggcagccagaaucauacggggaucugcaaccagagaauuaucaccuacgaaaauuccacaugggugaaccacaccuaugucaauaucaacaauacaaacguuguggccggaaaagacaagaccccugugacacugauuggcaauucuagccuuuguuccaucagcgggugggcgauuuacaccaaagauaacucuauccggauuggauccaagggcgacgucuucgugauccgcgagccguuuaucagcugcucucaucuggaguguaaaacguucuuucucacccaaggcgcucugcuuaaugauaagcacuccaacgggacaguuaaggacagaagccccuaucgggcccugaugucuugcccucucggagaagcccccuccccuuacaauagcaaauucgaguccguggcuuggucugccagcgcuugucaugauggcauuggguggcugaccaucggaauuuccggccccgacaacggggccgucgcggugcugaaguauaaaggaaucauuacaggcaccaucaagagcuggaaaaagcagauccuccgcacgcaggaaucugagugcguuuguaugaacggcuccugcuuuacaauuaugaccgaugggccuagcaauggagccgcuucuuacaagaucuucaaaauugagaagggcaaagugacaaagagcauggaacugaacgccccgaauuuucacuaugaggaauguuccugcuaccccgacaccgggaccgucaugugugugugcagagauaacuggcacggaucuaaucggccuugggugagcuucaaccagaaucuugacuaccaaaucggcuauauuugcuccggggucuuuggagauaacccccgcccuaaagacagagagggcagcuguaaucccguuacaguggauggcgcuaacggggugaagggauucucuuacaaauauggcaauggggucuggaucggacggacgaaguccaaccgcauuagaaagggcuuugagaugaucugggacccgaauggguggaccaacacagacagcgauuucucugugaaacaggacaucguugccauuaccgauugguccggcuacagcggauccuuugugcagcauccugaacugacaggccucgacugcauccggcccuguuucugggucgagcuggugcgcgggcuuccuagagaaaauaccacgauuuggacaucuggaagcuccaucucuuucugcggcguuaacggggauauugcgaacuggagcuggcccgacggagccgagcugcccuuuaccaucgauaaguga

SEQ ID NO: 213599 - RNA, 1413 nt, Artificial Sequence; identical to SEQ ID NO: 209533
  derived and/or modified CDS sequence (opt5) from neuraminidase__InfluenzaA__AEX35013

SEQ ID NO: 213600 - RNA, 1413 nt, Artificial Sequence; identical to SEQ ID NO: 209533
  derived and/or modified CDS sequence (opt5) from neuraminidase__InfluenzaA__AEX35024

SEQ ID NO: 213601 - RNA, 1413 nt, Artificial Sequence; identical to SEQ ID NO: 209533
  derived and/or modified CDS sequence (opt5) from neuraminidase__InfluenzaA__AEX35035

SEQ ID NO: 213602 - RNA, 1413 nt, Artificial Sequence; identical to SEQ ID NO: 209533
  derived and/or modified CDS sequence (opt5) from neuraminidase__InfluenzaA__AEX35046

SEQ ID NO: 213603 - RNA, 1413 nt, Artificial Sequence; identical to SEQ ID NO: 209533
  derived and/or modified CDS sequence (opt5) from neuraminidase__InfluenzaA__AEX35057

SEQ ID NO: 213604 - RNA, 1413 nt, Artificial Sequence; identical to SEQ ID NO: 209533
  derived and/or modified CDS sequence (opt5) from neuraminidase__InfluenzaA__AEX35068

SEQ ID NO: 213605 - RNA, 1413 nt, Artificial Sequence
  derived and/or modified CDS sequence (opt5) from neuraminidase__InfluenzaA__AEX35079
augaaccccaaucagaagaucauuaccaucggcagcauuuccaucgccauugggaucaucucucugaugcuccaaauuggaaacaucauuagcaugugggcuucccacucuauccagacaggcagccagaauaacacggggauuugcaaucagagaaucauuaccuacgagaacuccacaugggugaaucauaccuaugucaacaucaauaacacaaauguuguggccggagaagacaaaaccucugugacacuggcgggcaacagcucccuuuguagcaucucugggugggcuauuuacaccaaggauaauuccauccggauuggaagcaaaggcgacgucuucgugauccgcgagccuuuuauuucuugcucccaccuggaauguagaacguucuuucucacccaaggcgcccugcuuaacgauaagcauagcaaugggacaguuaaagaccggucuccguaucgcgcccugauguccugcccccucggagaggcuccuagccccuacaacuccaaguucgaaucuguggccuggagcgcuuccgccugucacgauggcaugggguggcugaccaucggaaucagcggcccugacaacggggcggucgccgugcugaaguauaauggaauuaucacaggcaccauuaaaucuuggaagaaacagauccucagaacgcaggaguccgagugcguuuguaugaacggcagcugcuuuacaauuaugaccgaugggcccucuaauaaggcugccagcuacaaaaucuucaagaucgaaaagggaaaagugacaaaguccauugagcugaacgcuccuaauuuuuauuacgaagaguguucuugcuacccggacaccggcaucgucaugugugugugccgggauaacuggcaugggagcaaucgccccuggguguccuucaaccaggaccuugauuaucaaauuggauacaucugcagcggcgucuuuggggacaauccuagacccgaggauggagaaggcucuuguaacccuguuaccguggacggcgccaauggggugaaaggauucuccuauaaguacggcaacggggucuggauuggacggacaaaaagcaaucgccugagaaagggcuuugagaugaucugggaccccaacggguggacgaauaccgauucugacuucuccgugaaacaggauguuguggcgauuacagacuggagcggcuauuccggaucuuuuguccagcacccggaacucaccggccuggauugcauccggccuuguuucuggguggagcuuguucgcgggcugcccagagaaaacacaaccaucuggacgagcggauccucuauuagcuucugcggcgugaacuccgacacagccaauuggagcuggccugauggggcugagcuccccuuuaccaucgacaaguga

SEQ ID NO: 213606 - RNA, 1413 nt, Artificial Sequence; identical to SEQ ID NO: 213580
  derived and/or modified CDS sequence (opt5) from neuraminidase__InfluenzaA__AEX35090

SEQ ID NO: 213607 - RNA, 1413 nt, Artificial Sequence
  derived and/or modified CDS sequence (opt5) from neuraminidase__InfluenzaA__AEX35101
augaaccccaaucagaagaucauuaccaucggcagcauuuccaucgccauugggaucaucucucugaugcuccaaauuggaaacaucauuagcaucugggcuucccacucuauucagacaggcagccagaauaacacggggaucugcaaucagagaauuaucaccuacgagaacuccacaugggugaaucauaccuaugucaacaucaauaacacaaauguuguggccggagaagacaaaaccucugugacacuggcgggcaacagcucccuuuguagcauuucugggugggcuaucuacaccaaggauaauuccauucggaucggaagcaaaggcgacgucuucgugauucgcgagccuuuuaucucuugcucccaccuggaauguagaacguucuuucucacccaaggcgcccugcuuaacgauaagcauagcaaugggacaguuaaagaccggucuccguaucgcgcccugauguccugcccccucggagaggcuccuagccccuacaacuccaaguucgaaucuguggccuggagcgcuuccgccugucacgauggcaugggguggcugaccaucggaauuagcggcccugacaacggggcggucgccgugcugaaguauaauggaaucauuacaggcaccaucaaaucuuggaagaaacagauucucagaacgcaggaguccgagugcguuuguaugaacggcagcugcuuuacaaucaugaccgaugggcccucuaauaaggcugccagcuacaaaaucuucaagauugaaaagggaaaagugacaaaguccaucgagcugaacgcuccuaauuuucauuaugaagaguguucuugcuacccggacaccggcauugucaugugugugugccgggauaacuggcacgggagcaaucgccccuggguguccuucaaccagaaucuugacuaccaaaucggauauauuugcagcggcgucuuuggggauaacccuagacccgaggacggagaaggcucuuguaauccuguuaccguggauggcgccaacggggugaaaggauucuccuacaaguaugacaauggcgucuggaucgggcggacaaaaagcaaccgccugagaaagggauuugagaugauuugggaccccaauggcuggacgaacaccgauucuguguucuccguuaaacaggacguggucgcgaucacagauuggagcggguacuccggcucuuuugugcagcacccggaacucaccggacuggacugcauccggccuuguuucuggguugagcuugugcgcggccugcccagagaaaacacaaccauuuggacgagcggguccucuaucagcuucugcggagucaauuccgauacagccaacuggagcuggccugacggcgcugagcuccccuuuaccauugauaaguga

SEQ ID NO: 213608 - RNA, 1413 nt, Artificial Sequence
  derived and/or modified CDS sequence (opt5) from neuraminidase__InfluenzaA__AEX35112
augaaccccaaucagaagaucauuaccaucggcagcauuuccaucgccauugggaucaucucucugaugcuccaaauuggaaacaucauuagcaucugggcuucccacucuauucagacaggcagccagaauaacacggggaucugcaaucagagaauuaucaccuacgagaacuccacaugggugaaucauaccuaugucaacaucaauaacacaaauguuguggccggagaagacaaaaccucugugacacuggcgggcaacagcucccuuuguagcauuucugggugggcuaucuacaccaaggauaauuccauucggaucggaagcaaaggcgacgucuucgugauucgcgagccuuuuaucucuugcucccaccuggaauguagaacguucuuucucacccaaggcgcccugcuuaacgauaagcauagcaaugggacaguuaaagaccggucuccguaucgcgcccugauguccugcccccucggagaggcuccuagccccuacaacuccaaguucgaaucuguggccuggagcgcuuccgccugucacgauggcaugggguggcugaccaucggaauuagcggcccugacaacggggcggucgccgugcugaaguauaauggaaucauuacaggcaccaucaaaucuuggaagaaacagauucucagaacgcaggaguccgagugcguuuguaugaacggcagcugcuuuacaaucaugaccgaugggcccucuaauaaggcugccagcuacaaaaucuucaagauugaaaagggaaaagugacaaaguccaucgagcugaacgcuucuaauuuuuauuacgaagaguguagcugcuacccugacaccggcauugucaugugugugugccgggauaacuggcauggguccaaucgcccgugggugagcuucaaccagaaucuugacuaucaaaucggauacauuugcucuggcgucuuuggggauaaccccagaccugaggacggagaaggcuccuguaaucccguuaccguggauggcgccaacggggugaaaggauucagcuauaaguacggcaauggggucuggaucggacggacaaaaucuaaccgccugagaaagggcuuugagaugauuugggacccuaauggguggacgaacaccgacuccgauuucagcgugaaacaggacguuguggcgaucacagauugguccggcuauucuggcagcuuuguccagcaccccgaacucaccggacuggacugcauccggccguguuucuggguggagcuuguucgcgggcugccuagagaaaacacaaccauuuggacguccggaucuagcaucuccuucugcggcgugaauagcgauacagccaacuggucuuggcccgacggggcugagcucccuuuuaccauugauaaguga

SEQ ID NO: 213609 - RNA, 1413 nt, Artificial Sequence; identical to SEQ ID NO: 209533
  derived and/or modified CDS sequence (opt5) from neuraminidase__InfluenzaA__AEX35123

SEQ ID NO: 213610 - RNA, 1413 nt, Artificial Sequence
  derived and/or modified CDS sequence (opt5) from neuraminidase__InfluenzaA__AEX35145
augaaccccaaucagaagaucauuaccaucggcagcauuuccaucgccauugggaucaucucucugaugcuccaaauuggaaacaucauuagcaucugggcuucccacucuauucagacaggcagccagaauaacacggggaucugcaaucagagaauuaucaccuacgagaacuccacaugggugaaucauaccuaugucaacaucaauaacacaaauguuguggccggagaagacaaaaccucugugacacuggcgggcaacagcucccuuuguagcauuucugggugggcuaucuacaccaaggauaauuccauucggaucggaagcaaaggcgacgucuucgugauucgcgagccuuuuaucucuugcucccaccuggaauguagaacguucuuucucacccaaggcgcccugcuuaacgauaagcauagcaaugggacaguuaaagaccggucuccguaucgcgcccugauguccugcccccucggagaggcuccuagccccuacaacuccaaguucgaaucuguggccuggagcgcuuccgccugucacgauggcaugggguggcugaccaucggaauuagcggcccugacaacggggcggucgccgugcugaaguauaauggaaucauuacaggcaccaucaaaucuuggaagaaacagauucucagaacgcaggaguccgagugcguuuguaugaacggcagcugcuuuacaaucaugaccgaugggcccucuaauaaggcugccagcuacaaaaucuucaagauugaaaagggaaaagugacaaaguccaucgagcugaacgcuccuaauuuuuauuacgaagaguguucuugcuacccggacaccggcauugucaugugugugugccgggauaacuggcaugggagcaaucgccccuggguguccuucaaccagaaucuugacuaucaaaucggauacauuugcagcggcgucuuuggggauaacccuagacccgaggacggagaaggcucuuguaauccuguuaccguggauggcgccaacggggugaaaggauucuccuauaaguacggcaauggggucuggaucggacggacaaaaagcaaccgccugagaaagggcuuugagaugauuugggaccccaauggguggacgaacaccgacucugauuucuccgugaaacaggacaucguugcgaucacagauuggagcggcuauuccggaucuuuugugcagcacccggaacucaccggccuggacugcauucggccuuguuucugggucgagcuugugcgcgggcugcccagagaaaacacaaccaucuggacgagcggauccucuauuagcuucugcggcguuaauuccgauacagccaacuggagcuggccugacggggcugagcuccccuuuaccaucgauaaguga

SEQ ID NO: 213611 - RNA, 1413 nt, Artificial Sequence; identical to SEQ ID NO: 213580
  derived and/or modified CDS sequence (opt5) from neuraminidase__InfluenzaA__AEX35156

SEQ ID NO: 213612 - RNA, 1413 nt, Artificial Sequence; identical to SEQ ID NO: 209533
  derived and/or modified CDS sequence (opt5) from neuraminidase__InfluenzaA__AEX35167

SEQ ID NO: 213613 - RNA, 1413 nt, Artificial Sequence
  derived and/or modified CDS sequence (opt5) from neuraminidase__InfluenzaA__AEX35178
augaaccccaaucagaagaucauuaccaucggcagcauuuccaucgccauugggaucaucucucugaugcuccaaauuggaaacaucauuagcaucugggcuucccacucuauucagacaggcagccagaaucauacggggaucugcaaccagagaauuaucaccuacgagaauagcacaugggugaaccacaccuaugucaauaucaacaauacaaacguuguggccggaaaagacaagaccucugugacacuggcgggcaauagcucccuuuguagcauuucugggugggcuaucuacaccaaagauaacuccauucggaucggaagcaagggcgacgucuucgugauucgcgaaccuuuuaucucuugcucccaucuggaguguagaacguucuuucucacccaaggcgcccugcuuaaugauaaacacagcaacgggacaguuaaggaccggucuccguaucgcgcccugauguccugcccccucggagaagcuccuagccccuacaauuccaaguucgagucuguggccuggagcgcuuccgccugucaugauggcaugggguggcugaccaucggaauuagcggcccugacaacggggcggucgccgugcugaaauauaacggaaucauuacagaaaccaucaagucuuggaaagagcggauucucagaacgcaggaguccgaaugcguuugugugaauggcagcugcuuuacaaucaugaccgauggccccucuaacggggcugccagcuacaagaucuucaaaauugagaagggaaaggucacaaaaucccgcgaacugaaugcuccuaacuuucacuaugaggaguguucuugcuacccggacaccggcaccgugaugugugugugcagagauaauuggcacgggagcaaccggcccugggucuccuucaaucagaaccuugacuaccagaucggauauauuugcagcggcguuuuuggggauaauccucgccccaaggacggaaaaggcucuuguaacccugugacagccgauggcgcggacggggugaagggauucuccuacaaauauggcaauggggucuggaucggaagaacgaaguccaaccggcugcgcaaaggcuuugaaaugauuugggaccccaauggguggaccgauacagacucugauuucuccgugaagcaagacguuguggccaucaccgauuggagcggcuacuccggaucuuuuguccagcauccggagcucacaggccuggacugcauuagaccuuguuucuggguggaacuuguucgggggcugccccgcgagaacaccacgaucuggacaagcggauccucuaucagcuucugcggcguggauuccgacaccgcuaauuggagcuggccugauggggccgaacuccccuuuaccauugacaaguga

SEQ ID NO: 213614 - RNA, 1413 nt, Artificial Sequence; identical to SEQ ID NO: 213554
  derived and/or modified CDS sequence (opt5) from neuraminidase__InfluenzaA__AEX35189

SEQ ID NO: 213615 - RNA, 1413 nt, Artificial Sequence; identical to SEQ ID NO: 213554
  derived and/or modified CDS sequence (opt5) from neuraminidase__InfluenzaA__AEX35200

SEQ ID NO: 213616 - RNA, 1413 nt, Artificial Sequence; identical to SEQ ID NO: 209533
  derived and/or modified CDS sequence (opt5) from neuraminidase__InfluenzaA__AEX35211

SEQ ID NO: 213617 - RNA, 1410 nt, Artificial Sequence
  derived and/or modified CDS sequence (opt5) from neuraminidase__InfluenzaA__AEX35222
augaaccccaaucagaagaucauuaccaucggcagcgugucccugacaauuucuacgaucugcuucuuuaugcaaauugccauccucgucaccacaguuacccugcacuucaaacaguacgaguguaacagcccuccgaauaaccaggugaugcuuugcgaacccacaaucauugagagaaauaucaccgaaauuguguaucugacaaacaccacgaucgagaaggaaauuuguccuaaacucgcugaguaccggaauugguccaagccccagugcaacaucaccggguuugccccuuucucuaaagacaauagcauucgccuguccgcgggaggcgauaucugggucacaagagagcccuaugugucuugugacccugauaagugcuaccaauuugcucuugggcagggaaccacacugaacaauggccauagcaacgacaccguucacgaucggacgccguaucgcacacuccugaugaaugaacugggggugcccuuccaucucggaaccaagcaggucuguaucgccugguccucuagcuccugccacgacggcaaagccuggcugcauguguguguuacaggcgaugacgagaacgcuaccgccagcuuuauuuacaaugggagacuuguggauucuaucggauccuggagcaagaaaauucugcggacccaggaaucugagugcgucuguaucaacggcacaugcacgguggugaugaccgacggguccgcuagcggaaaggccgauacaaaaauucucuucaucgaggaaggcaagaucguccacaccuccacacugucugggagcgcgcaacacguugaggaaugcuccuguuauccucgcuaccccggagugagaugcgugugucgggacaacuggaagggcagcaaucgcccuauugucgauaucaacauuaaagacuacucuaucguguccagcuauguuugcucuggccuugugggggacacccccagaaagaaugauagcuccucuagcucccauugucuggacccgaacaaugaggaaggaggccacggggucaaaggaugggccuuugaugacggcaacgauguguggauggggcggacgauuagcgagaagcuccgcucuggauacgagacauucaaaguuaucgaaggcugguccaagccuaauagcaaacugcagaucaacagacaggugauugucgaccggggcaaucgcucuggguauuccggaaucuuuagcguggagggcaaguccugcauuaacagauguuucuacgucgaacugauccgggggagaaagcaggagaccgaagugcucuggaccucuaauagcauuguuguguuuugcggaacauccggcaccuaugggacaggcucuuggcccgauggagcugacaucaaccugaugccuauuuga

SEQ ID NO: 213618 - RNA, 1413 nt, Artificial Sequence; identical to SEQ ID NO: 213513
  derived and/or modified CDS sequence (opt5) from neuraminidase__InfluenzaA__AEX35233

SEQ ID NO: 213619 - RNA, 1410 nt, Artificial Sequence
  derived and/or modified CDS sequence (opt5) from neuraminidase__InfluenzaA__AEX35244
augaaccccaaucagaagaucauuaccaucggcagcgugucccugacaauuucuacgaucugcuucuuuaugcaaauugccauccucaucaacaccgucacacugcacuucaaacaguacgaguuuaauagcccuccgaacaaucagguuaugcuuugugaacccaccauuaucgagagaaacauuacagaaaucguguaucugaccaauacaaccauugagaaggaaaucugcccuaaacucgcugaguaccggaacugguccaagccccaguguaauauuacgggguucgccccuuuuucuaaagacaacagcauccgccuguccgcgggaggcgauaucugggugaccagagagcccuaugucucuugcgacccugauaaguguuaccaauucgcucuugggcagggaacaacccugaauaacgugcauagcaaugacacaguucacgaucggaccccguaucgcacgcuccugaugaacgaacugggcgugcccuuucaucucgggacaaagcaggucugcauugccugguccucuagcuccugucacgacggaaaagccuggcugcaugugugcguuaccggcgaugacaagaaugcuacagccagcuucaucuacaacggcagacuuguggauucuauugucuccuggagcaaaaagauccugcggacccaggagucugaaugugugugcauuaacgggaccuguacaguggucaugacggacggauccgcuagcggcaaagccgauaccaagauccucuuuaucgaggaggggaagauuguucacacauccacccugucuggaagcgcgcaacacguggaagagugcuccugcuauccucgcuaccccggcgugagaugugucugccgggacaauuggaaagggagcaaccgcccuaucguggauauuaauaucaaggacuacucuauuguuuccagcuauguguguucuggacuugucggcgacacaccccggaaaaacgauagcuccucuagcucccauugccuggacccgaauaacgaagagggcgggaauggagugaagggcugggccuucgaugacgggaacgauguuuggaugggaagaaccaucagcgaaaaacuccgcucuggcuacgagacguuuaaggugaucgaggggugguccaauccuaacagcaaacugcagauuaauagacaggucaucguggaccggggaaaccgcucuggcuauuccggcauuuucagcgucgaagggaaguccuguaucaauagaugcuuuuacguggagcugauucggggaagaaagcaggaaaacgagguucucuggacaucuaauagcaucguggucuucuguggcaccuccgggaccuauggaacaggcucuuggcccgauggggcugacauuaaccugaugccuguguga

SEQ ID NO: 213620 - RNA, 1410 nt, Artificial Sequence; identical to SEQ ID NO: 208001
  derived and/or modified CDS sequence (opt5) from neuraminidase__InfluenzaA__AEX35255

SEQ ID NO: 213621 - RNA, 1413 nt, Artificial Sequence; identical to SEQ ID NO: 213513
  derived and/or modified CDS sequence (opt5) from neuraminidase__InfluenzaA__AEX35266

SEQ ID NO: 213622 - RNA, 1413 nt, Artificial Sequence; identical to SEQ ID NO: 213513
  derived and/or modified CDS sequence (opt5) from neuraminidase__InfluenzaA__AEX35277

SEQ ID NO: 213623 - RNA, 1410 nt, Artificial Sequence
  derived and/or modified CDS sequence (opt5) from neuraminidase__InfluenzaA__AEX35288
augaaccccaaucagaagaucauuaccaucggcagcgugucccugacaauuucuacgaucugcuucuuuaugcaaauugccauccucaucaccacagucacccugcacuucaaacaguacgaguuuaacagcccuccgaauaaccagguuaugcuuugugaacccacaauuaucgagagaaauauuaccgaaaucguguaucugacaaacaccacgauugagaaggaaaucugcccuaaacucgcugaguaccggaauugguccaagccccagugugacauuaccggguucgccccuuuuucuaaagauaacagcauccgccuguccgcgggaggcgacaucugggugacaagagagcccuaugucucuugcgauccugacaaguguuaccaauucgcucuugggcagggaaccacacugaauaacgugcauagcaaugauaccguucacaaccggacgccguaucgcacacuccugaugaaugaacugggcgugcccuuucaucucgggaccaagcaggucugcauugccugguccucuagcuccugucacgacggaaaagccuggcugcaugugugcguuacaggcgaugacaagaacgcuaccgccagcuucaucuacaauggcagacuuguggauucuauugucuccuggagcaaaaagauccugcggacccaggagucugaaugugugugcauuaacgggacauguacgguggucaugaccgacggauccgcuagcggcaaagccgauacaaagauccucuuuaucgaggaggggaagauuguucacaccuccacacugucuggaagcgcgcaacacguggaagagugcuccugcuauccucgcuaccccggcgugagaugugucugccgggacaacuggaaagggagcaaucgcccuaucguggauauuaacaucaaggacuacucuauuguuuccagcuauguguguucuggacuugucggcgacacccccagaaagaaugauagcuccucuagcucccauugccuggacccgaacaaugaagagggcgggcacggagugaaaggcugggccuucgaugacgggaacgauguuuggaugggacggacgaucagcgaaaaacuccgcucuggcuacgagacauuuaaggugaucgaggggugguccaauccuaacagcaaacugcagauuaauagacaggucaucguggaccggggaaaccgcucuggcuauuccggcauuuucagcgucgaagggaaguccuguaucaauagaugcuuuuacguggagcugauucggggaagaaaggaagagaccgaaguucucuggaccucuaacagcaucguggucuucuguggcacauccgggaccuauggaacaggcucuuggcccgauggggcugacauuaaucugaugccuaucuga

SEQ ID NO: 213624 - RNA, 1410 nt, Artificial Sequence; identical to SEQ ID NO: 206786
  derived and/or modified CDS sequence (opt5) from neuraminidase__InfluenzaA__AEX35299

SEQ ID NO: 213625 - RNA, 1410 nt, Artificial Sequence
  derived and/or modified CDS sequence (opt5) from neuraminidase__InfluenzaA__AEX35310
augaaccccaaucagaagaucauuaccaucggcagcgugucccugacaauuucuacgaucugcuucuuuaugcaaauugccauccucaucaccacagucacccugcacuucaaacaguacgaguuuaacagcccuccgaauaaccagguuaugcuuugugaacccacaauuaucgagagaaauauuaccgaaaucguguaucugacaaacaccacgauugagaaggaaaucugcccuaaacucgcugaguaccggaauugguccaagccccaguguaacauuaccggguucgccccuuuuucuaaagacaauagcauccgccuguccgcgggaggcgauaucugggugacaagagagcccuaugucucuugcgacccugauaaguguuaccaauucgcucuugggcagggaaccacacugaacaaugugcauagcaacgacaccguucacgaucggacgccguaucgcacacuccugaugaaugaacugggcgugcccuuucaucucgggaccaagcaggucugcauugccugguccucuagcuccugucacgacggaaaagccuggcugcaugugugcguuacaggcgaugacgagaacgcuaccgccagcuucaucuacaauggcagacuuguggauucuauugucuccuggagcaagaaaauccugcggacccaggaaucugagugugugugcauuaacgggacauguacgguggucaugaccgacggauccgcuagcggcaaggccgauacaaaaauccucuuuaucgaggaagggaagauuguucacaccuccacacugucuggaagcgcgcaacacguggaggaaugcuccugcuauccucgcuaccccggcgugagaugugucugccgggacaacuggaaggggagcaaucgcccuaucguggauauuaacaucaaagacuacucuauuguuuccagcuauguguguucuggacuugucggcgacacccccagaaagaaugauagcuccucuagcucccauugccuggacccgaacaaugaggaaggcgggcacggagugaaaggcugggccuucgaugacggggaugacguuuggaugggacggacgaucagcgagaagcuccgcucuggcuacgagacauuuaaagugaucgaagggugguccaacccuaauagcaagcugcagauuaacagacaggucaucguggaucggggaaaucgcucuggcuauuccggcauuuucagcgucgaggggaaauccuguaucaacagaugcuuuuacguggaacugauucggggaagaaaucaggagaccgaaguucucuggaccucuaacagcaucguggucuucuguggcacauccgggaccuauggaacaggcucuuggcccgacggggcugauauuaaucugaugccuaucuga

SEQ ID NO: 213626 - RNA, 1410 nt, Artificial Sequence; identical to SEQ ID NO: 206786
  derived and/or modified CDS sequence (opt5) from neuraminidase__InfluenzaA__AEX35321

SEQ ID NO: 213627 - RNA, 1410 nt, Artificial Sequence; identical to SEQ ID NO: 208001
  derived and/or modified CDS sequence (opt5) from neuraminidase__InfluenzaA__AEX35332

SEQ ID NO: 213628 - RNA, 1410 nt, Artificial Sequence; identical to SEQ ID NO: 208001
  derived and/or modified CDS sequence (opt5) from neuraminidase__InfluenzaA__AEX35343

SEQ ID NO: 213629 - RNA, 1410 nt, Artificial Sequence
  derived and/or modified CDS sequence (opt5) from neuraminidase__InfluenzaA__AEX35354
augaaccccaaucagaagaucauuaccaucggcagcgugucccugacaauuucuacgaucugcuucuuuaugcaaauugccauccucaucaccacagucacccugcacuucaaacaguacgaguuuaacagcccuccgaauaaccagguuaugcuuugugaacccacaauuaucgagagaaauauuaccgaaaucguguaucugacaaacaccacgauugagaaggaaaucugcccuaaacucgcugaguaccggaauugguccaagccccagugugacauuaccggguucgccccuuuuucuaaagauaacagcauccgccuguccgcgggaggcgacaucugggugacaagagagcccuaugucucuugcgauccugacaaguguuaccaauucgcucuugggcagggaaccacacugaauaacgugcauagcaaugauaccguucacgaccggacgccguaucgcacacuccugaugaacgaacugggcgugcccuuucaucucgggaccaagcaggucugcauugccugguccucuagcuccugucacgauggaaaagccuggcugcaugugugcguuacaggcgacgauaagaaugcuaccgccagcuucaucuacaacggcagacuuguggacucuauugucuccuggagcaaaaagauccugcggacccaggagucugaaugugugugcauuaaugggacauguacgguggucaugaccgauggauccacaagcggcaaagcugacaccaagauccucuuuaucgaggaggggaagauuguucacacauccacccugucuggaagcgcccaacacguggaagagugcuccugcuauccucgcuaccccggcgugagaugugucugccgggauaacuggaaagggagcaaccgcccuaucguggacauuaauaucaaggacuacucuauuguuuccagcuauguguguucuggacuugucggcgauacgccccggaaaaacgacagcuccucuagcucccauugccuggauccgaauaacgaagagggcgggcacggagugaagggcugggcguucgacgaugggaaugacguuuggaugggaagaacaaucagcgaaaaacuccgcucuggcuacgagaccuuuaaggugaucgaggggugguccaacccuaauagcaaacugcagauuaacagacaggucaucguggaucggggaaaucgcucuggcuauuccggcauuuucagcgucgaagggaaguccuguaucaacagaugcuuuuacguggagcugauucggggaagaaaggaagagaccgaaguucucuggacaucuaauagcaucguggucuucuguggcaccuccgggacauauggaacgggcucuuggcccgacggggccgauauuaaccugaugccuaucuga

SEQ ID NO: 213630 - RNA, 1410 nt, Artificial Sequence; identical to SEQ ID NO: 206786
  derived and/or modified CDS sequence (opt5) from neuraminidase__InfluenzaA__AEX35365

SEQ ID NO: 213631 - RNA, 1410 nt, Artificial Sequence
  derived and/or modified CDS sequence (opt5) from neuraminidase__InfluenzaA__AEX35376
augaaccccaaucagaagaucauuaccaucggcagcgugucccugacaauuucuacgaucugcuucuuuaugcaaauugccauccucaucaccacagucacccugcacuucaaacaguacgaguuuaacagcccuccgaauaaccagguuaugcuuugugaacccacaauuaucgagagaaauauuaccgaaaucguguaucugacaaacaccacgauugagaaggaaaucugcccuaaacucgcugaguaccggaauugguccaagccccagugugacauuaccggguucgccccuuuuucuaaagauaacagcauccgccuguccgcgggaggcgacaucugggugacaagagagcccuaugucucuugcgauccugacaaguguuaccaauucgcucuugggcagggaaccacacugaauaacgugcauagcaaugauaccguucacgaacggacgccguaucgcacacuccugaugaacgagcugggcgugcccuuucaucucgggaccaagcaggucugcauugccugguccucuagcuccugucacgacggaaaagccuggcugcaugugugcguuacaggcgaugacaagaaugcuaccgccagcuucaucuacaacggcagacuuguggauucuauugucuccuggagcaaaaagauccugcggacccaggaaucugagugugugugcauuaaugggacauguacgguggucaugaccgacggauccgcuagcggcaaagccgauacaaagauccucuuuaucgaggaagggaagauuguucacaccuccacacugucuggaagcgcgcaacacguggaggaaugcuccugcuauccucgcuaccccggcgugagaugugucugccgggacaacuggaaagggagcaaccgcccuaucguggauauuaauaucaaggacuacucuauuguuuccagcuauguguguucuggacuugucggcgacacccccagaaagaacgauagcuccucuagcucccauugccuggacccgaauaacgaggaaggcgggcacggagugaaaggcugggccuucgaugacgggaaugauguuuggaugggacggacgaucagcgagaaacuccgcucuggcuacgagacauuuaaggugaucgaagggugguccaacccuaauagcaaacugcagauuaacagacaggucaucguggaccggggaaaucgcucuggcuauuccggcauuuucagcgucgaggggaaguccuguaucaacagaugcuuuuacguggaacugauucggggaagaaaggaggaaaccgagguucucuggaccucuaauagcaucguggucuucuguggcacauccgggaccuauggaacaggcucuuggcccgauggggcugacauuaaccugaugccuaucuga

SEQ ID NO: 213632 - RNA, 1410 nt, Artificial Sequence; identical to SEQ ID NO: 206786
  derived and/or modified CDS sequence (opt5) from neuraminidase__InfluenzaA__AEX35387

SEQ ID NO: 213633 - RNA, 1410 nt, Artificial Sequence
  derived and/or modified CDS sequence (opt5) from neuraminidase__InfluenzaA__AEX35398
augaaccccaaucagaagaucauuaccaucggcagcgugucccugacaauuucuacgaucugcuucuuuaugcaaauugccauccucaucaccacagucacccugcacuucaaacaguacgaguuuaacagcccuccgaauaaccagguuaugcuuugugaacccacaauuaucgagagaaauauuaccgaaaucguguaucugacaaacaccacgauugagaaggaaaucugcccuaaacucgcugaguaccggaauugguccaagccccagugugacauuaccggguucgccccuuuuucuaaagauaacagcauccgccuguccgcgggaggcgacaucugggugacaagagagcccuaugucucuugcgauccugacaaguguuaccaauucgcucuugggcagggaaccacacugaauaacgugcauagcaaugauaccguucacgaccggacgccguaucgcacacuccugaugaacgaacugggcgugcccuuucaucucgggaccaagcaggucugcauugccugguccucuagcuccugucacgauggaaaagccuggcugcaugugugcguuacaggcgacgauaagaaugcuaccgccagcuucaucuacaacggcagacuuguggacucuauugucuccuggagcaaaaagauccugcggacccaggagucugaaugugugugcauuaaugggacaugugcuguggucaugacggauggauccgccagcggcaaagcggacaccaagauccucuuuaucgaggaggggaagauuguucacacauccacccugucuggaagcgcccaacacguggaagagugcuccugcuauccucgcuaccccggcgugagaugugucugccgggauaacuggaaagggagcaaccgcccuaucguggacauuaauaucaaggacuacucuauuguuuccagcuauguguguucuggacuugucggcgauacaccccggaaaaacgacagcuccucuagcucccauugccuggauccgaauaacgaagagggcgggcacggagugaagggcugggcuuucgacgaugggaaugacguuuggaugggaagaaccaucagcgaaaaacuccgcucuggcuacgagacguuuaaggugaucgaggggugguccaacccuaauagcaaacugcagauuaacagacaggucaucguggaucggggaaaucgcucuggcuauuccggcauuuucagcgucgaagggaaguccuguaucaacagaugcuuuuacguggagcugauucggggaagaaaggaagagacagaaguucucuggaccucuaauagcaucguggucuucuguggcaccuccgggacauauggaaccggcucuuggcccgacggggccgauauuaaccugaugccuaucuga

SEQ ID NO: 213634 - RNA, 1410 nt, Artificial Sequence; identical to SEQ ID NO: 206786
  derived and/or modified CDS sequence (opt5) from neuraminidase__InfluenzaA__AEX35409

SEQ ID NO: 213635 - RNA, 1410 nt, Artificial Sequence; identical to SEQ ID NO: 213623
  derived and/or modified CDS sequence (opt5) from neuraminidase__InfluenzaA__AEX35420

SEQ ID NO: 213636 - RNA, 1410 nt, Artificial Sequence
  derived and/or modified CDS sequence (opt5) from neuraminidase__InfluenzaA__AEX35431
augaaccccaaucagaagaucauuaccaucggcagcgugucccugacaauuucuacgaucugcuucuuuaugcaaauugccauccucaucaccacagucacccugcacuucaaacaguacgaguuuaacagcccuccgaauaaccagguuaugcuuugugaacccacaauuaucgagagaaauauuaccgaaaucguguaucugacaaacaccacgauugagaaggaaaucugcccuaaacucgcugaguaccggaauugguccaagccccaguguaacauuaccggguucgccccuuuuucuaaagacaauagcauccgccuguccgcgggaggcgauaucugggugacaagagagcccuaugucucuugcgacccugauaaguguuaccaauucgcucuugggcagggaaccacacugaacaaugugcauagcaacgacaccguucacgaucggacgccguaucgcacacuccugaugaaugaacugggcgugcccuuucaucucgggaccaagcaggucugcauugccugguccucuagcuccugucacgacggaaaagccuggcugcaugugugcguuacaggcgaugacgagaacgcuaccgccagcuucaucuacaauggcagacuuguggauucuauugucuccuggagcaagaaaauccugcggacccaggaaucugagugugugugcauuaacgggacauguacgguggucaugaccgacggauccgcuagcggcaaggccgauacaaaaauccucuuuaucgaggaagggaagauuguucacaccuccacacugucuggaagcgcgcaacacguggaggaaugcuccugcuauccucgcuaccccggcgugagaugugucugccgggacaacuggaaggggagcaaucgcccuaucguggauauuaacaucaaagacuacucuauuguuuccagcuauguguguucuggacuugucggcgacacccccagaaagaaugauagcuccucuagcucccauugccuggacccgaacaaugaggaaggcgggcacggagugaaaggcugggccuucgaugacgggaacgauguuuggaugggacggacgaucagcgagaagcuccgcucuggcuacgagacauuuaaagugaucgaagggugguccaauccuaacagcaagcugcagauuaauagacaggucaucguggaccggggaaaccgcucuggcuauuccggcauuuucagcgucgaggggaaauccuguaucaauagaugcuuuuacguggaacugauucggggaagaaagaaggagaccgaaguucucuggaccucuaacagcaucguggucuucuguggcacauccgggaccuauggaacaggcucuuggcccgauggggcugacauuaaucugaugccuaucuga

SEQ ID NO: 213637 - RNA, 1410 nt, Artificial Sequence; identical to SEQ ID NO: 206784
  derived and/or modified CDS sequence (opt5) from neuraminidase__InfluenzaA__AEX35453

SEQ ID NO: 213638 - RNA, 1410 nt, Artificial Sequence; identical to SEQ ID NO: 206784
  derived and/or modified CDS sequence (opt5) from neuraminidase__InfluenzaA__AEX35464

SEQ ID NO: 213639 - RNA, 1410 nt, Artificial Sequence; identical to SEQ ID NO: 206784
  derived and/or modified CDS sequence (opt5) from neuraminidase__InfluenzaA__AEX35475

SEQ ID NO: 213640 - RNA, 1410 nt, Artificial Sequence; identical to SEQ ID NO: 206784
  derived and/or modified CDS sequence (opt5) from neuraminidase__InfluenzaA__AEX35486

SEQ ID NO: 213641 - RNA, 1410 nt, Artificial Sequence
  derived and/or modified CDS sequence (opt5) from neuraminidase__InfluenzaA__AEX35497
augaaccccaaucagaagaucauuaccaucggcagcgugucccugacaauuucuacgaucugcuucuuuaugcaaauugccauccucaucaccacagucacccugcacuucaaacaguacgaguuuaacagcccuccgaauaaccagguuaugcuuugugaacccacaauuaucgagagaaauauuaccgaaaucguguaucugacaaacaccacgauugagaaggaaaaaugcccuaagcucgcugaguaccggaauugguccaaaccccaguguaacaucaccggguucgccccuuuuucuaaggacaauagcauucgccuguccgcgggaggcgauaucugggugacaagagagcccuaugucucuugcgacccugauaaguguuaccaauucgcucuugggcagggaaccacacugaacaaugugcauagcaacgacaccguucacgaucggacgccguaucgcacacuccugaugaaugaacugggcgugcccuuucaucucgggaccaaacaggucugcaucgccugguccucuagcuccugucacgacggaaaggccuggcugcaugugugcguuacaggcgaugacaaaaacgcuaccgccagcuucauuuacaauggcagacuuguggauucuaucgucuccuggagcaaggagauucugcggacccaggaaucugagugugugugcaucaacgggacauguacgguggucaugaccgacggauccgcuagcggcaaagccgauacaaagauucucuuuaucgaggaagggaagaucguucacaccuccacacugucuggaagcgcgcaacacguggaggaaugcuccugcuauccucgcuaccccggcgugagaugugucugccgggacaacuggaaagggagcaaucgcccuauuguggauaucaacauuaaggacuacucuaucguuuccagcuauguguguucuggacuugucggcgacacccccagaaagaaugauagcuccucuagcucccauugccuggacccgaacaaugaggaaggcgggcacggagugaaaggcugggccuucgaugacgggaacgauguuuggaugggacggacgauuagcgagaaacuccgcucuggcuacgagacauuuaaggugaucgaagggugguccaauccuaacagcaaacugcagaucaauagacaggucauuguggaccggggaaaccgcucuggcuauuccggcaucuucagcgucgaggggaaguccuguauuaauagaugcuuuuacguggaacugauccggggaagaaaggaggaaaccgagguucucuggaccucuaacagcauuguggucuucuguggcacauccgggaccuauggaacaggcucuuggcccgauggggcugacaucaaucugaugccuauuuga

SEQ ID NO: 213642 - RNA, 1410 nt, Artificial Sequence; identical to SEQ ID NO: 206784
  derived and/or modified CDS sequence (opt5) from neuraminidase__InfluenzaA__AEX35508

SEQ ID NO: 213643 - RNA, 1410 nt, Artificial Sequence; identical to SEQ ID NO: 213641
  derived and/or modified CDS sequence (opt5) from neuraminidase__InfluenzaA__AEX35519

SEQ ID NO: 213644 - RNA, 1410 nt, Artificial Sequence
  derived and/or modified CDS sequence (opt5) from neuraminidase__InfluenzaA__AEX35530
augaaccccaaucagaagaucauuaccaucggcagcgugucccugacaauuucuacgaucugcuucuuuaugcaaauugccauccucaucaccacagucacccugcacuucaaacaguacgaguuuaacagcccuccgaauaaccagguuaugcagugugaacccacaauuaucgagagaaauauuaccgaaaucguguaucuuacaaacaccacgauugagaaggaaaucugcccuaaacuggcugaguaccggaauugguccaagccccaaugugacauuaccggguucgccccuuuuucuaaagauaacagcauccgccucuccgcgggaggcgacaucugggugacaagagagcccuaugucucuugcgauccugacaaguguuaccaguucgcucuggggcagggaaccacacuuaauaacgugcauagcaaugauaccguucacgaccggacgccguaucgcacacugcucaugaacgaacugggcgugcccuuucaucuggggaccaagcaggucugcauugccugguccucuagcuccugucacgauggaaaagccuggcuccaugugugcguuacaggcgacgauaagaaugcuaccgccagcuucaucuacaacggcagacugguggacucuauugucuccuggagcaaagagauccuucggacccaagaaucugagugugugugcauuaaugggacauguacgguggucaugaccgauggauccgcuagcggcaaggccgacacaaaaauccuguuuaucgaggaagggaagauuguucacaccuccacacucucuggaagcgcgcagcacguggaggaaugcuccugcuauccucgcuaccccggcgugagaugugucugccgggauaacuggaaggggagcaaccgcccuaucguggacauuaauaccaaagacuacucuaucguuuccagcuauguguguucuggacuggucggcgauacgcccagaaagaacgacagcuccucuagcucccauugccuuaauccgaacaaugaggaaggcgggcacggagugaaaggcugggccuucgaugacgggaacgauguuuggaugggacggacaauuagcgagaagcugcgccucggcuacgagaccuuuaaagugaucgaaggguggucuaauccuaacuccaagcugcagaucaauagacaggucauuguggaccggggaaaccgcagcggcuauucuggcaucuucuccgucgaggggaaaagcuguauuaauagaugcuuuuacguggaacugauccggggaagaaaggaggaaaccgagguucucuggacauccaacucuauuguggucuucuguggcaccagcgggacauauggaacgggcuccuggcccgauggggcugacaucaaucugaugccuauuuga

SEQ ID NO: 213645 - RNA, 1410 nt, Artificial Sequence; identical to SEQ ID NO: 206784
  derived and/or modified CDS sequence (opt5) from neuraminidase__InfluenzaA__AEX35541

SEQ ID NO: 213646 - RNA, 1410 nt, Artificial Sequence
  derived and/or modified CDS sequence (opt5) from neuraminidase__InfluenzaA__AEX35552
augaaccccaaucagaagaucauuaccaucggcagcgccucccugacaauuucuacgaucugcuucuuuaugcaaauugcuauccucaucaccacagugacccugcacuucaaacaguacgaguuuaacccuccgcccaauaaccaggccaugcuuugugaaccuacaauuaucgagagaaauauuaccgaaaucgucuaucugacaaacaccacgauugagaaggaaaucugccccaaacucgcggaguaccggaauuggagcaagccucagugugacauuaccggguucgcucccuuuuccaaagauaacucuauccgccugagcgccggaggcgacaucuggguuacaagagagccuuauguguccugcgauccggacaaguguuaccaauucgcccuugggcagggaaccacacugaauaacgugcauucuaaugauaccguccacgaccggacgcccuaucgcacacuccugaugaacgaacugggcgugccuuuucaucucgggaccaagcagguuugcauugcuuggagcuccagcucuugucacgauggaaaagccuggcugcaugugugcgucacaggcgacgauaagaaugcuaccgccuccuucaucuacaacggcagacuuguggacagcauuguuucuugguccaaagagauccugcggacccaggaaagcgagugugugugcauuaaugggacauguacggucgugaugaccgauggaucugcguccggcaaggccgacacaaaaauccucuuuaucgaggaagggaagauugugcacaccagcacacuguccggaucugcucaacacgucgaggaaugcagcugcuauccccgcuacccuggcguuagaugugugugccgggauaacuggaagggguccaaccgccccaucguggacauuaauaucaaagacuacagcauugccucuuccuaugucuguagcggacuugugggcgauaccccgagaaagaacgacucuagcuccucuagccauugccuggauccuaauaacgaggaaggcgggcacggaguuaaaggcugggcuuucgacgaugggaaugacguguggaugggacggacgaucuccgagaagcuccgcagcggcuacgagacauuuaaagucaucgaaggguggucuaaccccaauuccaagcugcagauuaacagacaggugaucguugaucggggaaaucgcagcggcuauucuggcauuuucuccguggaggggaaaagcuguaucaacagaugcuuuuacgucgaacugauucggggaagaaaggaggaaaccgaggugcucuggaccuccaauucuaucgucguguucuguggcacaagcgggaccuauggaacaggcuccuggccugacggggccgauauuaaccugaugcccaucuga

SEQ ID NO: 213647 - RNA, 1410 nt, Artificial Sequence
  derived and/or modified CDS sequence (opt5) from neuraminidase__InfluenzaA__AEX35563
augaaccccaaucagaagaucauuaccaucggcagcgugucccugacaauuucuacgaucugcuucuuuaugcaaauugccauccucaucaccacagucacccugcacuucaaacaguacgaguuuaacagcccuccgaauaaccagguuaugcuuugugaacccacaauuaucgagagaaauauuaccgaaaucguguaucugacaaacaccacgauugagaaggaaaucugcccuaaacucgcugaguaccggaauugguccaagccccagugugacauuaccggguucgccccuuuuucuaaagauaacagcauccgccuguccgcgggaggcgacaucugggugacaagagagcccuaugucucuugcgauccugacaaguguuaccaauucgcucuugggcagggaaccacacugaauaacgugcauagcaaugauaccguucacgaccggacgccguaucgcacacuccugaugaacgaacugggcgugcccuuucaucucgggaccaagcaggucugcauugccugguccucuagcuccugucacgauggaaaagccuggcugcaugugugcguuacaggcgacgauaagaaugcuaccgccagcuucaucuacaacggcagacuuguggacucuauugucuccuggagcaaagagauccugcggacccaggaaucugagugugugugcauuaaugggacauguacgguggucaugaccgauggauccgcuagcggcaaggccgacacaaaaauccucuuuaucgaggaagggaagauuguucacaccuccacacugucuggaagcgcgcaacacguggaggaaugcuccugcuauccucgcuaccccggcgugagaugugucugccgggauaacuggaaggggagcaaccgcccuaucguggacauuaauaucaaagacuacucuauuguuuccagcuauguguguucuggacuugucggcgauacccccagaaagaacgacagcuccucuagcucccauugccugaauccgaacaaugaggaaggcgggcacggagugaaaggcugggccuucgaugacgggaacgauguuuggaugggacggacgaucagcgagaagcuccgccugggcuacgagacauuuaaagugaucgaaggguggucuaauccuaacuccaagcugcagauuaauagacaggucaucguggaccggggaaaccgcagcggcuauucuggcauuuucuccgucgaggggaaaagcuguaucaauagaugcuuuuacguggaacucauucggggaagaaaggaggaaaccgagguucuguggaccuccaacucuaucguggucuucuguggcacaagcgggaccuauggaacaggcuccuggcccgauggggcugacauuaaucuuaugccuaucuga

SEQ ID NO: 213648 - RNA, 1410 nt, Artificial Sequence; identical to SEQ ID NO: 213528
  derived and/or modified CDS sequence (opt5) from neuraminidase__InfluenzaA__AEX35585

SEQ ID NO: 213649 - RNA, 1410 nt, Artificial Sequence
  derived and/or modified CDS sequence (opt5) from neuraminidase__InfluenzaA__AEX35596
augaaccccaaucagaagaucauuaccaucggcagcgugucccugacaauuucuacgaucugcuucuuuaugcaaauugccauccucaucaccacagucacccugcacuucaaacaguacgaguuuaacagcccuccgaauaaccagguuaugcuuugugaacccacaauuaucgagagaaauauuaccgaaaucguguaucugacaaacaccacgauugagaaggaaaucugcccuaaacucgcugaguaccggaauugguccaagccccaguguaacauuaccggguucgccccuuuuucuaaagacaauagcauccgccuguccgcgggaggcgauaucugggugacaagagagcccuaugucucuugcgacccugauaaguguuaccaauucgcucuugggcagggaaccacacugaacaaugugcauagcaacgacaccguucacgaucggacgccguaucgcacacuccugaugaaugaacugggcgugcccuuucaucucgggaccaagcaggucugcauugccugguccucuagcuccugucacgacggaaaagccuggcugcaugugugcguuacaggcgaugacaagaacgcuaccgccagcuucaucuacaauggcagacuuguggauucuauugucuccuggagcaaagagauccugcggacccaggaaucugagugugugugcauuaacgggacauguacgguggucaugaccgacggauccgcuagcggcaaggccgauacaaaaauccucuuuaucgaggaagggaagauuguucacaccuccacacugucuggaagcgcgcaacacguggaggaaugcuccugcuauccucgcuaccccggcgugagaugugucugccgggacaacuggaaggggagcaaucgcccuaucguggauauuaacaucaaagacuacucuauuguuuccagcuauguguguucuggacuugucggcgacacccccagaaagaaugauagcuccucuagcucccauugccuggacccgaacaaugaggaaggcgggcacggagugaaaggcugggccuucgaugacgggaacgauguuuggaugggacggacgaucagcgagaagcuccgcucuggcuacgagacauuuaaagugaucgaagggugguccaauccugacagcaagcugcagauuaacagacaggucaucguggaucggggaaaucgcucuggcuauuccggcauuuucagcgucgaggggaaauccuguaucaacagaugcuuuuacguggaacugauucggggaagaaaggaggaaaccgagguucucuggaccucuaauagcaucguggucuucuguggcacauccgggaccuauggaacaggcucuuggcccgacggggcugauauuaaccugaugccuaucuga

SEQ ID NO: 213650 - RNA, 1410 nt, Artificial Sequence; identical to SEQ ID NO: 206784
  derived and/or modified CDS sequence (opt5) from neuraminidase__InfluenzaA__AEX35607

SEQ ID NO: 213651 - RNA, 1410 nt, Artificial Sequence
  derived and/or modified CDS sequence (opt5) from neuraminidase__InfluenzaA__AEX35618
augaaccccaaucagaagaucauuaccaucggcagcgugucccugacaauuucuacgaucugcuucuuuaugcaaauugccauccucaucaccacagucacccugcacuucaaacaguacgagcuuaacagcccuccgaauaaccagguuaugcugugugaacccacaauuaucgagagaaauauuaccgaaaucguguaucucacaaacaccacgauugagaaggaaaccugcccuaaacuggcugaguaccggaauugguccaagccccaguguuauaucacaggguuugccccuuucucuaaagacaacagcauucgccuuuccgcgggaggcgauaucugggugaccagagagcccuacgucucuugcgacccugauaaguguuaucaauuugcucuggggcagggaacaacccucaauaacgugcauagcaaugacacgguucgggaucgcacaccguacagaacccugcugaugaacgaacucggcgugcccuuccaccuggggacaaagcaggucugcaucgccugguccucuagcuccugucaugacggaaaagccuggcuucacgugugcauuaccggcgaugacaagaaugcuaccgccagcuuuaucuauaacggccggcugguugauucuauuguguccuggagcaaagagauccuccgcacacaggaaucugagugugucugcauuaaugggacguguaccguggugaugacagacggauccgcuagcggcaaggccgauaccaaaauccuguucaucgaggaagggaagauuguccauacauccacccuuucuggaagcgcgcaacacguugaggaaugcuccugcuacccuagauaccccggcgugcggugugugugccgcgacaacuggaaggggagcaacagaccuaucgucgauauuaauaucaaagaccacucuauuguguccagcuauguuuguucuggacuggugggcgacacgccccggaagaacgauagcuccucuagcucccauugccucgacccgaauaacgaggaaggcgggcacggagucaaaggcugggccuuugaugacgggaaugauguguggaugggacgcacaaucagcgagaagucuagacugggcuacgagaccuucaaaguuaucgaagggugguccaacccuaagagcaaacugcagauuaaucgccaggugaucgucgaccgggauaacagaucuggauauuccggcauuuuuagcguggagggcaaguccuguaucaaucggugcuucuacgucgaacucauuagagggcgcaaggaggaaaccgaggugcuguggacaucuaacagcaucguuguguuuuguggaaccuccggcacauaugggacgggaucuuggcccgacggcgcugauauuaaucuuaugccuaucuga

SEQ ID NO: 213652 - RNA, 1410 nt, Artificial Sequence
  derived and/or modified CDS sequence (opt5) from neuraminidase__InfluenzaA__AEX35640
augaaccccaaucagaagaucauuaccaucggcagcgugucccugacaauuucuacgaucugcuucuuuaugcaaauugccauccucaucaccacagucacccugcacuucaaacaguacgaguuuaacagcccuccgaauaaccagguuaugcuuugugaacccacaauuaucgagagaaauauuaccgaaaucguguaucugacaaacaccacgauugagaaggaaaucugcccuaaacucgcugaguaccggaagugguccaaaccccaguguaauauuaccggguucgccccuuuuucuaaggacaacagcauccgccuguccgcgggaggcgauaucugggugacaagagagcccuaugucucuugcgacccugauaaguguuaccaauucgcucuugggcagggaaccacacugaauaacgugcauagcaaugacaccguucgggaucgcacgccguauagaacacuccugaugaacgaacugggcgugcccuuucaccucgggaccaaacaggucugcauugccugguccagcagcuccugucaugacggaaaggccuggcugcacgugugcguuacaggcgauaauaaaaacgcuaccgccagcuucaucuacaauggccggcuuguggacucuauugucuccuggagcaaggagauccugcgcacccaggaaucugagugugugugcauuaacgggacauguacgguggucaugaccgauggauccgcuagcggcaaagccgacacaaagauccucuuuaucgaggaagggaagauuguucauaccuccacacugucuggaagcgcgcaacacguggaggaaugcuccugcuauccuagauaccccggcgugcggugugucugccgcgauaacuggagagggagcaaucggccuaucguggacauuaacaugaaagauuacucuaucguuuccagcuauguguguucuggacuugucggcgacacgccccgcaagaaugacagcuccucuagcggccacugccuggauccgaacgacgaggaagggggacauggcgugaaagggugggccuucgaugacggaaaugauguuuggaugggcagaaccauuuccgagaagucucggucuggguacgagacauuuaaagugaucgaaggaugguccaacccuaauagcaagcuccagaucaaccgccaggucauuguggacagaggcaaucggucuggcuauuccgggaucuucagcgucgagggaaaauccuguauuaacagaugcuuuuacguggaacugauccgcggccggaaggaggaaaccgagguucuguggaccucuaauagcauuguggucuucugugggacauccggaaccuauggcacagggucuuggcccgauggcgcugacaucaaccucaugccuauuuga

SEQ ID NO: 213653 - RNA, 1410 nt, Artificial Sequence
  derived and/or modified CDS sequence (opt5) from neuraminidase__InfluenzaA__AEX35651
augaaccccaaucagaagaucauuaccaucggcagcgugucccugacaauuucuacgaucugcuucuuuaugcaaauugccauccucaucaccacagucacccugcacuucaaacaguacgaguuuaacagcccuccgaauaaccagguuaugcuuugugaacccacaauuaucgagagaaauauuaccgaaaucguguaucugacaaacaccacgauugagaaggaaaucugcccuaaacucgcugaguaccggaauugguccaagccccagugugacauuaccggguucgccccuuuuucuaaagauaacagcauccgccuguccgcgggaggcgacaucugggugacaagagagcccuaugucucuugcgauccugacaaguguuaccaauucgcucuugggcagggaaccacacugaauaacgugcauagcaaugauaccguucgggaccgcacgccguauagaacacuccugaugaacgaacugggcgugcccuuucaccucgggaccaagcaggucugcauugccugguccucuagcuccugucaugauggaaaagccuggcugcacgugugcaucacaggcgacgauaagaaugcuaccgccagcuucauuuacaacggccggcuuguugacucuguggucuccuggagcaaagagauccugcgcacccaggaaucugagugugugugcauuaaugggacauguacgguggucaugaccgauggauccgcuagcggcaaggccgacacaaaaauccucuuuaucgaggaagggaagauuguucauaccuccacacugucuggaagcgcgcaacacguggaggaaugcuccugcuauccuagauaccccggcgugcggugugucugccgcgauaacuggaaggggagcaacagaccuaucguggacauuaauaucaaagaccacucuauuguuuccagcuacguguguucuggacuugucggcgauacgccccggaagaacgacagcuccucuagcucccauugccuggauccgaauaacgaggaaggcgggcacggagugaaaggcugggccuucgacgaugggaaugacguuuggaugggacgcaccaucagcgagaagucuagacucggcuaugagacauuuaaagugaucgaagggugguccaacccuaagagcaaacugcagauuaaucggcaggucaucguggaucgcggaaacagaucuggcuacuccggcauuuucagcgucgaggacaaguccuguaucaaucggugcuuuuauguggaacugauuagagggcgcaaggaggaaaccgagguucucuggaccucuaacagcaucguggucuucuguggaacauccggcaccuacgggacaggaucuuggcccgauggcgcugacauuaaucugaugccuaucuga

SEQ ID NO: 213654 - RNA, 1410 nt, Artificial Sequence; identical to SEQ ID NO: 207956
  derived and/or modified CDS sequence (opt5) from neuraminidase__InfluenzaA__AEX36105

SEQ ID NO: 213655 - RNA, 1410 nt, Artificial Sequence
  derived and/or modified CDS sequence (opt5) from neuraminidase__InfluenzaA__AEX36116
augaaccccaaucagaagaucauuaccaucggcagcgugucccugacaauuucuacgaucugcuucuuuaugcaaauugccauccucaucaccacagucacccugcacuucaaacaguacgaguuuaacagcccuccgaauaaccagguuaugcuuugugaacccacaauuaucgagagaaauauuaccgaaaucguguaucugacaaacaccacgauugagaaggaaaucugcccuaaacucgcugaguaccggaauugguccaagccccagugugacauuaccggguucgccccuuuuucuaaagauaacagcauccgccuguccgcgggaggcgacaucugggugacaagagagcccuaugucucuugcgauccugacaaguguuaccaauucgcucuugggcagggaaccacacugaauaacgugcauagcaaugauaccguucggaaccgcacgccguauagaacacuccugaugaaugaacugggcgugcccuuucaccucgggaccaagcaggucugcauugccugguccucuagcuccugucaugacggaaaagccuggcugcacgugugcaucacaggcgaugacaagaacgcuaccgccagcuucauuuacaauggccggcuuguugauucuaucguguccuggagcaaagagauucugcgcacccaggaaucugagugugucugcaucaacgggacauguacgguggugaugaccgacggauccgcuagcggcgaggccgauacaaagauccucuuuauugaagaggggaaaaucguccauaccuccacacugucuggaagcgcgcaacacguugaagagugcuccugcuauccuagauaccccggcgugcggugugugugccgcgacaacuggaaggggagcaauagaccuauugucgauaucaacauuaaggaccacucuaucguguccagcuacguuuguucuggacuugugggcgacacgccccggaaaaaugauagcuccucuagcucccauugccuggacccgaacaaugaagagggcgggcacggagucaagggcugggccuucgaugacgggaacgauguguggaugggacgcaccaucagcgagaaaucuagacucggcuaugaaacauuuaagguuauugaggggugguccaauccuaaaagcaagcugcagaucaaccgccaggugauugucgaccggggaaauagaucuggcuacuccggcaucuucagcguggaagggaaauccuguauuaaccggugcuuuuaugucgagcugaucagaggacgcaaggaagagaccgaggugcucuggaccucuaauagcauuguuguguucuguggcacauccgggaccuacggaacaggcucuuggcccgauggggcugacaucaaccugaugccuaucuga

SEQ ID NO: 213656 - RNA, 1410 nt, Artificial Sequence
  derived and/or modified CDS sequence (opt5) from neuraminidase__InfluenzaA__AEX36127
augaaccccaaucagaagaucauuaccaucggcagcgugucccugacaauuucuacgaucugcuucuuuaugcaaauugccauccucaucaccacagucacccugcacuucaaacaguacgaguuuaacagcccuccgaauaaccagguuaugcuuugugaacccacaauuaucgagagaaauauuaccgaaaucguguaucugacaaacaccacgauugagaaggaaaucugcccuaaacucgcugaguaccggaauuggcugaagccccagugugacauuaccggguucgccccuuuuuccaaagauaacucuauccgccuuagcgcgggaggcgacaucugggugacaagagagcccuaugucuccugcgauccugacaaguguuaccaauucgcucuggggcagggaaccacacucaauaacgugcauucuaaugauaccguucgggaccgcacgccguauagaacacugcugaugaacgaacucggcgugcccuuucaccuggggaccaagcaggucugcauugccuggagcuccagcucuugucaugauggaaaagccuggcuucacgugugcaucacaggcgacgauaagaaugcuaccgccuccuucauuuacaacggccggcugguugacagcguggucucuugguccaaagagauccuccgcacccaggaaagcgagugugugugcauuaaugggacauguacgguggucaugaccgauggaucugcuuccggcaaggccgacacaaaaauccuguuuaucgaggaagggaagauuguucauaccagcacacuuuccggaucugcgcaacacguggaggaaugcagcugcuauccuagauaccccggcgugcggugugucugccgcgauaacuggaagggguccaacagaccuaucguggacauuaauaucaaagaccacagcauuguuucuuccuacguguguagcggacuggucggcgauacgccccggaagaacgacucuagcuccucuagccauugccucgauccgaauaacgaggaaggcgggcacggagugaaaggcugggccuucgacgauggggacgauguuuggaugggacgcaccaucuccgaaaagagcagacugggcuaugagacauuuaaagugaucgagggguggucuaauccuaaguccaaacugcagauuaaccggcaggucaucguggaccgcggaaauagaagcggcuacucuggcauuuucuccgucgagggaaagagcuguaucaaccggugcuuuuauguggaacucauuagagggcgcaaggaggaaaccgagguucuguggaccuccaauucuaucguggucuucuguggcacaagcgggaccuacggaacaggcuccuggcccgauggggcugacauuaaccuuaugccuaucuga

SEQ ID NO: 213657 - RNA, 1410 nt, Artificial Sequence
  derived and/or modified CDS sequence (opt5) from neuraminidase__InfluenzaA__AEX36149
augaaccccaaucagaagaucauuaccaucggcagcgugucccugacaauuucuacgaucugcuucuuuaugcaaauugccauccucaucaccacagucacccugcacuucaaacaguacgaguuuaacagcccuccgaauaaccagguuaugcuuugugaacccacaauuaucgagagaaauauuaccgaaaucguguaucugacaaacaccacgauugagaaggaaaucugcccuaaacucgcugaguaccggaauugguccaagccccagugugacauuaccggguucgccccuuuuucuaaagauaacagcauccgccuguccgcgggaggcgacaucugggugacaagagagcccuaugucucuugcgauccugacaaguguuaccaauucgcucuugggcagggaaccacacugaauaacgugcauagcaaugauaccguucgggaccgcacgccguauagaacacuccugaugaacgaacugggcgugcccuuucaccucgggaccaagcaggucugcauugccugguccucuagcuccugucaugauggaaaagccuggcugcacgugugcaucacaggcgacgauaagaaugcuaccgccagcuucauuuacaacggccggcuuguugacucuguggucuccuggagcaaagagauccugcgcacccaggaaucugagugugugugcauuaaugggacauguacgguggucaugaccgauggauccgcuagcggcaaggccgacacaaaaauccucuuuaucgaggaagggaagauuguucauaccuccacacugucuggaagcgcgcaacacguggaggaaugcuccugcuauccuagauaccccggcgugcggugugucugccgcgauaacuggaaggggagcaacagaccuaucguggacauuaauaucaaagaccacucuauuguuuccagcuacguguguucuggacuugucggcgauacgccccggaagaacgacagcuccucuagcucccauugccuggauccgaauaacgaggaaggcgggcacggagugaaaggcugggccuucgacgaugggaaugacguuuggaugggacgcaccaucagcgagaagucuagacucggcuaugagacauuuaaagugaucgaagggugguccaacccuaagagcaaacugcagauuaaucggcaggucaucguggaucgcggaaacagaucuggcuacuccggcauuuucagcgucgaggacaaguccuguaucaaucggugcuuuuauguggaacugauuagagggcgcaaggaggaaaccgagguucucuggaccacaaacucuaucguggucuucuguggaaccagcggcacauacgggacgggauccuggcccgauggcgcugacauuaaucugaugccuaucuga

SEQ ID NO: 213658 - RNA, 1410 nt, Artificial Sequence; identical to SEQ ID NO: 208584
  derived and/or modified CDS sequence (opt5) from neuraminidase__InfluenzaA__AEX36160

SEQ ID NO: 213659 - RNA, 1410 nt, Artificial Sequence
  derived and/or modified CDS sequence (opt5) from neuraminidase__InfluenzaA__AEX36171
augaaccccaaucagaagaucauuaccaucggcagcgugucccugacaauuucuacgaucugcuucuuuaugcaaauugccauccucaucaccacagucacccugcacuucaaacaguacgaguuuagcuccccuccgaacaaucagguuaugcuuugugaacccacaauuaucgagagaaacauuaccgaaaucguguaucugacaaauaccacgauugagaaggaaaucugcccuaaacucgcugaguaccggaacuggucuaagccccagugugacauuaccggguucgccccuuuuagcaaagauaauuccauccgccugucugcgggaggcgacaucugggugacaagagagcccuaugucagcugcgauccugacaaguguuaccaauucgcucuugggcagggaaccacacugaacaaugugcauuccaacgauaccguucacaaucggacgccguaucgcacacuccugaugaacgaacugggcgugcccuuucaucucgggaccaagcaggucugcauugccuggucuagcuccagcugucacgacggaaaagccuggcugcaugugugcguuacaggcgaugacaagaaugcuaccgccucuuucaucuacaacggcagacuuguggauuccauugucagcuggucuaaagagauccugcggacccaggaauccgagugugugugcauuaaugggacaugugcuguggucaugacggacggaagcgccuccggcaaggcggauaccaaaauccucuuuaucgaggaagggaagauuguucacacaucuacccugagcggauccgcccaacacguggaggaaugcagcugcuauccucgcuaccccggcgugagaugugucugccgggacaacuggaaggggucuaaccgcccuaucguggauauuaauaucaaagacuacuccauuguuagcagauauguguguucuggacuugucggcgacacaccccggaagaacgauagcuccucuagcucccauugccuggacccgaauaacgaggaaggcgggcacggagugaaaggcugggcuuucgaugacggggaugacguuuggaugggacgcaccaucagcgagaagucuagauccggcuacgagacguuuaaagugaucgaaggguggagcaauccuaacucuaagcuccagauuaaucggcaggucaucguggaucgcggaaacagauccggcuauagcggcauuuucuccgucgaggggaaaucuuguaucaaucggugcuuuuacguggaacugauuagaggacgcaaggaggaaacagagguucuguggaccagcaacuccaucguggucuucuguggcaccucugggacauauggaaccggcagcuggcccgacggggccgauauuaaucucaugccuaucuga

SEQ ID NO: 213660 - RNA, 1410 nt, Artificial Sequence
  derived and/or modified CDS sequence (opt5) from neuraminidase__InfluenzaA__AEX36193
augaaccccaaucagaagaucauuaccaucggcagcgugucccugacaauuucuacgaucugcuucuuuaugcaaauugccauccucaucaccacagucacccugcacuucaaacaguacgaguuuaacagcuccccuaauaaccagguuaugcuuugugaaccgacaauuaucgagagaaauauuaccgaaaucguguaucugacaaacaccacgauugagaaggaaaucugccccaaacucgcugaguaccggaauuggucuaagccucagugugacauuaccggguucgcccccuuuagcaaagauaacuccauccgccugucugcgggaggcgacaucugggugacaagagagccuuaugucagcugcgaucccgacaaguguuaccaauucgcucuugggcagggaaccacacugaauaacgugcauuccaauaacaccguucgggaucgcacgccuuauagaacacuccugaugaaugaacugggcgugccguuucaccucgggaccaagcaggucugcauugccuggucuagcuccagcugucaugacggaaaagccuggcugcacgugugcaucacaggcgaugacaagaacgcuaccgccucuuucauuuacaauggcaugcuuguugauuccaucgugagcuggucuaaagagauucugcggacccaggaauccgagugugucugcaucaacgggacauguacgguggugaugaccgacggaagcgcuuccggcaaggccgauacaaaaauccucuuuauugaggaagggaagaucguccauaccucuacacugagcggauccgcgcaacacguugaggaaugcagcugcuauccccgcuacccuggcgugagaugugugugccgggacaacuggaaggggucuaaucgccccauugucgauaucaacauuaaagaccacuccaucgugagcucuuacguuuguagcggacuugugggcgacaccccuagaaagaaugauuccucuagcuccagccauugccuggaccccaacaaugaggaaggcgggcacggagucaaaggcugggccuucgaugacgggaacgauguguggaugggacggacgaucucugagaagucccgccucggcuaugagacauuuaaaguuauugaaggguggagcaauccgaagucuaaacugcagaucaacagacaggugauugucgaccggggaaaucgcuccggcuacagcggcaucuucuccguggaggggaagucuuguauuaacagaugcuuuuaugucgaacugauccggggaagaaaggaggaaaccgaggugcucuggaccagcaauuccauuguuguguucuguggcacaucugggaccuacggaacaggcagcuggccugauggggcugacaucaaccugaugcccaucuga

SEQ ID NO: 213661 - RNA, 1410 nt, Artificial Sequence
  derived and/or modified CDS sequence (opt5) from neuraminidase__InfluenzaA__AEX36204
augaaccccaaucagaagaucauuaccaucggcagcgugucccugacaauuucuacgaucugcuucuuuaugcaaauugccauccucaucaccacagucacccugcacuucaaacaguacgaguuuaacagcccuccgaauaaccagguuaugcuuugugaacccgcuauuaucgagagaaauauuacagaaaucguguaucugaccaacacaaccauugagaaggaaaucugcccuaaacucgccgaguaccggaauugguccaagccccagugugacauuacgggguucgcgccuuuuucuaaagauaacagcauccgccuguccgcuggaggcgacaucugggugaccagagagcccuaugucucuugcgauccugacaaguguuaccaauucgcccuugggcagggaacaacccugaauaacgugcauagcaaugauacaguucacgaacggaccccguaucgcacgcuccugaugaacgagcugggcgugcccuuucaucucgggacaaagcaggucugcauugccugguccucuagcuccugucacgacggaaaggcuuggcugcaugugugcguuaccggcgaugacaagaaugccacagcuagcuucaucuacaacggcagacuuguggauucuauugucuccuggagcaaagaaauccugcggacccaggagucugagugugugugcauuaaugggaccuguacaguggucaugacggacggauccgccagcggcaaggcggauaccaaaauccucuuuaucgaagaggggaagauuguucacacauccacccugucuggaagcgcccaacacguggaagagugcuccugcuauccucgcuaccccggcgugagaugugucugccgggacaacuggaaggggagcaaccgcccuaucguggauauuaauaucaaagacuacucuauuguuuccagauauguguguagcggacuugucggcgacacaccccggaagaacgauucuagcuccucuagccauugccuggacccgaauaacgaagagggcgggcacggagugaaaggcugggcuuucgaugacgggaaugauguuuggaugggacgcaccaucuccgagaaaagcagaucuggcuacgaaacguuuaaagugaucgaggggugguccaacccuaauagcaagcuccagauuaaccggcaggucaucguggaccgcggaaauagaucuggcuauuccggcauuuucagcgucgaagggaaauccuguaucaaccggugcuuuuacguggagcugauuagaggacgcaaggaagagacagagguucuguggaccucuaauagcaucguggucuucuguggcaccuccgggacauauggaaccggcucuuggcccgauggggccgacauuaaccucaugccuaucuga

SEQ ID NO: 213662 - RNA, 1410 nt, Artificial Sequence
  derived and/or modified CDS sequence (opt5) from neuraminidase__InfluenzaA__AEX36215
augaaccccaaucagaagaucauuaccaucggcagcgugucccugacaauuucuacgaucugcuucuuuaugcaaauugccauccucaucaccacagucacccugcacuucaaacaguacgaguuuagcuccccuccgaacaaucagguuaugcuuugugaacccgcuauuaucgagaagaacauuacagaaaucguguaucugaccaauacaaccauugagaaagaaaucugcccuaagcucgccgaguacagaaacuggucuaaaccccagugugacauuacgggguucgcgccuuuuagcaaggauaauuccauccggcugucugcuggaggcgacaucugggugacccgcgagcccuaugucagcugcgauccugacaaguguuaccaauucgcccuugggcagggaacaacccugaacaaugugcauuccaacgauacaguucacgaaagaaccccguaucggacgcuccugaugaaugagcugggcgugcccuuucaucucgggacaaaacaggucugcauugccuggucuagcuccagcugucacgacggaaaggcuuggcugcaugugugcguuaccggcgaugacaaaaacgccacagcuucuuucaucuacaauggccgccuuguggauuccauugucagcuggucuaaggaaauccugagaacccaggaguccgagugugugugcauuaacgggaccuguacaguggucaugacggacggaagcgccuccggcaaagcggauaccaagauccucuuuaucgaagaggggaagauuguucacacaucuacccugagcggauccgcccaacacguggaagagugcagcugcuauccucgguaccccggcgugcgcugugucugcagagacaauuggaaagggucuaaccggccuaucguggauauuaacaucaaggacuacuccauuguuagccgcuauguguguucuggacuugucggcgacacaccccggaaaaaugauagcuccucuagcucccauugccuggacccgaacaaugaagagggcgggcacggagugaagggcugggcuuucgaugacgggaacgauguuuggaugggaagaaccaucagcgagaaaucucgcuccggcuacgaaacguuuaaggugaucgagggguggagcaauccuaacucuaaacuccagauuaauagacaggucaucguggaccggggaaaccgcuccggcuauagcggcauuuucuccgucgaagggaagucuuguaucaauagaugcuuuuacguggagcugauucggggaagaaaggaagagacagagguucuguggaccagcaacuccaucguggucuucuguggcaccucugggacauauggaaccggcagcuggcccgauggggccgacauuaaucucaugccuaucuga

SEQ ID NO: 213663 - RNA, 1410 nt, Artificial Sequence
  derived and/or modified CDS sequence (opt5) from neuraminidase__InfluenzaA__AEX36226
augaaccccaaucagaagaucauuaccaucggcagcgugucccugacaauuucuacgaucugcuucuuuaugcaaauugccauccucaucaccacagucacccugcacuucaaacaguacgaguuuagcuccccuccgaacaaucagguuaugcuuugugaacccgcuauuaucgagagaaacauuacagaaaucguguaucugaccaauacaaccauugagaaggaaaucugcccuaaacucgccgaguaccggaacuggucuaagccccagugugacauuacgggguucgcgccuuuuagcaaagauaauuccauccgccugucugcuggaggcgacaucugggugaccagagagcccuaugucagcugcgauccugacaaguguuaccaauucgcccuugggcagggaacaacccugaacaaugugcauuccaacgauacaguucacaaucggaccccguaucgcacgcuccugaugaacgaacugggcgugcccuuucaucucgggacaaagcaggucugcauugccuggucuagcuccagcugucacgacggaaaggcuuggcugcaugugugcguuaccggcgaugacaaaaaugccacagcuucuuucaucuacaacggcagacuuguggauuccauugucagcuggucuaaagagauccugcggacccaggaauccgagugugugugcauuaaugggaccuguacaguggucaugacggacggaagcgccuccggcaaggcggauaccaaaauccucuuuaucgaggaagggaagauuguucacacaucuacccugagcggauccgcccaacacguggaggaaugcagcugcuauccucgcuaccccggcgugagaugugucugccgggacaacuggaaggggucuaaccgcccuaucguggauauuaauaucaaagacuacuccauuguuagcagauauguguguucuggaaucgucggcgacacaccccggaagaacgauagcuccucuagcucccauugccuugacccgaauaacgaggaaggcgggcacggagugaaaggcugggcuuucgaugacgggaaugauguuuggaugggacgcaccaucagcgagaagucuagauccggcuacgagacguuuaaagugauugaaggguggagcaacccuaauucuaagcugcagaucaaccggcaggucauuguggaccgcggaaauagauccggcuauagcggcaucuucuccgucgaggggaaaucuuguauuaaccggugcuuuuacguggaacucaucagaggacgcaaggaggaaacagagguucuguggaccagcaauuccauuguggucuucuguggcaccucugggacauauggaaccggcagcuggcccgauggggccgacaucaaccugaugccuaucuga

SEQ ID NO: 213664 - RNA, 1410 nt, Artificial Sequence
  derived and/or modified CDS sequence (opt5) from neuraminidase__InfluenzaA__AEX36237
augaaccccaaucagaagaucauuaccaucggcagcgugucccugacaauuucuacgaucugcuucuuuaugcaaauugccauccucaucaccacagucacccugcacuucaaacaguacgaguuuaacagcccuccgaauaaccagguuaugcuuugugaacccacaauuaucgagagaaauauuaccgaaaucguguaucugacaaacaccacgauugagaaggaaaucugcccuaaacucgcugaguaccggaagugguccaaaccccaguguaauauuaccggguucgccccuuuuucuaaggacaacagcauccgccuguccgcgggaggcgauaucugggugacaagagagcccuaugucucuugcgacccugauaaguguuaccaauucgcucuugggcagggaaccacacugaauaacgugcauagcaaugacaccguucgggaacgcacgccguauagaacacuccugaugaacgagcugggcgugcccuuucaccucgggaccaaacaggucugcauugccugguccagcagcuccugucaugauggaaaggccuggcugcacgugugcguuacaggcgacgauaaaaaugcuaccgccagcuucaucuacaacggccggcuuguggacucuauugucuccuggagcaaggaaauccugcgcacccaggagucugagugugugugcauuaaugggacauguacgguggucaugaccgauggauccgcuagcggcaaagccgacacaaagauccucuuuaucgaagaggggaagauuguucauaccuccacacugucuggaagcgcgcaacacguggaagagugcuccugcuauccuagauaccccggcgugcggugugucugccgcgauaacuggagagggagcaaccggccuaucguggacauuaauaugaaagauuacucuaucguuuccagcuauguguguucuggacuugucggcgacacgccccgcaagaacgacagcuccucuagcggccacugccuggauccgaaugacgaagaagggggacauggcgugaaagggugggccuucgaugacggaaacgauguuuggaugggcagaaccauuuccgagaagucucggucuggguacgagacauuuaaagugaucgagggaugguccaauccuaacagcaagcuccagaucaaucgccaggucauuguggacagaggcaaccggucuggcuauuccgggaucuucagcgucgaaggaaaauccuguauuaauagaugcuuuuacguggagcugauccgcggccggaaggaagagaccgagguucuguggaccucuaacagcauuguggucuucugugggacauccggaaccuauggcacagggucuuggcccgauggcgcugacaucaaucucaugccuauuuga

SEQ ID NO: 213665 - RNA, 1410 nt, Artificial Sequence
  derived and/or modified CDS sequence (opt5) from neuraminidase__InfluenzaA__AEX36248
augaaccccaaucagaagaucauuaccaucggcagcgugucccugacaauuucuacgaucugcuucuuuaugcaaauugccauccucaucaccacagucacccugcacuucaaacaguacgaguuuagcuccccuccgaacaaucagguuaugcuuugugaacccgcuauuaucgagagaaacauuacagaaaucguguaucugaccaauacaaccauugagaaggaaaucugcccuaaacucgccgaguaccggaacuggucuaagccccagugugacauuacgggguucgcgccuuuuagcaaagauaauuccauccgccugucugcuggaggcgacaucugggugaccagagagcccuaugucagcugcgauccugacaaguguuaccaauucgcccuugggcagggaacaacccugaacaaugugcauuccaacgauacaguucacaaucggaccccguaucgcacgcuccugaugaacgaacugggcgugcccuuucaucucgggacaaagcaggucugcauugccuggucuagcuccagcugucacgacggaaaggcuuggcugcaugugugcguuaccggcgaugacaaaaaugccacagcuucuuucaucuacaacggcagacuuguggauuccauugucagcuggucuaaagagauccugcggacccaggaauccgagugugugugcauuaaugggaccuguacaguggucaugacggacggaagcgccuccggccgcgcggauaccaagauccucuuuaucgaggaagggaaaauuguucacacaucuacccugagcggauccgcccaacacguggaggaaugcagcugcuauccuagauaccccggcgugcggugugucugccgcgacaacuggaaggggucuaacagaccuaucguggauauuaauaucaaggacuacuccauuguuagccgguauguguguucuggacuugucggcgacacaccccgcaaaaacgauagcuccucuagcucccauugccuggacccgaauaacgaggaaggcgggcacggagugaagggcugggcuuucgaugacgggaaugauguuuggaugggaagaaccaucagcgagaaaucucgguccggcuacgagacguuuaaggugaucgaaggguggagcaacccuaauucuaaacuccagauuaaccgccaggucaucguggacagaggaaaucgguccggcuauagcggcauuuucuccgucgaggggaagucuuguaucaacagaugcuuuuacguggaacugauucgcggacggaaagaggaaacagagguucuguggaccagcaauuccaucguggucuucuguggcaccucugggacauauggaaccggcagcuggcccgauggggccgacauuaaccucaugccuaucuga

SEQ ID NO: 213666 - RNA, 1410 nt, Artificial Sequence; identical to SEQ ID NO: 208584
  derived and/or modified CDS sequence (opt5) from neuraminidase__InfluenzaA__AEX36259

SEQ ID NO: 213667 - RNA, 1410 nt, Artificial Sequence
  derived and/or modified CDS sequence (opt5) from neuraminidase__InfluenzaA__AEX36270
augaaccccaaucagaagaucauuaccaucggcagcgugucccugacaauuucuacgaucugcuucuuuaugcaaauugccauccucaucaccacagucacccugcacuucaaacaguacgaguuuagcuccccuccgaacaaucagguuaugcuuugugaacccgcuauuaucgagagaaacauuacagaaaucguguaucugaccaauacaaccauugagaaggaaaucugcccuaaacucgccgaguaccggaacuggucuaagccccagugugacauuacgggguucgcgccuuuuagcaaagauaauuccauccgccugucugcuggaggcgacaucugggugaccagagagcccuaugucagcugcgauccugacaaguguuaccaauucgcccuugggcagggaacaacccugaacaaugugcauuccaacgauacaguucacggccggaccccguaucgcacgcuccugaugaaugaacugggggugcccuuucaucucggaacaaagcaggucugcauugccuggucuagcuccagcugucacgacggcaaggcuuggcugcaugugugcguuaccggcgaugacaaaaacgccacagcuucuuucaucuacaaugggagacuuguggauuccauugucagcuggucuaaagagauccugcggacccaggaauccgagugugugugcauuaacggaaccuguacaguggucaugacggacggcagcgccuccgggaaggcggauaccaaaauccucuuuaucgaggaaggaaagauuguucacacaucuacccugagcggcuccgcccaacacguggaggaaugcagcugcuauccucgcuaccccggggugagaugugucugccgggacaauuggaagggaucuaaccgcccuaucguggauauuaacaucaaagacuacuccauuguuagcagauauguguguucuggccuugucggcgacacaccccggaagaaugauagcuccucuagcucccauugccuggacccgaacaaugaggaagggggacacggcgugaaagggugggcuuucgaugacggaaacgauguuuggaugggccgcaccaucagcgagaagucuagauccggguacgagacguuuaaagugaucgaaggauggagcaauccuaacucuaagcuccagauuaaucggcaggucaucguggaccgcggcaacagauccggcuauagcgggauuuucuccgucgagggaaaaucuuguaucaaucggugcuuuuacguggaacugauuagaggccgcgaggaagagacaaagguucuguggaccagcaacuccaucguggucuucugugggaccucuggaacauauggcaccgggagcuggcccgauggcgccgacauuaaucucaugccuaucuga

SEQ ID NO: 213668 - RNA, 1410 nt, Artificial Sequence
  derived and/or modified CDS sequence (opt5) from neuraminidase__InfluenzaA__AEX36281
augaaccccaaucagaagaucauuaccaucggcagcgugucccugacaauuucuacgaucugcuucuuuaugcaaauugccauccucaucaccacagucacccugcacuucaaacaguacgaguuuagcuccccuccgaacaaucagguuaugcuuugugaacccgcuauuaucgagagaaacauuacagaaaucguguaucugaccaauacaaccauugagaaggaaaucugcccuaaacucgccgaguaccggaacuggucuaagccccagugugacauuacgggguucgcgccuuuuagcaaagauaauuccauccgccugucugcuggaggcgacaucugggugaccagagagcccuaugucagcugcgauccugacaaguguuaccaauucgcccuugggcagggaacaacccugaacaaugugcauuccaacgauacaguucacggccggaccccguaucgcacgcuccugaugaaugaacugggggugcccuuucaucucggaacaaagcaggucugcauugccuggucuagcuccagcugucacgacggcaaggcuuggcugcaugugugcguuaccggcgaugacaaaaacgccacagcuucuuucaucuacaaugggagacuuguggauuccauugucagcuggucuaaagagauccugcggacccaggaauccgagugugugugcauuaacggaaccuguacaguggucaugacggacggcagcgccuccgggaaggcggauaccaaaauccucuuuaucgaggaaggaaagauuguucacacaucuacccugagcggcuccgcccaacacguggaggaaugcagcugcuauccucgcuaccccggggugagaugugucugccgggacaauuggaagggaucuaaccgcccuaucguggauauuaacaucaaagacuacuccauuguuagcagauauguguguucuggccuugucggcgacacaccccggaagaaugauagcuccucuagcucccauugccuggacccgaacaaugaggaagggggacacggcgugaaagggugggcuuucgaugacggaaacgauguuuggaugggccgcaccaucagcgagaagucuagauccggguacgagacguuuaaagugaucgaaggauggagcaauccuaacucuaagcuccagauuaaucggcaggucaucguggaccgcggcaacagauccggcuauagcgggauuuucuccgucgagggaaaaucuuguaucaaucggugcuuuuacguggaacugauuagaggccgcaaggaggaaacagagguucuguggaccagcaacuccaucguggucuucugugggaccucuggaacauauggcaccgggagcuggcccgauggcgccgacauuaaucucaugccuaucuga

SEQ ID NO: 213669 - RNA, 1410 nt, Artificial Sequence; identical to SEQ ID NO: 213668
  derived and/or modified CDS sequence (opt5) from neuraminidase__InfluenzaA__AEX36292

SEQ ID NO: 213670 - RNA, 1410 nt, Artificial Sequence
  derived and/or modified CDS sequence (opt5) from neuraminidase__InfluenzaA__AEX36303
augaaccccaaucagaagaucauuaccaucggcagcgugucccugacaauuucuacgaucugcuucuuuaugcaaauugccauccucaucaccacagucacccugcacuucaaacaguacgaguuuagcuccccuccgaacaaucagguuaugcuuugugaacccgcuauuaucgagagaaacauuacagaaaucguguaucugaccaauacaaccauugagaaggaaaucugcccuaaacucgccgaguaccggaacuggucuaagccccagugugacauuacgggguucgcgccuuuuagcaaagauaauuccauccgccugucugcuggaggcgacaucugggugaccagagagcccuaugucagcugcgauccugacaaguguuaccaauucgcccuugggcagggaacaacccugaacaaugugcauuccaacgauacaguucacgaacggaccccguaucgcacgcuccugaugaaugagcugggcgugcccuuucaucucgggacaaagcaggucugcauugccuggucuagcuccagcugucacgacggaaaggcuuggcugcaugugugcguuaccggcgaugacaaaaacgccacagcuucuuucaucuacaauggcagacuuguggauuccauugucagcuggucuaaagaaauccugcggacccaggaguccgagugugugugcauuaacgggaccuguacaguggucaugacggacggaagcgccuccggcaaggcggauaccaaaauccucuuuaucgaagaggggaagauuguucacacaucuacccugagcggauccgcccaacacguggaagagugcagcugcuauccucgcuaccccggcgugagaugugucugccgggacaauuggaaggggucuaaccgcccuaucguggauauuaacaucaaagacuacuccauuguuagcagauauguguguucuggacuugucggcgacacaccccggaagaaugauagcuccucuagcucccauugccuggacccgaacaaugaagagggcgggcacggagugaaaggcugggcuuucgaugacgggaacgauguuuggaugggacgcaccaucagcgagaagucuagauccggcuacgaaacguuuaaagugaucgagggguggagcaauccuaacucuaagcuccagauuaaucggcaggucaucguggaccgcggaaacagauccggcuauagcggcauuuucuccgucgaagggaaaucuuguaucaaucggugcuuuuacguggagcugauuagaggacgcaaggaagagacagagguucuguggaccagcaacuccaucguggucuucuguggcaccucugggacauauggaaccggcagcuggcccgauggggccgacauuaaucucaugccuaucuga

SEQ ID NO: 213671 - RNA, 1410 nt, Artificial Sequence
  derived and/or modified CDS sequence (opt5) from neuraminidase__InfluenzaA__AEX36314
augaaccccaaucagaagaucauuaccaucggcagcgugucccugacaauuucuacgaucugcuucuuuaugcaaauugccauccucaucaccacagucacccugcacuucaaacaguacgaguuuagcuccccuccgaacaaucagguuaugcuuugugaacccacaauuaucgagagaaacauuaccgaaaucguguaucugacaaauaccacgauugagaaggaaaucugcccuaaacucgcugaguaccggaacuggucuaagccccagugugacauuaccggguucgccccuuuuagcaaagauaauuccauccgccugucugcgggaggcgacaucugggugacaagagagcccuaugucagcugcgauccugacaaguguuaccaauucgcucuugggcagggaaccacacugaacaaugugcauuccaacgauaccguucacaaucggacgccguaucgcacacuccugaugaacgaacugggcgugcccuuucaucucgggaccaagcaggucugcauugccuggucuagcuccagcugucacgacggaaaagccuggcugcaugugugcguuacaggcgaugacaagaaugcuaccgccucuuucaucuacaacggcagacuuguggauuccauugucagcuggucuaaagagauccugcggacccaggaauccgagugugugugcauuaaugggacaugugcuguggucaugacggacggaagcgccuccggcaaggcggauaccaaaauccucuuuaucgaggaagggaagauuguucacacaucuacccugagcggauccgcccaacacguggaggaaugcagcugcuauccucgcuaccccggcgugagaugugucugccgggacaacuggaaggggucuaaccgcccuaucguggauauuaauaucaaagacuacuccauuguuagcagauauguguguucuggacuugucggcgacacaccccggaagaacgauagcuccucuagcucccauugccuggacccgaauaacgaggaaggcgaucacggggugaaaggaugggcuuucgacgauggcaaugacguuuggauggggcgcaccaucagcgagaagucuagauccggauacgagacguuuaaagugaucgaaggcuggagcaacccuaauucuaagcuccagauuaaccggcaggucaucguggaucgcgggaauagauccggauauagcggcauuuucuccgucgagggcaaaucuuguaucaaccggugcuuuuacguggaacugauuagagggcgcaaggaggaaacagagguucuguggaccagcaauuccaucguggucuucuguggaaccucuggcacauaugggaccggaagcuggcccgacggcgccgagauuaaccucaugccuaucuga

SEQ ID NO: 213672 - RNA, 1410 nt, Artificial Sequence; identical to SEQ ID NO: 213668
  derived and/or modified CDS sequence (opt5) from neuraminidase__InfluenzaA__AEX36336

SEQ ID NO: 213673 - RNA, 1410 nt, Artificial Sequence
  derived and/or modified CDS sequence (opt5) from neuraminidase__InfluenzaA__AEX36347
augaaccccaaucagaagaucauuaccaucggcagcgugucccugacaauuucuacgaucugcuucuuuaugcaaauugccauccucaucaccacagucacccugcacuucaaacaguacgaguuuagcuccccuccgaacaaucagguuaugcuuugugaacccauuaucauugagagaaacaucacagaaauuguguaucugaccaauacaaccaucgagaaggaaauuugcccuaaacucgcugaguaccggaacuggucuaagccccagugugacaucacgggguucgccccuuuuagcaaagauaauuccauccgccugucugcgggaggcgacauuugggugaccagagagcccuaugucagcugcgauccugacaaguguuaccaauucgcucuugggcagggaacaacccugaacaaugugcauuccaacgauacaguucacaaucggaccccguaucgcacgcuccugaugaacgaacugggcgugcccuuucaucucgggacaaagcaggucugcaucgccuggucuagcuccagcugucacgacggaaaagccuggcugcaugugugcguuaccggcgaugacaagaaugcuacagccucuuucauuuacaacggcagacuuguggauuccaucgucagcuggucuaaagagauucugcggacccaggaauccgagugugugugcaucaaugggaccugugcuguggucaugacagacggaagcgccuccggcaaggcggauacgaaaauccucuuuauugaggaagggaagaucguucacgccucuacccugagcggauccgcucaacacguggaggaaugcagcugcuauccucgcuaccccggcgugagaugugucugccgggacaacuggaaggggucuaaccgcccuauuguggauaucaauauuaaagacuacuccaucguuagcagauauguguguucuggacuugucggcgacacaccccggaagaacgauagcuccucuagcucccauugccuggacccgaauaacgaggaaggcgggcacggagugaaaggcugggccuucgaugacgggaaugauguuuggaugggacgcaccaucagcgagaagucuagauccggcuacgagacauuuaaagugauugaaggguggagcaacccuaauucuaagcuccagaucaaccggcaggucauuguggaccgcggaaauagauccggcuauagcggcaucuucuccgucgaggggaaaucuuguauuaaccggugcuuuuacguggaacugaucagaggacgcaaggaggaaaccgagguucuguggacgagcaauuccauuguggucuucuguggcacaucugggaccuauggaaccggcagcuggcccgauggggcugacaucaaccucaugccuaucuga

SEQ ID NO: 213674 - RNA, 1410 nt, Artificial Sequence; identical to SEQ ID NO: 207956
  derived and/or modified CDS sequence (opt5) from neuraminidase__InfluenzaA__AEX36358

SEQ ID NO: 213675 - RNA, 1410 nt, Artificial Sequence
  derived and/or modified CDS sequence (opt5) from neuraminidase__InfluenzaA__AEX36369
augaaccccaaucagaagaucauuaccaucggcagcgugucccugacaauuucuacgaucugcuucuuuaugcaaauugccauccucaucaccacagucacccugcacuucaaacaguacgaguuuaacagcccuccgaauaaccagguuaugcuuugugaacccacaauuaucgagagaaauauuaccgaaaucguguaucugacaaacaccacgauugagaaggaaaucugcccuaaacucgcugaguaccggaauugguccaagccccagugugacauuaccggguucgccccuuuuucuaaagauaacagcauccgccuguccgcgggaggcgacaucugggugacaagagagcccuaugucucuugcgauccugacaaguguuaccaauucgcucuugggcagggaaccacacugaauaacgugcauagcaaugauaccguucggaaccgcacgccguauagaacacuccugaugaaugaacugggcgugcccuuucaccucgggaccaagcaggucugcauugccugguccagcagcuccugucaugacggaaaagccuggcugcacgugugcaucacaggcgaugacaagaacgcuaccgccagcuucauuuacaauggccggcuuguugauucuaucguguccuggagcaaagagauucugcgcacccaggaaucugagugugucugcaucaacgggacauguacgguggugaugaccgacggauccgcuagcggcaaggccgauacaaaaauccucuuuauugaggaagggaagaucguccauaccuccacacugucuggaagcgcgcaacacguugaggaaugcuccugcuauccuagauaccccggcgugcggugugugugccgcgacaacuggaaggggagcaauagaccuauugucgauaucaacauuaaagaccacucuaucguguccagcuacguuuguucuggacuugugggcgacacgccccggaagaaugauagcuccucuagcucccauugccuggacccgaacaaugaggaaggcgggcacggagucaaaggcugggccuucgaugacgggaacgauguguggaugggacgcaccaucagcgagaagucuagacucggcuaugagacauuuaaaguuauugaagggugguccaauccuaagagcaaacugcagaucaaccgccaggugauugucgaccggggaaauagaaccggcuacucuggcaucuucuccguggaggggaagucuuguauuaaccggugcuuuuaugucgaacugaucagaggacgcaaggaggaaaccgaggugcucuggacauccaauucuauuguuguguucuguggcaccagcgggacauacggaacgggcuccuggcccgauggggcugacaucaaccugaugccuaucuga

SEQ ID NO: 213676 - RNA, 1410 nt, Artificial Sequence
  derived and/or modified CDS sequence (opt5) from neuraminidase__InfluenzaA__AEX36391
augaaccccaaucagaagaucauuaccaucggcagcgugucccugacaauuucuacgaucugcuucuuuaugcaaauugccauccucaucaccacagucacccugcacuucaaacaguacgaguuuaacagcccuccgaauaaccagguuaugcuuugugaacccacaauuaucgagagaaauauuaccgaaaucguguaucugacaaacaccacgauugagaaggaaaucugcccuaaacucgcugaguaccggaauugguccaagccccagugugacauugccggguucgcgccuuuuucuaaagauaacagcauccgccuguccgcuggaggcgacaucugggugaccagagagcccuaugucucuugcgauccugacaaguguuaccaauucgcccuugggcagggaacaacccugaauaacgugcauagcaaugauacaguucggaaccgcaccccguauagaacgcuccugaugaaugaacugggcgugcccuuucaccucgggacaaagcaggucugcauugccugguccucuagcuccugucaugacggaaaggcuuggcugcacgugugcaucaccggcgaugacaaaaacgccacagcuagcuucauuuacaauggccggcuuguugauucuaucguguccuggagcaaagagauucugcgcacccaggaaucugagugugucugcaucaacgggaccuguacaguggugaugacggacggauccgccagcggcaaggcggauaccaaaauccucuuuauugaggaagggaagaucguccauacauccacccugucuggaagcgcccaacacguugaggaaugcuccugcuauccuagauaccccggcgugcggugugugugccgcgacaacuggaaggggagcaauagaccuauugucgauaucaacauuaaagaccacucuaucguguccagcuacguuuguucuggacuugugggcgacacaccccggaagaaugauagcuccucuagcucccauugccuggacccgaacaaugaggaaggcgggcacggagucaaaggcugggcuuucgaugacgggaacgauguguggaugggacgcaccaucagcgagaagucuagacucggcuaugagacguuuaaaguuauugaagggugguccaauccuaagagcaaacugcagaucaaccgccaggugauugucgaccggggagauagaucuggcuacuccggcaucuucagcguggaggggaaguccuguauuaaucggugcuuuuaugucgaacugaucagaggacgcaaggaggaaacagaggugcucuggaccucuaacagcauuguuguguucuguggcaccuccgggacauacggaaccggcucuuggcccgacggggccgauaucaaucugaugccuaucuga

SEQ ID NO: 213677 - RNA, 1410 nt, Artificial Sequence
  derived and/or modified CDS sequence (opt5) from neuraminidase__InfluenzaA__AEX36402
augaaccccaaucagaagaucauuaccaucggcagcgugucccugacaauuucuacgaucugcuucuuuaugcaaauugccauccucaucaccacagucacccugcacuucaaacaguacgaguuuaacagcccuccgaauaaccagguuaugcuuugugaacccacaauuaucgagagaaauauuaccgaaaucguguaucugacaaacaccacgauugagaaggaaaucugcccuaaacucgcugaguaccggaauugguccaagccccagugugacauuaccggguucgccccuuuuucuaaagauaacagcauccgccuguccgcgggaggcgacaucugggugacaagagagcccuaugucucuugcgauccugacaaguguuaccaauucgcucuugggcagggaaccacacugaauaacgugcauagcaaugauaccguucggggccgcacgccguauagaacacuccugaugaacgaacugggggugcccuuucaccucggaaccaagcaggucugcauugccugguccucuagcuccugucaugacggcaaagccuggcugcacgugugcaucacaggcgaugacaagaaugcuaccgccagcuucauuuacaacgggcggcuuguugauucuaucguguccuggagcaaagagauucugcgcacccaggaaucugagugugucugcaucaauggaacauguacgguggugaugaccgacggcuccgcuagcgggaaggccgauacaaaaauccucuuuauugaggaaggaaagaucguccauaccuccacacugucuggcagcgcgcaacacguugaggaaugcuccugcuauccuagauuccccggggugcggugugugugccgcgacaacuggaagggaagcaacagaccuauugucgauaucaauauuaaagaccacucuaucguguccagcuacguuuguucuggccuugugggcgacacgccccggaagaacgauagcuccucuagcucccauugccuggacccgaauaacgaggaagggggacacggcgucaaagggugggccuuugaugacggaaaugauguguggaugggccgcaccaucagcgagaagucuagacucggguacgagacauucaaaguuauugaaggaugguccaacccuaagagcaaacugcagaucaaucgccaggugauugucgaccggggcaacagaaccggcuauucugggaucuuuuccguggagggaaagagcuguauuaaucggugcuucuacgucgaacugaucagaggccgcaaggaggaaaccgaggugcucuggacauccaacucuauuguuguguucugugggaccagcggaacauauggcacgggguccuggcccgauggcgcugacaucaaucugaugccuaucuga

SEQ ID NO: 213678 - RNA, 1410 nt, Artificial Sequence; identical to SEQ ID NO: 207956
  derived and/or modified CDS sequence (opt5) from neuraminidase__InfluenzaA__AEX36413

SEQ ID NO: 213679 - RNA, 1410 nt, Artificial Sequence
  derived and/or modified CDS sequence (opt5) from neuraminidase__InfluenzaA__AEX36424
augaaccccaaucagaagaucauuaccaucggcagcgugucccugacaauuucuacgaucugcuucuuuaugcaaauugccauccucaucaccacagucacccugcacuucaaacaguacgaguuuaacagcccuccgaauaaccagguuaugcuuugugaacccacaauuaucgagagaaauauuaccgaaaucguguaucugacaaacaccacgauugagaaggaaaucugcuccaaacucgcugaguaccggaauuggucuaagccucagugugacauuaccggguucgcccccuuuagcaaagauaacuccauccgccugucugcgggaggcgacaucugggugacaagagagccuuaugucagcugcgaucccgacaaguguuaccaauucgcucuugggcagggaaccacacugaauaacgugcauuccaaugauaccauucgggaccgcacgccuuauagaacacuccugaugaacgaacugggcguuccguuucaccucgggaccaaacaggugugcaucgccuggucuagcuccagcugucaugauggaaaggccuggcugcacgucugcauuacaggcgacgauaagaaugcuaccgccucuuucaucuacaacggccggcuuguggacuccguugugagcuggucuaaagagauucugcgcacccaggaauccgagugugucugcaucaaugggacauguacgguggugaugaccgauggaagcgcuuccggcaaggccgacacaaaaauccucuuuauugaggaagggaagaucguccauaccucuacacugagcggauccgcgcaacacguugaggaaugcagcugcuaucccagauacccuggcgugcggugugugugccgcgauaacuggaaggggucuaacagacccauugucgacaucaauauuaaagaccacuccaucgugagcucuuacguuuguagcggacuugugggcgauaccccucggaagaacgacuccucuagcuccagccauugccuggaucccaauaacgaggaaggcgggcacggagucaaaggcugggccuucgacgaugggaaugacguguggaugggacgcacgaucucugagaaguccagacucggcuaugagacauuuaaaguuauugaaggguggagcaacccgaagucuaaacugcagaucaaucgccaggugauugucgaucggggaaacagauccggcuacagcggcaucuucuccguggaggggaagucuuguauuaaucggugcuuuuaugucgaacugaucagaggacgcaaggaggaaaccgaggugcucuggaccagcaacuccauuguuguguucuguggcacaucugggaccuacggaacaggcagcuggccugacggggcugauaucaaucugaugcccaucuga

SEQ ID NO: 213680 - RNA, 1410 nt, Artificial Sequence
  derived and/or modified CDS sequence (opt5) from neuraminidase__InfluenzaA__AEX36435
augaaccccaaucagaagaucauuaccaucggcagcgugucccugacaauuucuacgaucugcuucuuuaugcaaauugccauccucaucaccacagucacccugcacuucaaacaguacgaguuuaacagcccuccgaauaaccagguuaugcuuugugaacccacaauuaucgagagaaauauuaccgaaaucguguaucugacaaacaccacgauugagaaggaaaucugcccuaaacucgcugaguaccggaauugguccaagccccagugugacauuaccggguucgccccuuuuucuaaagauaacagcauccgccuguccgcgggaggcgacaucugggugacaagagagcccuaugucucuugcgauccugacaaguguuaccaauucgcucuugggcagggaaccacacugaauaacgugcauagcaaugauaccguucgggaccgcacgccguauagaacacuccugaugaacgaacugggcgugcccuuucaccucgggaccaagcaggucugcauugccugguccucuagcuccugucaugauggaaaagccuggcugcacgugugcaucacaggcgacgauaagaaugcuaccgccagcuucauuuacaacggccggcuuguugacucuguggucuccuggagcaaagagauccugcgcacccaggaaucugagugugugugcauuaaugggacauguacgguggucaugaccgauggauccgcuagcggcaaggccgacacaaaaauccucuuuaucaaggaggggaagauuguucauaccuccacacugucuggaagcgcgcaacacguggaagagugcuccugcuauccuagauaccccggcgugcggugugucugccgcgauaacuggaaagggagcaacagaccuaucguggacauuaauaucaaggaccacucuauuguuuccagcuacguguguucuggacuugucggcgauacgccccggaaaaacgacagcuccucuagcucccauugccuggauccgaauaacgaagagggcgggcacggagugaagggcugggccuucgacgaugggaaugacguuuggaugggacgcaccaucagcgaaaaaucuagacucggcuaugagacauuuaaggugaucgaggggugguccaacagcaaaucuaagcugcagauuaaucggcaggucaucguggaucgcggaaacagauccggcuacagcggcauuuucuccgucgaagggaagucuuguaucaaucggugcuuuuauguggagcugauuagaggacgcaaagaagagaccgaaguucucuggaccagcaacuccaucguggucuucuguggcacaucugggaccuacggaacaggcagcuggccugacggggcugauauuaaucugaugcccaucuga

SEQ ID NO: 213681 - RNA, 1410 nt, Artificial Sequence; identical to SEQ ID NO: 208138
  derived and/or modified CDS sequence (opt5) from neuraminidase__InfluenzaA__AEX36446

SEQ ID NO: 213682 - RNA, 1410 nt, Artificial Sequence; identical to SEQ ID NO: 208138
  derived and/or modified CDS sequence (opt5) from neuraminidase__InfluenzaA__AEX36457

SEQ ID NO: 213683 - RNA, 1410 nt, Artificial Sequence
  derived and/or modified CDS sequence (opt5) from neuraminidase__InfluenzaA__AEX36468
augaaccccaaucagaagaucauuaccaucggcagcgugucccugacaauuucuacgaucugcuucuuuaugcaaauugccauccucaucaccacagucacccugcacuucaaacaguacgaguuuagcuccccuccgaacaaucagguuaugcuuugugaacccacaauuaucgagagaaacauuaccgaaaucguguaucugacaaauaccacgauugagaaggaaaucugcccuaaacucgcugaguaccggaacuggucuaagccccagugugacauuaccggguucgccccuuuuagcaaagauaauuccauccgccugucugcgggaggcgacaucugggugacaagagagcccuaugucagcugcgauccugacaaguguuaccaauucgcucuugggcagggaaccacacugaacaaugugcauuccaacgauaccguucacaaucggacgccguaucgcacacuccugaugaacgaacugggcgugcccuuucaucucgggaccaagcaggucugcauugccuggagcagcuccagcugucacgacggaaaagccuggcugcaugugugcguuacaggcgaugacaagaaugcuaccgccucuuucaucuacaacggcagacuuguggauuccauugucagcuggucuaaagagauccugcggacccaggaauccgagugugugugcauuaaugggacauguacgguggucaugaccgacggaagcgcuuccggcaaggccgauacaaaaauccucuuuaucgaggaagggaagauuguucacaccucuacacugagcggaaacgcgcaacacguggaggaaugcuccugcuauccucgcuaccccggcgugagaugugucugccgggacaacuggaaggggagcaaucgcccuaucguggauauuaacaucaaagacuacucuauuguuuccagauauguguguagcggacuugucggcgacacgccccggaagaaugauucuagcuccucuagccauugccuggacccgaacaaugaggaaggcgggcacggagugaaaggcugggccuucgaugacgggaacgauguuuggaugggacgcaccaucuccgagaagucuagaucuggcuacgagacauuuaaagugaucgaagggugguccaauccuaacagcaagcuccagauuaaucggcaggucaucguggaccgcggaaacagaucuggcuauuccggcauuuucagcgucgaggggaaauccuguaucaaucggugcuuuuacguggaacugauuagaggacgcaaggaggaaaccaagguucuguggaccucuaacagcaucguggucuucuguggcacauccgggaccuauggaacaggcucuuggcccgauggggcugacauuaaucucaugccuaucuga

SEQ ID NO: 213684 - RNA, 1410 nt, Artificial Sequence
  derived and/or modified CDS sequence (opt5) from neuraminidase__InfluenzaA__AEX36479
augaaccccaaucagaagaucauuaccaucggcagcgugucccugacaauuucuacgaucugcuucuuuaugcaaauugccauccucaucaccacagucacccugcacuucaaacaguacgaguuuagcuccccuccgaacaaucagguuaugcuuugugaacccacaauuaucgagagaaacauuaccgaaaucguguauccuacaaauaccacgaccgagaaggaaauuugccccaaacuggcugaguaccggaacuggucuaagccucagugugacaucacaggguucgcccccuuuagcaaagauaauuccauucgccucucugcgggaggcgacaucugggugaccagagagccuuaugucagcugcgauccggacaaguguuaccaauucgcucuggggcagggaacaacccuuaacaaugugcauuccaacgauacgguucacgaccggacacccuaucgcacccugcucaugaaugaacugggcgugccuuuucaucuggggacaaagcaggucugcaucgccuggucuagcuccagcugucacgauggaaaagccuggcuccaugugugcguuaccggcgacgauaagaacgcuaccgccucuuucauuuacaauggcagacugguggacuccaucgucagcuggucuaaagagauucuucggacacaggaauccgagugugugugcaucaacgggacguguaccguggucaugacagauggaagcgcuuccggcaaggccgacaccaaaauucuguuuaucgaggaagggaagaucguucacacaucuacccucagcggauccgcgcaacacguggaggaaugcagcugcuauccccgcuacccuggcgugagaugugucugccgggauaauuggaaggggucuaaccgccccauuguggacaucaacauuaaagacuacuccaucguuagcagauauguguguucuggacuggucggcgauacgccgcggaagaaugacagcuccucuagcucccauugccuugauccuaacaaugaggaaggcgggcacggagugaaaggcugggccuucgacgaugggaacgacguuuggaugggacgcacaauuagcgagaagcugagaucuggcuacgagaccuuuaaagugaucgaagggugguccaaucccaacagcaagcuccagaucaaucggcaggucauuguggaucgcggaaacagaucuggcuauuccggcaucuucagcgucgaggggaaauccuguauuaaucggugcuuuuacguggaacugaucagaggacgcaaggaggaaaccgagguucuguggacaucuaacagcauuguggucuucuguggcaccuccgggacauauggaacgggcucuuggccugacggggcugauaucaaucucaugcccauuuga

SEQ ID NO: 213685 - RNA, 1410 nt, Artificial Sequence
  derived and/or modified CDS sequence (opt5) from neuraminidase__InfluenzaA__AEX36490
augaaccccaaucagaagaucauuaccaucggcagcgugucccugacaauuucuacgaucugcuucuuuaugcaaauugccauccucaucaccacagucacccugcacuucaaacaguacgaguuuagcuauccuccgaacaaucagguuaugcuuugugaacccacaauuaucgagagaaacauuaccgaaaucguguaccugacaaauaccacgauugagaaggaaaucugcccuaaacucgcugaguaucggaacugguccaagccccagugugacauuaccggguucgccccuuuuucuaaagauaauagcauccgccuguccgcgggaggcgacaucugggugacaagagagcccuacgucucuugcgauccugacaaguguuaucaauucgcucuugggcagggaaccacacugaacaaugugcauagcaacgauaccguucacgaccggacgccguaccgcacacuccugaugaaugaacugggcgugcccuuucaucucgggaccaagcaggucugcauugccugguccucuagcuccugucacgauggaaaagccuggcugcaugugugcguuacaggcgacgauaagaacgcuaccgccagcuucaucuauaauggcagacuuguggacucuauugucuccuggagcaaagagauccugcggacccaggaaucugagugugugugcauuaacgggacauguacgguggucaugaccgauggauccgcuagcggcaaggccgacacaaaaauccucuuuaucgaggaagggaagauuguucacaccuccacacugucuggaaaugcgcaacacguggaggaaugcagcugcuacccucgcuaccccggcgugagaugugucugccgggauaacuggaagggguccaaccgcccuaucguggacauuaauaucaaagacuauagcauuguuucuagauacguguguuccggacuugucggcgauacgccccggaagaacgacagcucuagcuccucucauugccuggauccgaauaacgaggaaggcgggcacggagugaaaggcugggccuucgacgaugggaaugacguuuggaugggacgcaccaucagcgagaaguccagaagcggcuaugagacauuuaaagugaucgaaggguggucuaacccuaauuccaagcuccagauuaaccggcaggucaucguggaucgcggaaauagaagcggcuacucuggcauuuucuccgucgaggggaaaagcuguaucaaccggugcuuuuauguggaacugauuagaggacgcaaggaggaaaccaagguucuguggaccuccaauucuaucguggucuucuguggcacaagcgggaccuacggaacaggcuccuggcccgacggggcugauauuaaccucaugccuaucuga

SEQ ID NO: 213686 - RNA, 1410 nt, Artificial Sequence
  derived and/or modified CDS sequence (opt5) from neuraminidase__InfluenzaA__AEX36501
augaaccccaaucagaagaucauuaccaucggcagcgugucccugacaauuucuacgaucugcuucuuuaugcaaauugccauccucaucaccacagucacccugcacuucaaacaguacgaguuuagcuccccuccgaacaaucagguuaugcuuugugaacccgcuauuaucgagagaaacauuacagaaaucguguaucugaccaauacaaccauugagaaggaaaaaugcccuaagcucgccgaguaccggaacuggucuaaaccccagugugacaucacgggguucgcgccuuuuagcaaggauaauuccauucgccugucugcuggaggcgacaucugggugaccagagagcccuaugucagcugcgauccugacaaguguuaccaauucgcccuugggcagggaacaacccugaacaaugugcauuccaacgauacaguucacggccggaccccguaucgcacgcuccugaugaaugaacugggggugcccuuucaucucggaacaaaacaggucugcaucgccuggucuagcuccagcugucacgacggcaaggcuuggcugcaugugugcguuaccggcgaugacaaaaacgccacagcuucuuucauuuacaaugggagacuuguggauuccaucgucagcuggucuaaggagauucugcggacccaggaauccgagugugugugcaucaacggaaccuguacaguggucaugacggacggcagcgccuccgggaaagcggauaccaagauucucuuuaucgaggaaggaaagaucguucacacaucuacccugagcggcuccgcccaacacguggaggaaugcagcugcuauccucgcuaccccggggugagaugugucugccgggacaauuggaaaggaucuaaccgcccuauuguggauaucaacauuaaggacuacuccaucguuagcagauauguguguucuggccuugucggcgacacaccccggaaaagcgauuccucuagcuccagccauugccuggacccgaauaacgaggaagggggacacggcgugaaggggugggcuuucgaugacggaaaugauguuuggaugggccgcaccauuucugagaaauccagaagcggguacgagacguuuaaggugaucgaaggauggucuaacccuaauuccaaacuccagaucaaccggcaggucauuguggaccgcggcaauagaagcggcuauuccgggaucuucucugucgagggaaagagcuguauuaaccggugcuuuuacguggaacugaucagaggccgcaaggaggaaacagagguucuguggaccuccaauucuauuguggucuucugugggaccagcggaacauauggcaccggguccuggcccgauggcgccgacaucaaccucaugccuauuuga

SEQ ID NO: 213687 - RNA, 1410 nt, Artificial Sequence
  derived and/or modified CDS sequence (opt5) from neuraminidase__InfluenzaA__AEX36512
augaaccccaaucagaagaucauuaccaucggcagcgugucccugacaauuucuacgaucugcuucuuuaugcaaauugccauccucaucaccacagucacccugcacuucaaacaguacgaguuuagcuccccuccgaacaaucagguuaugcuuugugaacccgcuauuaucgagagaaacauuacagaaaucguguaucugaccaauacaaccauugagaaggaaaucugcccuaaacucgccgaguaccggaacuggucuaagccccagugugacauuacgggguucgcgccuuuuagcaaagauaauuccauccgccugucugcuggaggcgacaucugggugaccagagagcccuaugucagcugcgauccugacaaguguuaccaauucgcccuugggcagggaacaacccugaacaaugugcauuccaacgauacaguucacgaccggaccccguaucgcacgcuccugaugaaugaacugggcgugcccuuucaucucgggacaaagcaggucugcauugccuggucuagcuccagcugucacgauggaaaggcuuggcugcaugugugcguuaccggcgacgauaaaaacgccacagcuucuuucaucuacaauggcagacuuguggacuccauugucagcuggucuaaagagauccugcggacccaggaauccgagugugugugcauuaacgggaccuguacaguggucaugacggauggaagcgccuccggcaaggcggacaccaaaauccucuuuaucgaggaagggaagauuguucacacaucuacccugagcggauccgcccaacacguggaggaaugcagcugcuauccucgcuaccccggcgugagaugugucugccgggauaauuggaaggggucuaaccgcccuaucguggacauuaacaucaaagacuacuccauuguuagcagauauguguguucuggacuugucggcgauacaccccggaagaaugacagcuccucuagcucccauugccuggauccgaacaaugaggaaggcgggcacggagugaaaggcugggcuuucgacgaugggaacgacguuuggaugggacgcaccaucagcgagaagucuagauccggcuacgagacguuuaaagugaucgaaggguggagcaauccuaacucuaagcuccagauuaaucggcaggucaucguggaucgcggaaacagauccggcuauagcggcauuuucuccgucgaggggaaaucuuguaucaaucggugcuuuuacguggaacugauuagaggacgcaaggaggaaacagagguucuguggaccagcaacuccaucguggucuucuguggcaccucugggacauauggaaccggcagcuggcccgacggggccgauauuaaucucaugccuaucuga

SEQ ID NO: 213688 - RNA, 1410 nt, Artificial Sequence
  derived and/or modified CDS sequence (opt5) from neuraminidase__InfluenzaA__AEX36523
augaaccccaaucagaagaucauuaccaucggcagcgugucccugacaauuucuacgaucugcuucuuuaugcaaauugccauccucaucaccacagucacccugcacuucaaacaguacgaguuuaacagcccuccgaauaaccagguuaugcuuugugaacccacaauuaucgagagaaauauuaccgaaaucguguaucugacaaacaccacgauugagaaggaaaucugcccuaaacucgcugaguaccggaauugguccaagccccagugugacauuaccggguucgccccuuuuucuaaagauaacagcauccgccuguccgcgggaggcgacaucugggugacaagagagcccuaugucucuugcgauccugacaaguguuaccaauucgcucuugggcagggaaccacacugaauaacgugcauagcaaugauaccguucgggaccgcacgccguauagaacacuccugaugaacgaacugggcgugcccuuucaccucgggaccaagcaggucugcauugccugguccucuagcuccugucaugauggaaaagccuggcugcacgugugcaucacaggcgacgauaagaaugcuaccgccagcuucauuuacaacggccggcuuguugacucuguggucuccuggagcaaagagauccugcgcacccaggaaucugagugugugugcauuaaugggacauguacgguggucaugaccgauggauccgcuagcggcgaggccgacacaaagauccucuuuaucgaagaggggaaaauuguucauaccuccacacugucuggaagcgcgcaacacguggaagagugcuccugcuauccuagauaccccggcgugcggugugucugccgcgauaacuggaaggggagcaacagaccuaucguggacauuaauaucaaggaccacucuauuguuuccagcuacguguguucuggacuugucggcgauacgccccggaaaaacgacagcuccucuagcucccauugccuggauccgaauaacgaagagggcgggcacggagugaagggcugggccuucgacgaugggaaugacguuuggaugggacgcaccaucagcgagaaaucuagacucggcuaugaaacauuuaaggugaucgaggggugguccaacccuaaaagcaagcugcagauuaaucggcaggucaucguggaucgcggaaacagaucuggcuacuccggcauuuucagcgucgaagggaaauccuguaucaaucggugcuuuuauguggagcugauuagaggacgcaaggaagagaccgagguucucuggaccucuaacagcaucguggucuucuguggcacauccgggaccuacggaacaggcucuuggcccgacggggcugauauuaaucugaugccuaucuga

SEQ ID NO: 213689 - RNA, 1410 nt, Artificial Sequence; identical to SEQ ID NO: 208671
  derived and/or modified CDS sequence (opt5) from neuraminidase__InfluenzaA__AEX36534

SEQ ID NO: 213690 - RNA, 1410 nt, Artificial Sequence
  derived and/or modified CDS sequence (opt5) from neuraminidase__InfluenzaA__AEX36545
augaaccccaaucagaagaucauuaccaucggcagcgugucccugacaauuucuacgaucugcuucuuuaugcaaauugccauccucaucaccacagucacccugcacuucaaacaguacgaguuuaacagcccuccgaauaaccagguuaugcuuugugaacccacaauuaucgagagaaauauuaccgaaaucguguaucugacaaacaccacgauugagaaggaaaucugcccuaaacucgcugaguaccggaauugguccaagccccagugugacauuaccggguucgccccuuuuucuaaagauaacagcauccgccuguccgcgggaggcgacaucugggugacaagagagcccuaugucucuugcgauccugacaaguguuaccaauucgcucuugggcagggaaccacacugaauaacgugcauagcaaugauaccguucgggaccgcacgccguauagaacacuccugaugaacgaacugggcgugcccuuucaccucgggaccaagcaggucugcauugccugguccagcagcuccugucaugauggaaaagccuggcugcacgugugcaucacaggcgacgauaagaaugcuaccgccagcuucauuuacaacggccggcuuguugacucuguggucuccuggagcaaagagauccugcgcacccaggaaucugagugugugugcauuaaugggacauguacgguggucaugaccgauggauccgcucucggcaaggccgacacaaaaauccuguuuaucgaggaagggaagauuguucauaccagcacacuuuccggaucugcgcaacacguggaggaaugcagcugcuauccuagauaccccggcgugcggugugucugccgcgauaacuggaagggguccaacagaccuaucguggacauuaauaucaaagaccacagcauuguuucuuccuacguguguagcggacuggucggcgauacgccccggaagaacgacucuagcuccucuagccauugccucgauccgaauaacgaggaaggcgggcacggagugaaaggcugggccuucgacgaugggaaugacguuuggaugggacgcaccaucuccgagaagucuagacugggcuaugagacauuuaaagugaucgaaggguggucuaacccuaaguccaaacugcagauuaaucggcaggucaucguggaucgcggaaacagaagcggcuacucuggcauuuucuccgucgagggaaagagcuguaucaaucggugcuuuuauguggaacucauuagagggcgcaaggaggaaaccgagguucuguggaccuccaacucuaucguggucuucuguggcacaagcgggaccuacggaacaggcuccuggcccgacggggcugauauuaaucuuaugccuaucuga

SEQ ID NO: 213691 - RNA, 1410 nt, Artificial Sequence; identical to SEQ ID NO: 208584
  derived and/or modified CDS sequence (opt5) from neuraminidase__InfluenzaA__AEX36556

SEQ ID NO: 213692 - RNA, 1410 nt, Artificial Sequence; identical to SEQ ID NO: 208584
  derived and/or modified CDS sequence (opt5) from neuraminidase__InfluenzaA__AEX36567

SEQ ID NO: 213693 - RNA, 1410 nt, Artificial Sequence
  derived and/or modified CDS sequence (opt5) from neuraminidase__InfluenzaA__AEX36578
augaaccccaaucagaagaucauuaccaucggcagcgugucccugacaauuucuacgaucugcuucuuuaugcaaauugccauccucaucaccacagucacccugcacuucaaacaguacgaguuuaacagcccuccgaauaaccagguuaugcuuugugaacccacaauuaucgagagaaauauuaccgaaaucguguaucugacaaacaccacgauugagaaggaaaucugcccuaaacucgcugaguaccggaauugguccaagccccagugugacauuaccggguucgccccuuuuucuaaagauaacagcauccgccuguccgcgggaggcgacaucugggugacaagagagcccuaugucucuugcgauccugacaaguguuaccaauucgcucuugggcagggaaccacacugaauaacgugcauagcaaugauaccguucgggaccgcacgccguauagaacacuccugaugaacgaacugggcgugcccuuucaccucgggaccaagcaggucugcauugccugguccucuagcuccugucaugauggaaaagccuggcugcacgugugcaucacaggcgacgauaagaaugcuaccgccagcuucauuuacaacggccggcuuguugacucuguggucuccuggagcaaagagauccugcgcacccaggaaucugagugugugugcauuaaugggacauguacgguggucaugaccgauggauccgcuagcggcaaggccgacacaaaaauccucuuuaucaaggaggggaagauuguucauaccuccacacugucuggaagcgcgcaacacguggaagagugcuccugcuauccuagauaccccggcgugcggugugucugccgcgauaacuggaaagggagcaacagaccuaucguggacauuaauaucaaggaccacucuauuguuuccagcuacguguguucuggacuugucggcgauacgccccggaaaaacgacagcuccucuagcucccauugccuggauccgaauaacgaagagggcgggcacggagugaagggcugggccuucgacgaugggaaugacguuuggaugggacgcaccaucagcgaaaaaucuagacucggcuaugagacauuuaaggugaucgaggggugguccaacccuaaaagcaagcugcagauuaaucggcaggucaucguggaucgcggaaacagaucuggcuacuccggcauuuucagcgucgaagggaaguccuguaucaaucggugcuuuuauguggagcugauuagaggacgcaaagaagagaccgaaguucucuggaccucuaacagcaucguggucuucuguggcacauccgggaccuacggaacaggcucuuggcccgacggggcugauauuaaucugaugccuaucuga

SEQ ID NO: 213694 - RNA, 1410 nt, Artificial Sequence; identical to SEQ ID NO: 213693
  derived and/or modified CDS sequence (opt5) from neuraminidase__InfluenzaA__AEX36589

SEQ ID NO: 213695 - RNA, 1410 nt, Artificial Sequence
  derived and/or modified CDS sequence (opt5) from neuraminidase__InfluenzaA__AEX36600
augaaccccaaucagaagaucauuaccaucggcagcgugucccugacaauuucuacgaucugcuucuuuaugcaaauugccauccucaucaccacagucacccugcacuucaaacaguacgaguuuaacagcccuccgaauaaccagguuaugcuuugugaacccacaauuaucgagagaaauauuaccgaaaucguguaucugacaaacaccacgauugagaaggaaaucugcccuaaacucgcugaguaccggaauugguccaagccccagugugacauuaccggguucgccccuuuuucuaaagauaacagcauccgccuguccgcgggaggcgacaucugggugacaagagagcccuaugucucuugcgauccugacaaguguuaccaauucgcucuugggcagggaaccacacugaauaacgugcauagcaaugauaccguucgggaccgcacgccguauagaacacuccugaugaacgaacugggcgugcccuuucaccucgggaccaagcaggucugcauugccugguccucuagcuccugucaugauggaaaagccuggcugcacgugugcaucacaggcgacgauaagaaugcuaccgccagcuucauuuacaacggccggcuuguugacucuguggucuccuggagcaaagagauccugcgcacccaggaaucugagugugugugcauuaaugggacauguacgguggucaugaccgauggauccgcuagcggcaaggccgacacaaaaauccucuuuaucaaggaggggaagauuguucauaccuccacacugucuggaagcgcgcaacacguggaagagugcuccugcuauccuagauaccccggcgugcggugugucugccgcgauaacuggaaagggagcaacagaccuaucguggacauuaauaucaaggaccacucuauuguuuccagcuacguguguucuggacuugucggcgauacgccccggaaaaacgacagcuccucuagcucccauugccuggauccgaauaacgaagagggcgggcacggagugaagggcugggccuucgacgaugggaauaacguuuggaugggacgcaccaucagcgaaaaaucuagacucggcuaugagacauuuaaggugaucgaggggugguccaauccuaaaagcaagcugcagauuaaccggcaggucaucguggaccgcggaaauagaucuggcuacuccggcauuuucagcgucgaagggaaguccuguaucaaccggugcuuuuauguggagcugauuagaggacgcaaagaagagaccgaaguucucuggaccucuaauagcaucguggucuucuguggcacauccgggaccuacggaacaggcucuuggcccgauggggcugacauuaaccugaugccuaucuga

SEQ ID NO: 213696 - RNA, 1410 nt, Artificial Sequence; identical to SEQ ID NO: 206786
  derived and/or modified CDS sequence (opt5) from neuraminidase__InfluenzaA__AEX36622

SEQ ID NO: 213697 - RNA, 1410 nt, Artificial Sequence
  derived and/or modified CDS sequence (opt5) from neuraminidase__InfluenzaA__AEX63619
augaaccccaaucagaagaucauuaccaucggcagcauuugcaugacaaucgggauugccucccugauccuccaaaucggaaacauuaucucuauuuggaucagccacuccauucagacggagaaucagaaccagccugaaaucuguaaucaaaacgugauuaccuacgagaauaacacaugggucaaucagaccuauguuaacgugucuaauacaaacuucguggcugaacaggccgucgcgagcgugaaacuggcuggcaauuccucucuuugcccgguuagcgggugggccaucuacuccaaggacaacagcgugagaaucggaucuaaaggcgaugucuuugugauucgggagcccuucaucuccuguagccauucugaaugccgcaccuuuuuccugacacagggggcccuccugaaugacaagcacuccaacggaaccauuaaagauagaagcccuuaucggacgcuuaugucuugucccaucggcgagguuccuucccccuacaacagccgcuuugaguccguggcuuggucugccagcgcuugccaugacggcaccuccuggcugacaauugggaucagcggaccugauaauggcgccgucgcggugcucaaguauaacgggaucauuaccgacacaaucaagucuuggcggaaaaauauucugagaacccaagaauccgagugugccugcgugaacggaagcuguuucacggucaugacagauggcccgucuaaugggcaggcuagcuacaagguuuuuaaaaucgaacgcggaaagguggugaaauccgucgagcugaacgcccccaauuaucacuacgaggaaugcucuuguuacccugagagcuccgaaauuaccugcgugugcagagacaacuggcauggcagcaaucggcccuggguuucuuucaaccagaaucucgaguaucagaugggcuacaucuguuccgggaucuuuggagauaacccucgccccaaugacaagacaggcagcugcgggccgguguucucuaacggagcuaauggcgucaagggguuuuccuucaaauauggaaacggcguguggauuggcagaaccaagagcaccuccucucggaugggguuugaaaugaucugggauccugacggauggacaaaaacggaugacaaguucagcguuaaacaagacauuaucggcauuaccgauugguccggguacucuggcagcuucgugcagcaccccgagcugacaggacuugacuguaugcgcccuugcuuuugggucgagcugaucagagggcggcccaaggaaaacaccauuuggacauccggcagcucuaucuccuucuguggagugaauagcgauaccgucggcuggucuuggcccgacggggccgagcucccuuuuacgaucgauaaauga

SEQ ID NO: 213698 - RNA, 1365 nt, Artificial Sequence; identical to SEQ ID NO: 207791
  derived and/or modified CDS sequence (opt5) from neuraminidase__InfluenzaA__AEX92876

SEQ ID NO: 213699 - RNA, 1365 nt, Artificial Sequence; identical to SEQ ID NO: 207791
  derived and/or modified CDS sequence (opt5) from neuraminidase__InfluenzaA__AEX92887

SEQ ID NO: 213700 - RNA, 1365 nt, Artificial Sequence; identical to SEQ ID NO: 207791
  derived and/or modified CDS sequence (opt5) from neuraminidase__InfluenzaA__AEX92904

SEQ ID NO: 213701 - RNA, 1365 nt, Artificial Sequence; identical to SEQ ID NO: 207791
  derived and/or modified CDS sequence (opt5) from neuraminidase__InfluenzaA__AEX96924

SEQ ID NO: 213702 - RNA, 1410 nt, Artificial Sequence; identical to SEQ ID NO: 210541
  derived and/or modified CDS sequence (opt5) from neuraminidase__InfluenzaA__AEY69091

SEQ ID NO: 213703 - RNA, 1410 nt, Artificial Sequence; identical to SEQ ID NO: 208671
  derived and/or modified CDS sequence (opt5) from neuraminidase__InfluenzaA__AEY69101

SEQ ID NO: 213704 - RNA, 1410 nt, Artificial Sequence; identical to SEQ ID NO: 208671
  derived and/or modified CDS sequence (opt5) from neuraminidase__InfluenzaA__AEY69112

SEQ ID NO: 213705 - RNA, 1410 nt, Artificial Sequence
  derived and/or modified CDS sequence (opt5) from neuraminidase__InfluenzaA__AEY69145
augaacaccaaucagaagaucauuacaaucggcagcgugucccugacgauuucuaccaucugcuucuuuaugcaaauugccauccucaucacaaccgucacacugcacuucaaacaguacgaguuuaacagcccgccuaauaaccagguuaugcuuugugaaccgaccauuaucgagagaaauauuacagaaaucguguaucugaccaacacgaccauugagaaggaaaucugccccaaacucgcugaguaccggaauugguccaagccucagugugacauuacaggguucgcccccuuuucuaaagauaacagcauccgccuguccgcgggaggcgacaucugggugaccagagagccuuaugucucuugcgaucccgacaaguguuaccaauucgcucuugggcagggaacaaccauuaauaacgugcauagcaauaacacgguucgggaucgcacaccuuauagaacccugcucaugaaugaacugggcgugccguuucaccuggggacaaagcaggucugcaucgccugguccucuagcuccugucaugacggaaaagccuggcuccacgugugcauuaccggcgaugacaagaacgcuaccgccagcuucaucuacaauggccggcugguugauucuguggucuccuggagcaaagagauucuucgcacacaggaaucugagugugugugcaucaacgggacguguaccguggucaugacagacggauccgcuagcggcaaggccgauaccaaaauccuguuuauugaggaagggaagaucguucauacauccacccucucuggaagcgcgcaacacguggaggaaugcuccugcuaucccagauacccuggcgugcggugugucugccgcgacaacuggaaggggagcaauagacccauuguggauaucaacaugaaagaccacucuauuguuuccagcuacguguguucuggacuggucggcgacacgccucggaagaaugauagcuccucuagcucccauugccuugaccccaacaaugaggaaggcgggcacggagugaaaggcugggccuucgaugacgggaacgauguuuggaugggacgcacaaucagcgagaagucuagacugggcuaugagaccuuuaaagugaucgaagggugguccaaucccaagagcaaacuccagauuaaccggcaggucaucguggaccgcggaaauagaucuggcuacuccggcauuuucagcgucgaggggaaguccuguaucaaccggugcuuuuauguggaacugauuagaggacgcaaggaggaaaccgagguucuguggacaucuaauagcguggucguguucuguggcaccuccgggacauacggaacgggcucuuggccugauggggcugacaucaaccucaugcccauuuga

SEQ ID NO: 213706 - RNA, 1410 nt, Artificial Sequence; identical to SEQ ID NO: 208671
  derived and/or modified CDS sequence (opt5) from neuraminidase__InfluenzaA__AEY69156

SEQ ID NO: 213707 - RNA, 1410 nt, Artificial Sequence
  derived and/or modified CDS sequence (opt5) from neuraminidase__InfluenzaA__AEY69167
augaaccccaaucagaagaucauuaccaucggcagcgugucccugacaauuucuacgaucugcuucuuuaugcaaauugccauccucaucaccacagucacccugcacuucaaacaguacgaguuuaacagcccuccgaauaaccagguuaugcuuugugaacccacaauuaucgagagaaauauuaccgaaaucguguaucugacaaacaccacgauugagaaggaaaucugcccuaaacucgcugaguaccggaauugguccaagccccagugugacauuaccggguucgccccuuuuucuaaagauaacagcauccgccuguccgcgggaggcgacaucugggugacaagagagcccuaugucucuugcgauccugacaaguguuaccaauucgcucuugggcagggaaccacacugaauaacgugcauagcaauaacaccguucgggaucgcacgccguauagaacacuccugaugaaugaacugggcgugcccuuucaccucgggaccaagcaggucugcauugccugguccucuagcuccugucaugacggaaaagccuggcugcacgugugcaucacaggcgaugacaagaacgcuaccgccagcuucauuuacaauggccggcuuguugauucuguggucuccuggagcaaagagauccugcgcacccaggaaucugagugugugugcauuaacgggacauguacgguggucaugaccgacggauccgcuagcggcaaggccgauacaaaaauccucuuuaucgaggaagggaagauuguucauaccuccacacugucuggaagcgcgcaacacguggaggaaugcuccugcuauccuagauaccccggcgugcggugugucugccgcgacaacuggaaggggagcaauagaccuaucguggauauuaacaucaaagaccacucuauuguuuccagcuacguguguucuggacuugucggcgacacgccccggaagaaugauagcuccucuagcucccauugccuggacccgaacaaugaggaaggcgggcacggagugaaaggcugggccuucgaugacgggaacgauguuuggaugggacgcaccaucagcgagaagucuagacucggcuaugagacauuuaaagugaucgaagggugguccaauccuaagagcaaacugcagauuaaccggcaggucaucguggaccgcggaaauagaucuggcuacuccggcauuuucagcgucgaggggaaguccuguaucaaccggugcuuuuauguggaacugauuagaggacgcaaggaggaaaccgagguucucuggaccucuaauagcaucguggucuucuguggcacauccgggaccuacggaacaggcucuuggcccgauggggcugacauuaaccugaugccuguguga

SEQ ID NO: 213708 - RNA, 1410 nt, Artificial Sequence; identical to SEQ ID NO: 213707
  derived and/or modified CDS sequence (opt5) from neuraminidase__InfluenzaA__AEY69178

SEQ ID NO: 213709 - RNA, 1410 nt, Artificial Sequence; identical to SEQ ID NO: 213707
  derived and/or modified CDS sequence (opt5) from neuraminidase__InfluenzaA__AEY69189

SEQ ID NO: 213710 - RNA, 1410 nt, Artificial Sequence
  derived and/or modified CDS sequence (opt5) from neuraminidase__InfluenzaA__AEY69211
augaaccccaaucagaagaucauuaccaucggcagcgugucccugacaauuucuacgaucugcuucuuuaugcaaauugccauccucaucaccacagucacccugcacuucaaacaguacaaguuuaacagcccuccgaauaaccagguuaugcuuugugagcccacaauuaucgaaagaaauauuaccgagaucguguaucugacaaacaccacgauugaaaaagagaucugcccuaagcucgcugaauaccggaauugguccaaaccccagugugacauuaccggguucgccccuuuuucuaaggauaacagcauccgccuguccgcgggaggcgacaucugggugacaagagagcccuaugucucuugcgauccugacaaguguuaccaauucgcucuugggcagggaaccacacugaauaacgugcauagcaauaacaccguucgggaucgcacgccguauagaacacuccugaugaaugagcugggcgugcccuuucaccucgggaccaaacaggucugcauugccugguccucuagcuccugucaugacggaaaggccuggcugcacgugugcaucacaggcgaugacaaaaacgcuaccgccagcuucauuuacaauggccggcuuguugauucuguggucuccuggagcaaggaaauccugcgcacccaggagucugaaugugugugcauuaacgggacauguacgguggucaugaccgacggauccgcuagcggcaaagccgauacaaagauccucuuuaucgaggaggggaagauuguucauaccuccacacugucuggaagcgcgcaacacguggaagagugcuccugcuauccuagauaccccggcgugcggugugucugccgcgacaacuggaaagggagcaauagaccuaucguggauauuaacaucaaggaccacucuauuguuuccagcuacguguguucuggacuugucggcgacacgccccggaaaaaugauagcuccucuagcucccauugccuggacccgaacaaugaagagggcgggcacggagugaagggcugggccuucgaugacgggaacgauguuuggaugggacgcaccaucagcgaaaaaucuagacucggcuaugagacauuuaaggugaucgaggggugguccaauccuaaaagcaagcugcagauuaaccggcaggucaucguggaccgcggaaauagaucuggcuacuccggcauuuucagcgucgaagggaaguccuguaucaaccggugcuuuuauguggagcugauuagaggacgcaaagaagagaccgaaguucucuggaccucuaauagcaucguggucuucuguggcacauccgggaccuacggaacaggcucuuggcccgauggggcugacauuaaccugaugccuguguga

SEQ ID NO: 213711 - RNA, 1410 nt, Artificial Sequence; identical to SEQ ID NO: 213707
  derived and/or modified CDS sequence (opt5) from neuraminidase__InfluenzaA__AEY69233

SEQ ID NO: 213712 - RNA, 1410 nt, Artificial Sequence; identical to SEQ ID NO: 213707
  derived and/or modified CDS sequence (opt5) from neuraminidase__InfluenzaA__AEY69272

SEQ ID NO: 213713 - RNA, 1410 nt, Artificial Sequence; identical to SEQ ID NO: 213707
  derived and/or modified CDS sequence (opt5) from neuraminidase__InfluenzaA__AEY69283

SEQ ID NO: 213714 - RNA, 1410 nt, Artificial Sequence
  derived and/or modified CDS sequence (opt5) from neuraminidase__InfluenzaA__AEY69294
augaaccccaaucagaagaucauuaccaucggcagcgugucccugacaauuucuacgaucugcuucuuuaugcaaaccgccauucucaucacaaccgucacacugcacuucaaacagugugaguuuaacagcccuccgaauaaccagguuaugcuuugcgaacccaccaucauugagagaaauaucacagaaauuguguaccugaccaacacgaccaucgagaaggaaauuuguccuaaacucgcugaguaucggaauugguccaagccccagugcgacaucacaggguucgccccuuuuucuaaagauaacagcauucgccuguccgcgggaggcgacaucugggugaccagagagcccuacgucucuugugauccugacaagugcuaucaauucgcucuugggcagggaacaacccugaauaacgugcauagcaauaacacgguucgggaucgcacaccguacagaacccuccugaugaaugaacugggcgugcccuuucaccucgggacaaagcaggucuguaucgccugguccucuagcuccugccaugacggaaaagccuggcugcacguguguauuaccggcgaugacaagaacgcuaccgccagcuucaucuauaauggccggcuuguugauucuguggucuccuggagcaaagagauucugcgcacacaggaaucugagugcguguguaucaacgggacgugcaccguggucaugacagacggauccgcuagcggcaaggccgauaccaaaauucucuuuaucgaggaagggaagaucguucauacauccacccugucuggaagcgcgcaacacguggaggaaugcuccuguuacccuagauaucccggcgugcggugcgucugucgcgacaacuggaaggggagcaauagaccuauuguggauaucaacauuaaagaccacucuaucguuuccagcuacgugugcucuggacuugucggcgacacgccccggaagaaugauagcuccucuagcucccauugucuggacccgaacaaugaggaaggcgggaacggagugaaaggcugggccuucgaugacgggaaugauguuuggaugggacgcacaauuagcgagaagucuagacucggcuacgagaccuuuaaagugaucgaagggugguccaacccuaagagcaaacugcagaucaaucggcaggucauuguggaccgcggaaacagaucuggcuauuccggcaucuucagcgucgaggggaaguccugcauuaaucgguguuuuuacguggaacugaucagaggacgcaaggaggaaaccgagguucucuggacaucuaacagcauuguggucuucugcggcaccuccgggacauauggaacgggcucuuggcccgauggggcugacaucaaucugaugccuauuuga

SEQ ID NO: 213715 - RNA, 1410 nt, Artificial Sequence; identical to SEQ ID NO: 213714
  derived and/or modified CDS sequence (opt5) from neuraminidase__InfluenzaA__AEY69305

SEQ ID NO: 213716 - RNA, 1410 nt, Artificial Sequence; identical to SEQ ID NO: 213714
  derived and/or modified CDS sequence (opt5) from neuraminidase__InfluenzaA__AEY69316

SEQ ID NO: 213717 - RNA, 1410 nt, Artificial Sequence; identical to SEQ ID NO: 213714
  derived and/or modified CDS sequence (opt5) from neuraminidase__InfluenzaA__AEY69788

SEQ ID NO: 213718 - RNA, 1410 nt, Artificial Sequence; identical to SEQ ID NO: 208671
  derived and/or modified CDS sequence (opt5) from neuraminidase__InfluenzaA__AEY69799

SEQ ID NO: 213719 - RNA, 1410 nt, Artificial Sequence; identical to SEQ ID NO: 208671
  derived and/or modified CDS sequence (opt5) from neuraminidase__InfluenzaA__AEY69810

SEQ ID NO: 213720 - RNA, 1410 nt, Artificial Sequence; identical to SEQ ID NO: 213707
  derived and/or modified CDS sequence (opt5) from neuraminidase__InfluenzaA__AEY69832

SEQ ID NO: 213721 - RNA, 1410 nt, Artificial Sequence
  derived and/or modified CDS sequence (opt5) from neuraminidase__InfluenzaA__AEY69843
augaaccccaaucagaagaucauuaccaucggcagcgugucccugacaauuucuacgaucugcuucuuuaugcaaauugccauccucaucaccacagucacccugcacuucaaacaguacgaguuuaacagcccuccgaauaaccagguuaugcuuugugaacccacaauuaucgagagaaauauuaccgaaaucguguaucugacaaacaccacgauugagaaggaaaucugcccuaaacucgcugaguaccggaauugguccaagccccagugugacauuaccggguucgccccuuuuucuaaagauaacagcauccgccuguccgcgggaggcgacaucugggugacaagagagcccuaugucucuugcgauccugacaaguguuaccaauucgcucuugggcagggaaccacacugaauaacgugcauagcaauaacaccguucgggaucgcacgccguauagaacacuccugaugaaugaacugggcgugcccuuucaccucgggaccaagcaggucugcauugccugguccucuagcuccugucaugacggaaaagccuggcugcacgugugcaucgcuggcgaugacaagaacgccacagcuagcuucauuuacaauggccggcuuguugauucuguggucuccuggagcaaagagauccugcgcacccaggaaucugagugugugugcauuaacgggaccuguacaguggucaugacggacggauccgccagcggcaaggcggauaccaaaauccucuuuaucgaggaagggaagauuguucauacauccacccugucuggaagcgcccaacacguggaggaaugcuccugcuauccuagauaccccggcgugcggugugucugccgcgacaacuggaaggggagcaauagaccuaucguggauauuaacaucaaagaccacucuauuguuuccagcuacguguguucuggacuugucggcgacacaccccggaagaaugauagcuccucuagcucccauugccuggacccgaacaaugaggaaggcgggcacggagugaaaggcugggcuuucgaugacgggaacgauguuuggaugggacgcaccaucagcgagaagucuagacucggcuaugagacguuuaaagugaucgaagggugguccaauccuaagagcaaacugcagauuaaccggcaggucaucguggaccgcggaaauagaucuggcuacuccggcauuuucagcgucgaggggaaguccuguaucaaccggugcuuuuauguggaacugauuagaggacgcaaggaggaaacagagguucucuggaccucuaauagcaucguggucuucuguggcaccuccgggacauacggaaccggcucuuggcccgauggggccgacauuaaccugaugccuguguga

SEQ ID NO: 213722 - RNA, 1410 nt, Artificial Sequence; identical to SEQ ID NO: 213707
  derived and/or modified CDS sequence (opt5) from neuraminidase__InfluenzaA__AEY69854

SEQ ID NO: 213723 - RNA, 1410 nt, Artificial Sequence; identical to SEQ ID NO: 213707
  derived and/or modified CDS sequence (opt5) from neuraminidase__InfluenzaA__AEY69876

SEQ ID NO: 213724 - RNA, 1410 nt, Artificial Sequence; identical to SEQ ID NO: 213707
  derived and/or modified CDS sequence (opt5) from neuraminidase__InfluenzaA__AEY69887

SEQ ID NO: 213725 - RNA, 1410 nt, Artificial Sequence; identical to SEQ ID NO: 213707
  derived and/or modified CDS sequence (opt5) from neuraminidase__InfluenzaA__AEY69898

SEQ ID NO: 213726 - RNA, 1410 nt, Artificial Sequence; identical to SEQ ID NO: 208671
  derived and/or modified CDS sequence (opt5) from neuraminidase__InfluenzaA__AEY69909

SEQ ID NO: 213727 - RNA, 1410 nt, Artificial Sequence
  derived and/or modified CDS sequence (opt5) from neuraminidase__InfluenzaA__AEY69942
augaaccccaaucagaagaucauuaccaucggcagcgugucccugacaauuucuacgaucugcuucuuuaugcaaauugccauccucaucaccacagucacccugcacuucaaacaguacgaguuuaacagcccuccgaauaaccagguuaugcuuugugaacccacaauuaucgagagaaauauuaccgaaaucguguaucugacaaacaccacgauugagaaggaaaucugcccuaaacucgcugaguaccggaauugguccaagccccagugugacauuaccggguucgccccuuuuucuaaagauaacagcauccgccuguccgacggaggcgauaucugggugacaagagagcccuaugucucuugcgacccugauaaguguuaccaauucgcgcuugggcagggaaccacacugaauaacauucauagcaauaacaccgugcgggaccgcacgccguauagaacacuccugaugaaugaacugggcguucccuuucaccucgggaccaaacaggugugcaucgcuugguccucuagcuccugucaugauggaaaggccuggcugcacgucugcauuacaggcgacgauaagaacgccaccgcuagcuucaucuacaauggccggcuuguggacucuguuguguccuggagcaaagagauucugcgcacccaggaaucugagugugucugcaucaacgggacauguacgguggugaugaccgauggauccgccagcggcaaggcugacacaaaaauccucuuuauugaggaagggaagaucguccauaccuccacacugucuggaagcgcccaacacguugaggaaugcuccugcuauccuagauaccccggcgugcggugugugugccgcgauaacuggaaggggagcaauagaccuauugucgacaucaacauuaaagaccacucuaucguguccagcuacguuuguucuggacuugugggcgauacgccccggaagaaugacagcuccucuagcucccauugccuggauccgaacaaugaggaaggcgggcacggagucaaaggcugggcguucgacgaugggaacgacguguggaugggacgcaccaucagcgagaagucuagacucggcuaugagacauuuaaaguuauugaagggugguccaauccuaagagcaaacugcagaucaaccgccaggugauugucgaucggggaaauagaucuggcuacuccggcaucuucagcguggaggggaaguccuguauuaaccggugcuuuuaugucgaacugaucagaggacgcaaggaggaaaccgaggugcucuggaccucuaauagcauuguuguguucuguggcacauccgggaccuacggaacaggcucuuggcccgacggggccgauaucaaccugaugccugucuga

SEQ ID NO: 213728 - RNA, 1410 nt, Artificial Sequence; identical to SEQ ID NO: 213727
  derived and/or modified CDS sequence (opt5) from neuraminidase__InfluenzaA__AEY69953

SEQ ID NO: 213729 - RNA, 1410 nt, Artificial Sequence; identical to SEQ ID NO: 213727
  derived and/or modified CDS sequence (opt5) from neuraminidase__InfluenzaA__AEY69964

SEQ ID NO: 213730 - RNA, 1410 nt, Artificial Sequence; identical to SEQ ID NO: 213707
  derived and/or modified CDS sequence (opt5) from neuraminidase__InfluenzaA__AEY69975

SEQ ID NO: 213731 - RNA, 1410 nt, Artificial Sequence; identical to SEQ ID NO: 213707
  derived and/or modified CDS sequence (opt5) from neuraminidase__InfluenzaA__AEY69986

SEQ ID NO: 213732 - RNA, 1410 nt, Artificial Sequence; identical to SEQ ID NO: 213707
  derived and/or modified CDS sequence (opt5) from neuraminidase__InfluenzaA__AEY69997

SEQ ID NO: 213733 - RNA, 1410 nt, Artificial Sequence; identical to SEQ ID NO: 213707
  derived and/or modified CDS sequence (opt5) from neuraminidase__InfluenzaA__AEY70008

SEQ ID NO: 213734 - RNA, 1410 nt, Artificial Sequence; identical to SEQ ID NO: 213707
  derived and/or modified CDS sequence (opt5) from neuraminidase__InfluenzaA__AEY70019

SEQ ID NO: 213735 - RNA, 1410 nt, Artificial Sequence; identical to SEQ ID NO: 213707
  derived and/or modified CDS sequence (opt5) from neuraminidase__InfluenzaA__AEY70259

SEQ ID NO: 213736 - RNA, 1410 nt, Artificial Sequence; identical to SEQ ID NO: 213707
  derived and/or modified CDS sequence (opt5) from neuraminidase__InfluenzaA__AEY70270

SEQ ID NO: 213737 - RNA, 1410 nt, Artificial Sequence; identical to SEQ ID NO: 213707
  derived and/or modified CDS sequence (opt5) from neuraminidase__InfluenzaA__AEY70281

SEQ ID NO: 213738 - RNA, 1410 nt, Artificial Sequence; identical to SEQ ID NO: 208671
  derived and/or modified CDS sequence (opt5) from neuraminidase__InfluenzaA__AEY70303

SEQ ID NO: 213739 - RNA, 1410 nt, Artificial Sequence; identical to SEQ ID NO: 208671
  derived and/or modified CDS sequence (opt5) from neuraminidase__InfluenzaA__AEY70314

SEQ ID NO: 213740 - RNA, 1410 nt, Artificial Sequence
  derived and/or modified CDS sequence (opt5) from neuraminidase__InfluenzaA__AEY70325
augaaccccaaucagaagaucauuaccaucggcagcgugucccugacaauuucuacgaucugcuucuuuaugcaaauugccauccucaugaccacagucacccugcacuucaaacaguacgaguuuaacccuccgcccaauaaccagguuaugcuuugugaaccuacaaucauugagagaaauaucaccgaaauuguguaucugacaaacaccacgaucgagaaggaaauuugccccaaacucgcugaguaccggaauuggagcaagccucagugugacaucaccggguucgcccccuuuuccaaagauaacucuauucgccugagcgcgggaggcgacaucugggugacaagagagccuuaugucuccugcgauccggacaaguguuaccaauucgcucuugggcagggaaccacacugaauaacgugcauucuaauaacaccguucgggaucgcacgcccuauagaacacuccugaugaaugaacugggcgugccuuuucaccucgggaccaagcaggucugcaucgccuggagcuccagcucuugucaugacggaaaagccuggcugcacgugugcauuacaggcgaugacaagaacgcuaccgccuccuucaucuacaauggccggcuuguugauagcguggucucuugguccaaagagauucugcgcacccaggaaagcgagugugugugcaucaacgggacauguacgguggucaugaccgacggaucugcuuccggcaaggccgauacaaaaauucucuuuaucgaggaagggaagaucguucauaccagcacacuguccggaucugcgcaacacguggaggaaugcagcugcuaucccagauacccuggcgugcggugugucugccgcgacaacuggaagggguccaauagacccauuguggauaucaacauuaaagaccacagcaucguuucuuccuacguguguagcggacuugucggcgacaccccgcggaagaaugauucuagcuccucuagccauugccuggacccuaacaaugaggaaggcgggcacggagugaaaggcugggccuucgaugacgggaacgauguuuggaugggacgcacgauuuccgaaaagagcagacucggcuaugagacauuuaaagugaucgagggguggucuaaucccaaguccaaacugcagaucaaccggcaggucauuguggaccgcggaaauagaagcggcuacucuggcaucuucuccgucgagggaaagagcuguauuaaccggugcuuuuauguggaacugaucagagggcgcaaggaggaaaccgagguucucuggaccuccaauucuauuguggucuucuguggcacaagcgggaccuacggaacaggcuccuggccugauggggcugacaucaaccugaugcccguguga

SEQ ID NO: 213741 - RNA, 1410 nt, Artificial Sequence
  derived and/or modified CDS sequence (opt5) from neuraminidase__InfluenzaA__AEY70336
augaaccccaaucagaagaucauuaccaucggcagcgugucccugacaauuucuacgaucugcuucuuuaugcaaauugccauccucaucaccacagucacccugcacuucaaacaguacgaguuuaacagcccuccgaauaaccagguuaugcuuugugaacccacaauuaucgagagaaauauuaccgaaaucguguaucugacaaacaccacgauugagaaggaaaucugcccuaaacucgcugaguaccggaauugguccaagccccagugugacauuaccggguucgccccuuuuucuaaagauaacagcauccgccuguccgcgggaggcgacaucugggugacaagagagcccuaugucucuugcgauccugacaaguguuaccaauucgcucuugggcagggaaccacacugaauaacgugcauagcaauaacaccguucgggaucgcacgccguauagaacacuccugaugaaugaacugggcgugcccuuucaccucgggaccaagcaggucugcauugccugguccucuagcuccugucaugacggaaaagccuggcugcacgugugcaucacaggcgaugacaagaacgcuaccgccagcuucauuuacaauggccggcuuguugauucuguggucuccuggagcaaagagauccugcgcacccaggaaucugagugugugugcauuaacgggacauguacgguggucaugaccgacggauccgcuagcggcaaggccgauacaaaaauccucuuuaucgaggaagggaagauuguucauaccuccacacugucuggaagcgcgcaacacguggaggaaugcuccugcuauccuagauaccccggcgugcgguguaucugccgcgacaacuggaaggggagcaauagaccuauugucgauaucaacauuaaagaccacucuaucguguccagcuacguuuguucuggacuugugggcgacacgccccggaagaaugauagcuccucuagcucccauugccuggacccgaacaaugaggaaggcgggcacggagucaaaggcugggccuucgaugacgggaacgauguguggaugggacgcaccaucagcgagaagucuagacucggcuaugagacauuuaaaguuauugaagggugguccaauccuaagagcaaacugcagaucaaccgccaggugauugucgaccggggaaauagaucuggcuacuccggcaucuucagcguggaggauaaguccuguauuaaccggugcuuuuaugucgaacugaucagagggcgcaaggaggaaaccgaggugcucuggaccucuaauagcauuguuguguucuguggaacauccggcaccuacgggacaggaucuuggcccgacggcgcugauaucaaccugaugccugucuga

SEQ ID NO: 213742 - RNA, 1410 nt, Artificial Sequence; identical to SEQ ID NO: 208810
  derived and/or modified CDS sequence (opt5) from neuraminidase__InfluenzaA__AEY70358

SEQ ID NO: 213743 - RNA, 1410 nt, Artificial Sequence; identical to SEQ ID NO: 208671
  derived and/or modified CDS sequence (opt5) from neuraminidase__InfluenzaA__AEY70379

SEQ ID NO: 213744 - RNA, 1410 nt, Artificial Sequence; identical to SEQ ID NO: 210433
  derived and/or modified CDS sequence (opt5) from neuraminidase__InfluenzaA__AFB70139

SEQ ID NO: 213745 - RNA, 1410 nt, Artificial Sequence; identical to SEQ ID NO: 208810
  derived and/or modified CDS sequence (opt5) from neuraminidase__InfluenzaA__AFB70141

SEQ ID NO: 213746 - RNA, 1410 nt, Artificial Sequence; identical to SEQ ID NO: 210433
  derived and/or modified CDS sequence (opt5) from neuraminidase__InfluenzaA__AFB70147

SEQ ID NO: 213747 - RNA, 1410 nt, Artificial Sequence; identical to SEQ ID NO: 208810
  derived and/or modified CDS sequence (opt5) from neuraminidase__InfluenzaA__AFB70153

SEQ ID NO: 213748 - RNA, 1410 nt, Artificial Sequence; identical to SEQ ID NO: 208810
  derived and/or modified CDS sequence (opt5) from neuraminidase__InfluenzaA__AFB70155

SEQ ID NO: 213749 - RNA, 1410 nt, Artificial Sequence; identical to SEQ ID NO: 209780
  derived and/or modified CDS sequence (opt5) from neuraminidase__InfluenzaA__AFB70157

SEQ ID NO: 213750 - RNA, 1410 nt, Artificial Sequence; identical to SEQ ID NO: 208810
  derived and/or modified CDS sequence (opt5) from neuraminidase__InfluenzaA__AFB70159

SEQ ID NO: 213751 - RNA, 1410 nt, Artificial Sequence
  derived and/or modified CDS sequence (opt5) from neuraminidase__InfluenzaA__AFB70161
augaaccccaaucagaagaucauuaccaucggcagcgugugcaugacaauugggauggccaaccugauccuccaaauuggaaauaucaucuccauuuggaucucucacagcauucagcugggcaaccagaaucagaucgagacguguaaccaauccgucauuaccuacgaaaauaacacauggguuaaucagaccuaugugaacaucucuaauacaaacuucgcugccgggcagagcguggucuccgugaaacuugcgggaaauucuagccugugcccuguuuccggcugggcuauuuacagcaaggacaacucuaucagaaucggguccaaaggagauguguuugucauucgggagccguucaucagcuguucuccccucgaaugccgcaccuuuuuccugacacagggcgcccuucugaaugacaagcauuccaacggcaccauuaaagauagaagcccuuaucggacgcucaugucuugucccaucggggaggugccuucccccuacaacagccgcuuugaauccguugccuggucugcuagcgccugccacgacggaauuaauuggcugaccaucggcaucuccgggccugauaacggagcuguggccguccugaaguauaauggcauuaucacagacaccauuaagagcuggagaaacaauauccuccggacacaagagucugagugugcgugcgugaacggguccuguuucaccgugaugacggauggaccgagcgacggccaggccucuuacaaaauuuuucgcaucgaaaagggcaaaaucgucaagagcguugagaugaaugcucccaacuaucauuacgaagagugcuccuguuacccugauucuagcgagauuacaugcgugugcagagacaauuggcacggguccaaccggcccugggugagcuucaaucagaaccuggaauaucagaucggauacauuuguucuggcaucuuuggggauaauccucgccccaacgacaaaaccggauccugcggcccggucagcucuaauggggccaacggagugaagggcuucuccuuuaaguauggcaacgggguuuggauuggaagaacaaaaagcaucuccucucggaauggcuucgagaugauuugggauccuaacggguggaccggaaccgacaauaacuuuagcacaaagcaagacaucgugggcaucaaugaaugguccggguacucuggcagcuucguccagcaucccgagcuuacgggacuggauuguauucgcccuugcuucuggguggaacucaucagaggccggcccaaagagaacaccauuuggacauccgggagcucuaucuccuuuuguggaguuaauagcgacaccgugggcugguauuggcccgauggggcugagcugccuuucacaauugacaaguga

SEQ ID NO: 213752 - RNA, 1410 nt, Artificial Sequence
  derived and/or modified CDS sequence (opt5) from neuraminidase__InfluenzaA__AFB70163
augaaccccaaucagaagaucauuaccaucggcagcgugugcaugacaauugggauggccaaccugauccuccaaauuggaaauaucaucuccauuuggaucucucacagcauucagcugggcaaccagaaucagaucgagacguguaaccaauccgucauuaccuacgaaaauaacacauggguuaaucagaccuaugugaacaucucuaauacaaacuucgcugccgggcagagcguggucuccgugaaacuugcgggaaauucuagccugugcccuguuuccggcugggcuauuuacagcaaggacaacucuaucagaaucggguccaaaggagauguguuugucauucgggagccguucaucagcuguucuccccucgaaugccgcaccuuuuuccugacacagggcgcccuucugaaugacaagcauuccaacggcaccauuaaagauagaagcccuuaucggacgcucaugucuugucccaucggggaggugccuucccccuacaacagccgcuuugaauccguugccuggucugcuagcgccugccacgacggaauuaauuggcugaccaucggcaucuccgggccugauaacggagcuguggccguccugaaguauaauggcauuaucacagacaccauuaagagcuggagaaacaauauccuccggacacaagagucugagugugcgugcgugaacggguccuguuucaccgugaugacggauggaccgagcgacggccaggccucuuacaaaauuuuucgcaucgaaaagggcaaaaucgucaagagcguugagaugaaugcucccaacuaucauuacgaagagugcuccuguuacccugauucuagcgagauuacaugcgugugcagagacaauuggcacggguccaaccggcccugggugagcuucaaucagaaccuggaauaucagaucggauacauuuguucuggcaucuuuggggauaauccucgccccaacgacaaaaccggauccugcggcccggucagcucuaauggggccaacggagugaagggcuucuccuuuaaguauggcaacgggguuuggauuggaagaacaaaaagcaucuccucucggaauggcuucgagaugauuugggauccuaacggguggaccggaaccgacaauaacuuuagcaucaagcaagacaucgugggcauuaaugaaugguccggguacucuggcagcuucguccagcaucccgagcuuacaggacuggauuguauccgcccuugcuucuggguggaacucauuagaggccggcccaaagagaacgcuaucuggacguccgggagcucuauuuccuuuuguggaguuaauagcgacaccgugggcuggucuuggcccgauggggccgagcugccuuucacaaucgacaaguga

SEQ ID NO: 213753 - RNA, 1410 nt, Artificial Sequence
  derived and/or modified CDS sequence (opt5) from neuraminidase__InfluenzaA__AFB70169
augaaccccaaucagaagaucauuaccaucggcagcgugugcaugacaauugggauggccaaccugauccuccaaauuggaaauaucaucuccauuuggaucaaccacucuauucagcugggcaaucagaaccagaucgagacguguaaucaaagcgucauuaccuacgaaaacaauacauggguuaaccagaccuaugugaauaucuccaacacaaauuucgcugccgggcagucuguggucagcgugaaacuugcgggaaacuccucucugugcccuguuagcggcugggcuauuuacuccaaggacaauagcaucagaaucgggucuaaaggagauguguuugucauucgggagccguucaucuccuguagcccccucgaaugccgcaccuuuuuccugacacagggcgcccuucugaacgacaagcauucuaacggcaccauuaaagauagauccccuuaucggacgcucaugagcugucccaucggggaggugccuucucccuacaauucccgcuuugaaagcguugccugguccgcuucugccugccacgacggaauuaacuggcugaccaucggcaucagcgggccugauaauggagcuguggccguccugaaguauaacggcauuaucacagacaccauuaaguccuggagaaauaacauccuccggacacaagagagcgagugugcgugcgugaaugggucuuguuucaccgugaugacggauggaccguccgacggccaggccagcuacaaaauuuuucgcaucgaaaagggcaaaaucgucaagucuguugagaugaacgcucccaauuaucauuacgaagagugcagcuguuacccugauuccucugagauuacaugcgugugcagagacaacuggcacgggagcaaucggcccuggguguccuucaaccagaaucuggaauaucagaucggauacauuuguagcggcaucuuuggggauaacccucgccccaaugacaaaaccggaucuugcggcccggucuccagcaacggggccaacggagugaagggcuucucuuuuaaguauggcaaugggguuuggauuggaagaacaaaauccaucagcucccggaacggcuucgagaugauuugggauccuaauggguggaccggaaccgacaacaauuuuucuaucaagcaagacaucgugggcauuaacgaauggagcggguacuccggcucuuucguccagcaucccgagcuuacaggacuggauuguauccgcccuugcuucuggguggaacucauuagaggccggcccaaagagaauacgaucuggaccagcggguccagcauuucuuuuuguggaguuaacuccgacacagugggcuggagcuggcccgauggggcugagcugccuuucaccaucgacaaguga

SEQ ID NO: 213754 - RNA, 1410 nt, Artificial Sequence; identical to SEQ ID NO: 208810
  derived and/or modified CDS sequence (opt5) from neuraminidase__InfluenzaA__AFB70199

SEQ ID NO: 213755 - RNA, 1410 nt, Artificial Sequence; identical to SEQ ID NO: 208810
  derived and/or modified CDS sequence (opt5) from neuraminidase__InfluenzaA__AFB70209

SEQ ID NO: 213756 - RNA, 1410 nt, Artificial Sequence; identical to SEQ ID NO: 208810
  derived and/or modified CDS sequence (opt5) from neuraminidase__InfluenzaA__AFB70219

SEQ ID NO: 213757 - RNA, 1410 nt, Artificial Sequence; identical to SEQ ID NO: 208810
  derived and/or modified CDS sequence (opt5) from neuraminidase__InfluenzaA__AFB70229

SEQ ID NO: 213758 - RNA, 1410 nt, Artificial Sequence; identical to SEQ ID NO: 208810
  derived and/or modified CDS sequence (opt5) from neuraminidase__InfluenzaA__AFB70239

SEQ ID NO: 213759 - RNA, 1410 nt, Artificial Sequence; identical to SEQ ID NO: 208810
  derived and/or modified CDS sequence (opt5) from neuraminidase__InfluenzaA__AFB70249

SEQ ID NO: 213760 - RNA, 1410 nt, Artificial Sequence; identical to SEQ ID NO: 208810
  derived and/or modified CDS sequence (opt5) from neuraminidase__InfluenzaA__AFB70259

SEQ ID NO: 213761 - RNA, 1410 nt, Artificial Sequence; identical to SEQ ID NO: 209780
  derived and/or modified CDS sequence (opt5) from neuraminidase__InfluenzaA__AFB70269

SEQ ID NO: 213762 - RNA, 1410 nt, Artificial Sequence; identical to SEQ ID NO: 208810
  derived and/or modified CDS sequence (opt5) from neuraminidase__InfluenzaA__AFB70279

SEQ ID NO: 213763 - RNA, 1410 nt, Artificial Sequence; identical to SEQ ID NO: 208810
  derived and/or modified CDS sequence (opt5) from neuraminidase__InfluenzaA__AFB70289

SEQ ID NO: 213764 - RNA, 1410 nt, Artificial Sequence; identical to SEQ ID NO: 208810
  derived and/or modified CDS sequence (opt5) from neuraminidase__InfluenzaA__AFB70299

SEQ ID NO: 213765 - RNA, 1410 nt, Artificial Sequence; identical to SEQ ID NO: 208810
  derived and/or modified CDS sequence (opt5) from neuraminidase__InfluenzaA__AFB70309

SEQ ID NO: 213766 - RNA, 1410 nt, Artificial Sequence; identical to SEQ ID NO: 210433
  derived and/or modified CDS sequence (opt5) from neuraminidase__InfluenzaA__AFB70319

SEQ ID NO: 213767 - RNA, 1410 nt, Artificial Sequence; identical to SEQ ID NO: 208810
  derived and/or modified CDS sequence (opt5) from neuraminidase__InfluenzaA__AFB70329

SEQ ID NO: 213768 - RNA, 1410 nt, Artificial Sequence; identical to SEQ ID NO: 208810
  derived and/or modified CDS sequence (opt5) from neuraminidase__InfluenzaA__AFB70349

SEQ ID NO: 213769 - RNA, 1410 nt, Artificial Sequence; identical to SEQ ID NO: 208810
  derived and/or modified CDS sequence (opt5) from neuraminidase__InfluenzaA__AFB70359

SEQ ID NO: 213770 - RNA, 1410 nt, Artificial Sequence; identical to SEQ ID NO: 208810
  derived and/or modified CDS sequence (opt5) from neuraminidase__InfluenzaA__AFB70369

SEQ ID NO: 213771 - RNA, 1410 nt, Artificial Sequence; identical to SEQ ID NO: 208810
  derived and/or modified CDS sequence (opt5) from neuraminidase__InfluenzaA__AFB70379

SEQ ID NO: 213772 - RNA, 1410 nt, Artificial Sequence; identical to SEQ ID NO: 208810
  derived and/or modified CDS sequence (opt5) from neuraminidase__InfluenzaA__AFB70389

SEQ ID NO: 213773 - RNA, 1410 nt, Artificial Sequence; identical to SEQ ID NO: 208810
  derived and/or modified CDS sequence (opt5) from neuraminidase__InfluenzaA__AFB70399

SEQ ID NO: 213774 - RNA, 1410 nt, Artificial Sequence; identical to SEQ ID NO: 208810
  derived and/or modified CDS sequence (opt5) from neuraminidase__InfluenzaA__AFB70409

SEQ ID NO: 213775 - RNA, 1410 nt, Artificial Sequence
  derived and/or modified CDS sequence (opt5) from neuraminidase__InfluenzaA__AFB77614
augcaccccaaccaggaggugaucagcauugucuccguuugcaugaccaucggcauggccaaucugauucuccaaaucgggaacauuaucucuaucuggauuagccauuccauccagcugggaaaucagaaccagauugaaacauguaaucaaucugugaucacguacgagaacaauaccugggugaaccagacauaugucaauauuagcaacaccaauuucgcugccggccaguccgugguuucugugaaacuugcggggaacagcucccugugcccugucagcggaugggcuaucuacucuaaggacaauuccauuagaaucggcagcaagggggauguguuuguuauccgggaaccguucauuucuuguucuccccucgagugccgcacauuuuuccugacccagggagcccuucugaacgacaaacacagcaauggcacaaucaaggauagaucuccuuaucggacccucauguccugucccauuggcgaagugccuagccccuacaacucccgcuuugagucugucgccuggagcgcuuccgccugccaugacgggaucaacuggcugacgauuggaaucagcggcccugauaauggggcuguggccgugcugaaauauaacggaaucauuaccgacacaaucaagucuuggagaaauaacauucuccggacccaagaguccgaaugugcgugcgucaauggcagcuguuucacaaucaugaccgaugggccgucugacggacaggccagcuacaagauuuuucgcaucgagaaaggcaagaucguuaaauccguggaaaugaacgcucccaauuaucacuacgaggagugcucuuguuacccugauagcuccgaaauuacgugcgugugcagagacaacuggcauggcagcaaucggcccugggucucuuucaaccagaaucuggaguaucagaucggguacauuuguuccggaaucuuuggcgauaacccucgccccaaugacaagacagggagcugcggaccggugucuuccaacggcgccaaugggguuaaaggauucagcuuuaaguauggcaacggcguguggauugggagaaccaaguccaucucuagccggaaaggauucgaaaugauuugggauccuaacggcuggacagggaccgacaauaacuuuuccaucaagcaagacaucgucggaauuaaugaguggucuggcuacagcggguccuucgugcagcaccccgaacuuaccggccuggauuguauccgcccuugcuucuggguugagcucauuagaggacggcccaaagagaacacaaucuggacgagcggcuccuccauuagcuuuuguggggucaauucugacaccgugggaugguucuggcccgauggcgcugaacugccuuuuacaaucgacaaguga

SEQ ID NO: 213776 - RNA, 1410 nt, Artificial Sequence
  derived and/or modified CDS sequence (opt5) from neuraminidase__InfluenzaA__AFB77615
augcaccccaaccaggagaucauuaccuucgugagcgucugcaugacaaucggcauggccaaucugauucuccaaaucgggaacauuaucuccaucuggauuucucauagcauccagcugggaaaucagaaccagauugaaacguguaaucaauccguuaucaccuacgagaacaauacaugggugaaccagaccuaugugaauauuucuaacacaaauuuugcugccggccagagcgucguguccguuaaacuugcggggaacucuagccugugcccuguguccggaugggcuaucuacagcaaggacaauucuauuagaaucggcuccaagggggaugucuucgugauccgggaaccguuuauuagcuguucuccccucgagugccgcaccuucuuucugacacagggagcccuucugaacgacaaacacuccaauggcaccaucaaggauagaagcccuuaucggacgcucaugucuugucccauuggcgaaguuccuucccccuacaacagccgcuucgaguccguggccuggucugcuagcgccugccaugacgggaucaacuggcugaccauuggaaucuccggcccugauaauggggcugucgccgugcugaaauauaacggaaucauuacagacaccaucaagagcuggagaaauaacauucuccggacacaagagucugaaugugcgugcgugaauggcuccuguuuuaccaucaugacggaugggccgagcgacggacaggccucuuacaagauuuuccgcaucgagaaaggcaagaucgucaaaagcguugaaaugaacgcucccaauuaucacuacgaggagugcuccuguuacccugauucuagcgaaauuacaugcgugugcagagacaacuggcauggcuccaaucggcccugggugagcuuuaaccagaaucuggaguaucagaucggguacauuuguucuggaaucuucggcgauaacccucgccccaaugacaagaccggguccugcggaccggucagcucuaacggcgccaauggggugaaaggauuuuccuucaaguauggcaacggcguuuggauugggagaacaaagagcaucuccucucggaaaggauuugaaaugauuugggauccuaacggcuggaccgggaccgacaauaacuucagcaucaagcaagacaucgugggaauuaaugagugguccggcuacucugggagcuucguccagcaccccgaacuuacaggccuggauuguauccgcccuugcuuuuggguggagcucauuagaggacggcccaaagagaacacgaucuggaccuccggcagcucuauuuccuucugugggguuaauagcgacacagugggauggucuuggcccgauggcgcugaacugccuuuuaccaucgacaaguga

SEQ ID NO: 213777 - RNA, 1410 nt, Artificial Sequence
  derived and/or modified CDS sequence (opt5) from neuraminidase__InfluenzaA__AFB78128
augaaccccaaucagaagaucauuaccaucggcagcgugucccugacaauugccacgaucugcuuccucaugcaaauugucauccugguuaccacagugacccuucacuuuaaacagcaugaguguaacucuccuccgaauaaccaggugaugcugugcgaacccacaaucauugagagaaauaucaccgaaauugucuaccucacaaacaccacgaucgagaaggaaauuuguccuaaacuggcugaguaucggaauuggagcaagccccagugcaaaaucaccggguucgccccuuuuuccaaggacaacucuauucgccuuagcgcgggaggcgauaucugggugacaagagagcccuacguuuccugugacccugauaagugcuaucaauucgcucuggggcagggaaccacacucaauaaccggcacucuaaugacaccgugcaugaucgcacgccguacagaacacugcugaugaacgaacucggcguccccuuucaccuggggaccaaacagguguguaucgccuggagcuccagcucuugccaugacggaaaggccuggcuucacguuugugugacaggccacgaugagaaugcuaccgccuccuucauuuaugacggccggcuggucgauagcaucgggucuugguccaaaaagauucuccgcacccaggaaagcgagugcguguguaucaacggaacaugcacgguggucaugaccgacggcucugcuuccgggagagccgauacaaaaauucuguuuaucgaggaaggaaagaucguucauaccagcaaacuuuccggcucugcgcaacacguggaggaaugcagcuguuacccucgguaucccggggugcgcugcgucuguagagacaauuggaagggauccaaccggccuauuguggauaucaacguuaaggacuacagcauugugucuuccuacgucugcagcggccuggugggcgacacaccccgcaaaaaugauucuagcuccucuagccauugucucgacccgaacaaugaggaagggggacacggcguuaaggggugggccuucgaugacggaaacgauguguggaugggcagaaccaucuccgagaaaagccggucuggguaugagacguuuaaggucauugaaggaugguccaaaccuaauagcaagcugcagaucaaccgccaggugaucgucgagagaggcaauaugucuggcuacuccgggauuuucagcguggaaggaaaguccugcaucaaccgguguuuuuauguugagcugauuagaggccgcaaacaggaaacagaggugugguggaccucuaauagcaucgucguguucugcgggaccuccggaacauacggcaccgggucuuggcccgacggcgcugauauuaaccucaugccuaucuga

SEQ ID NO: 213778 - RNA, 1410 nt, Artificial Sequence
  derived and/or modified CDS sequence (opt5) from neuraminidase__InfluenzaA__AFC62078
augaaccccaaucagaagaucauuaccaucggcagcgugugcaugacaauugggauggccaaccugauccuccaaauuggaaauaucaucuccauuuggaucucucacagcauucagcugggcaaccagucccagaucgagacguguaaucaaucugucauuaccuacgaaaacaauacauggguuaaccagaccuaugugaauaucagcaacacaaauuucgcugccgggcaguccguggucucugugaaacuugcgggaaacagcucccugugcccuguuagcggcugggcuauuuacucuaaggacaauuccaucagaaucgggagcaaaggagauguguuugucauucgggaacucuucaucucuuguuccccgcuggagugccgcaccuuuuuccuuacacagggcgcccugcucaacgacaagcauagcaauggcaccauuaaagauagaucucccuaucggacgcugauguccuguccuaucggggaggugcccagcccuuacaacucccgcuuugaaucuguugccuggagcgcuuccgccugccacgacggaauuaacuggcugaccaucggcaucagcgggcccgauaauggagcuguggccguccucaaguauaacggcauuaucacagacaccauuaagucuuggagaaaugauauccugcggacacaagaguccgagugugcgugcgugaacgggagcuguuucaccauuaugacggacggaccuucugauggccaggccagcuacaaaaucuuucgcaucgaaaagggcaaaauugugaaguccgucgagaugaaugcuccgaacuaucauuacgaagagugcucuuguuaccccgacagcuccgagaucacaugcguuugcagagauaauuggcacgggagcaaccggccuugggugucuuucaaucagaaccuugaauaucagauuggauacaucuguuccggcauuuuuggggacaauccccgcccuaacgauaaaaccggaagcugcggccccgugucuuccaauggggccaacggagucaagggcuucagcuuuaaguauggcaaugggguguggaucggaagaacaaaauccauuucuagccggaagggcuucgagaugaucugggacccgaacggguggaccggaaccgacaacaauuuuuccaucaaacaagauauuguuggcaucaacgaauggucuggguacagcggcuccuucgugcagcauccugagcugacaggaauggacuguauucgccccugcuucugggucgaacucaucagaggccggccuaaggagaauacgauuuggaccagcgggucuuccaucagcuuuuguggagugaacucugauacaguuggcugguccuggcccgacggggcugagcugcccuucaccaucgauaaauga

SEQ ID NO: 213779 - RNA, 1410 nt, Artificial Sequence
  derived and/or modified CDS sequence (opt5) from neuraminidase__InfluenzaA__AFC62079
augaaccccaaucagaagaucauuaccaucggcagcgugugcaugacaauugggauggccaaccugauccuccaaauuggaaauaucaucuccauuuggaucucucacagcauucagcugggcaaccagaaucagaucgagacguguaaccaauccgucauuaccuacgaaaauaacacauggguuaaucagaccuaugugaacaucucuaauacaaacuucgcugccgggcagagcguggucuccgugaaacuugcgggaaauucuagccugugcccuguuuccggcugggcuauuuacagcaaggacaacucuaucagaaucggguccaaaggagauguguuugucauucgggagccguucaucagcuguucuccccucgaaugccgcaccuuuuuccugacacagggcgcccuucugaaugacaagcauuccaacggcaccauuaaagauagaagcccuuaucggacgcucaugucuugucccaucggggaggugccuucccccuacaacagccgcuuugaauccguugccuggucugcuagcgccugccacgacggaauuaauuggcugaccaucggcaucuccgggccugauaacggagcuguggccguccugaaguauaauggcauuaucacagacaccauuaagagcuggagaaacaauauccuccggacacaagagucugagugugcgugcgugaacggguccuguuucaccgugaugacggauggaccgagcgacggccaggccucuuacaaaauuuuucgcaucgaaaagggcaaaaucauuaagagcgucgagaugaaugcucccaacuaucauuacgaagagugcuccuguuacccugauucuagcgagaucacaugcguuugcagagacaauuggcacggguccaaccggcccugggugagcuucaaucagaaccuggaauaucagauuggauacaucuguucuggcauucuuggggauaauccucgccccaacgacaaaaccggauccugcggcccggugagcucuaauggggccaacggagucaagggcuuuuccuucaaguauggcaacgggguguggguuggaagaacaaaaagcaucuccucucggaauggcuuugagaugauuugggauccuaacggguggaccggaaccgacaauaacuucagcaucaagcaagacaucgugggcauuaaagaaugguccggguacucuggcagcuuuguccagcaucccgagcugacaggacucgauuguauccgcccuugcuucuggguggaacugauuagaggccggcccaaggagaauacgaucuggaccuccgggagcauuaucucuuucuguggaguuaacuccgacacagugggcuggagcuggcccgauggggcugagcuuccuuuuaccaucgacaaauga

SEQ ID NO: 213780 - RNA, 1410 nt, Artificial Sequence
  derived and/or modified CDS sequence (opt5) from neuraminidase__InfluenzaA__AFC62080
augaaccccaaucagaagaucauuaccaucggcagcgugugcaugacaauugggauggccaaccugauccuccaaauuggaaauaucaucuccauuuggaucucucacagcauucagcugggcaaccagucccagaucgagacguguaaucaaucugucauuaccuacgaaaacaauacauggguuaaccagaccuaugugaauaucagcaacacaaauuucgcugccgggcaguccguggucucugugaaacuugcgggaaacagcucccugugcccuguuagcggcugggcuauuuacucuaaggacaauuccaucagaaucgggagcaaaggagauguguuugucauucgggagccguucaucucuuguagcccccucgaaugccgcaccuuuuuccugacacagggcgcccuucugaacgacaagcauuccaauggcaccauuaaagauagaucuccuuaucggacgcucauguccugucccaucggggaggugccuagccccuacaacucccgcuuugaaucuguugccuggagcgcuuccgccugccacgacggaauuaacuggcugaccaucggcaucagcgggccugauaauggagcuguggccguccugaaguauaacggcauuaucacagacaccauuaagucuuggagaaauaacauccuccggacacaagaguccgagugugcgugcgugaaugggagcuguuucaccauuaugacggauggaccgucugacggccaggccagcuacaaaaucuuucgcaucgaaaagggcaaaauugugaaguccgucgagaugaacgcucccaauuauuacuacgaagagugcucuuguuauccugauagcuccgagaucacaugcguuugcagagacaacuggcaugggagcaaucggcccugggugucuuucaaccagaaucuggaauaccagauuggauauaucuguuccggcauuuuuggggauaacccucgccccaaugacaaaaccggaagcugcggcccggugucuuccaacggggccaauggagucaagggcuucagcuuuaaguacggcaacgggguguggaucggaagaacaaaauccauuucuagccggaagggcuucgagaugaucugggauccuaacggguggaccggaaccgacaauaacuuuuccaucaaacaagacauuguuggcaucaaugaauggucuggguauagcggcuccuucgugcagcaccccgagcuuacaggaaugggcuguauucgcccuugcuucugggucgaacugaucagagggcggcccaaggagaacacgauuuggaccagcggaucuuccaucagcuuuuguggcguuaauucugauacaguggggugguccuggcccgacggagcugagcucccuuucaccaucgauaaauga

SEQ ID NO: 213781 - RNA, 1410 nt, Artificial Sequence
  derived and/or modified CDS sequence (opt5) from neuraminidase__InfluenzaA__AFC62082
augaaccccaaucagaagaucauuaccaucggcagcgugucccugacaauuucuacgaucugcuucuuuaugcaaauugccauccucaucaccacagucacccugcacuucaaacaguacgaguuuaacagcccuccgaauaaccagguuaugcuuugugaacccacaauuaucgagagaaauauuaccgaaaucguguaucugacaaacaccacgauugagaaggaaaucugcccuaaacucgcugaguaccggaauugguccaagccccagugugacauuaccggguucgccccuuuuucuaaagauaacagcauccgccuguccgcgggaggcgacaucugggugacaagagagcccuaugucucuugcgauccuaauaaguguuaccaauucgcucuugggcagggaaccacacugaacaaugugcauagcaacaauaccguucggggccgcacgccguauagaacacuccugaugaacgaacugggggugcccuuucaccucggaaccaagcaggucugcauugccugguccucuagcuccugucaugacggcaaagccuggcugcacgugugcaucacaggcgaugacaagaaugcuaccgccagcuucauuuacaacgggcggcuuguugauucuguggucuccuggagcaaagagauccugcgcacccaggaaucugagugugugugcauuaacggaacauguacgguggucaugaccgacggcuccgcuagcgggaaggccgauacaaaaauccucuuuaucgaggaaggaaagauuguucauaccuccacacugucuggcagcgcgcaacacguggaggaaugcuccugcuauccuagauaccccggggugcggugugucugccgcgacaauuggaagggaagcaacagaccuaucguggauauuaauaugaaagaccacucuaucguuuccagcuacguguguucuggccuugucggcgauacgccccggaagaacgacagcuccucuagcucccauugcuucgacccgaaugaugaggaagggggacacggcgugaaagggugggccuuugacgauggaaacgacguuuggaugggccgcaccauuagcgagaagucuagacugggguaugagacauucaaagugaucgaaggaugguccaauccuaagagcaaacuccagaucaaccggcaggucauuguggaucgcggcgacagaucuggcuacuccgggaucuuuagcgucgagggaaaguccuguauuaaucggugcuucuauguggaacugaucagaggcucuaaggaggaaaccgagguucuguggaccagcaacuccauuguggucuucugugggacaucuggaaccuacggcacagggagcuggcccgauggcgcugacaucaaucucaugccuauuuga

SEQ ID NO: 213782 - RNA, 1410 nt, Artificial Sequence; identical to SEQ ID NO: 206297
  derived and/or modified CDS sequence (opt5) from neuraminidase__InfluenzaA__AFD63529

SEQ ID NO: 213783 - RNA, 1410 nt, Artificial Sequence; identical to SEQ ID NO: 206297
  derived and/or modified CDS sequence (opt5) from neuraminidase__InfluenzaA__AFD63540

SEQ ID NO: 213784 - RNA, 1410 nt, Artificial Sequence
  derived and/or modified CDS sequence (opt5) from neuraminidase__InfluenzaA__AFD63551
augaaccccaaucagaagaucauuaccaucggcagcgugucccugacaauugccgcuaucugcuuccucaugcaaauugccauccuggucacgaccguuacacuucacuuuaaacagcaugaguguaacccuccgcccaauaaccaggugaugcugugcgaaccuaccaucauugagagaaauaucacagaaauuguguaccucaccaacacaaccaucgagaaggaaauuugucccaaacuggcggaguaucggaauuggucuaagccucagugcaacaucacgggguucgcucccuuuagcaaagacaauuccauucgccuuucugccggaggcgauaucugggucaccagagagccuuacgugagcugugacccggauaagugcuaucaauucgcccuggggcagggaacaacccucaacaauggccacuccaacgacacaguucaugggcggacccccuaccgcacgcugcugaugaaugaacucggagugccuuuucaccugggcacaagacaggucuguaucgcuuggucuagcuccagcugccaugauggcaaggccuggcuucacguguguguuaccggggacgauaaaaacgcuacagccucuuucauuuauaauggacggcugguggacuccaucggcagcuggucuaagaaaauucuccgcacccaggaguccgaaugcgucuguaucaacgggaccugcacaguggugaugacggauggaagcgcgucuggcaaggccgacaccaaaauucuguuuaucgaggaggggaagaucguccacauuuccacacuuagcggauccgcucaacauguugaagagugcucuuguuaccccagauauccuggcgugcggugcgugugucgcgauaacuggaagggcagcaauagacccaucgucgacauuaacgugaaagauuacuccaucguuagcucuuacgugugcuccgggcuggucggagacaccccgcggaagaaugacagcuucucuagcucccacugucucgauccuaacaaugaagagggcgggcauggagugaaaggcugggccuuugacgaugggaacgacguuuggaugggacgcacaauuucugaaaagcugagaagcggcuaugagaccuucaaagugaucgagggcugguccaagcccaauagcaaacugcagaucaaccggcaggucauuguggaacgcgggaauagaucuggauacuccggcaucuuuagcgucgaggggaagucuugcauuaaccgguguuucuauguggaacucaucagaggacgcaaggaggaaacggagguuugguggacauccaauagcauuguggucuuuugcggcaccuccgggaccuacggcacaggaucuuggccugauggcgcugacaucaaccugaugcccauuuga

SEQ ID NO: 213785 - RNA, 1410 nt, Artificial Sequence; identical to SEQ ID NO: 206297
  derived and/or modified CDS sequence (opt5) from neuraminidase__InfluenzaA__AFD63562

SEQ ID NO: 213786 - RNA, 1410 nt, Artificial Sequence
  derived and/or modified CDS sequence (opt5) from neuraminidase__InfluenzaA__AFD63573
augaaccccaaucagaagaucauuaccaucggcagcgugucccugacaauugccacgaucugcuuccucaugcaaauugcuauccuggucaccacaguuacccuucacuuuaaacagcaugaguguaacucuccuccgaauaaccaggugaugcugugcgaacccacaaucauugggagaaauaucaccgagauuguguaccucacaaacaccacgaucgaaaaggagauuuguccuaaacuggccgaauaucggaauuggagcaagccccagugcaacaucaccggauucgcgccuuuuuccaaagacaauucuauucgccuuagcgcuggcggggauaucugggucacaagagagcccuacguguccugugacccugauaagugcuaucaauucgcccugggacagggcaccacacucaacaaugggcacucuaacgacaccguucaugaucggacgccguaccgcacacugcugaugaaugagcucggagugcccuuucaccugggcaccagacaggucuguaucgccuggagcuccagcucuugccaugacggcaaggcuuggcuucacguguguguuacaggggaugacaaaaacgccaccgcuuccuucauuuauaauggacggcugguggauagcaucggcucuugguccaagaaaauucuccgcacccaggaaagcgagugcgucuguaucaacgggacaugcacgguggugaugaccgacggaucugccuccggcaaggcggauacaaaaauucuguuuaucgaagaggggaagaucguccacauuagcacccuuuccggaucugcccaacauguugaggaaugcagcuguuacccuagauaucccggcgugcggugcgugugucgcgacaacuggaagggcuccaauagaccuaucgucgauauuaacgugaaagacuacagcaucguuucuuccuacgugugcagcgggcuggucggagacacaccccggaagaaugauucuuucagcuccucucacugucucgacccgaacaaugaggaaggcgggcauggagugaaaggcugggcuuuugaugacgggaacgauguuuggaugggacgcaccauuagcgagaagcugagauccggcuaugaaacguucaaagugaucgagggcuggagcaagccuaauucuaaacugcagaucaaccggcaggucauuguggagcgcgggaauagauccggauacagcggcaucuuuucugucgaagggaaguccugcauuaaccgguguuucuauguggagcucaucagaggacgcaaggaagagacagaaguuugguggaccagcaauuccauuguggucuuuugcggcaccucugggacauacggcaccggaagcuggcccgacggcgccgauaucaaccugaugccuauuuga

SEQ ID NO: 213787 - RNA, 1410 nt, Artificial Sequence
  derived and/or modified CDS sequence (opt5) from neuraminidase__InfluenzaA__AFD63584
augaaccccaaucagaagaucauuaccaucggcagcgugucccugacaauugccacgaucugcuuccucaugcaaauugcuauccuggucaccacaguuacccuucacuuuaaacaguacgaguguaacucuccuccgaauaaccaggugaugcugugcgaacccacaaucauugagagaaauaucaccgaaauuguguaucucacaaacaccacgaucgagaaggaaauuuguccuaaacuggccgaguaccggaauuggagcaagccccagugcaacaucaccggguucgcgccuuuuuccaaagacaauucuauucgccuuagcgcuggaggcgauaucugggucacaagagagcccuauguguccugugacccugauaagugcuaccaauucgcccuggggcagggaaccacacucaacaauggccauucuaacgacaccguucacgaacggacgccguaucgcacacugcugaugaaugagcucggggugcccuuucaucugggaaccagacaggucuguaucgccuggagcuccagcucuugccacgauggcaaggcuuggcuucauguguguguuacaggcgacgauaaaaacgccaccgcuuccuucauuuacaaugggcggcugguggacagcaucggaucuugguccaagaaaauucuccgcacccaggaaagcgagugcgucuguaucaacggcacaugcacgguggugaugaccgaugggucugccuccggaaaggcggacacaaaaauucuguuuaucgaggaaggcaagaucauucacaucagcacccuuuccgggucugcccaacacgucgaggaaugcagcuguuauccuagauaccccggaguucggugcgugugucgcgauaacuggaagggcuccaauagaccuauuguggacaucaacgucaaagauuacagcauugugucuuccuauguuugcagcggccuggugggggacacaccccggaagaaugacucuagcuccucuagccauugucucgauccgaacaaugaggaaggaggccacggggucaaaggaugggcuuucgacgauggcaacgacguguggauggggcgcaccaucuccgagaagcugagaagcggauacgagacguuuaaaguuaucgaaggcuggucuaagccuaauuccaaacugcagauuaaccgccaggugaucgucgagcggggcaauagaagcggguauucuggaauuuucuccguggaaggcaagagcugcaucaaccgguguuuuuacgucgagcucauuagagggcgcaaggaagagacagaggugugguggaccuccaauucuaucguuguguucugcggaaccagcggcacauaugggaccggcuccuggcccgauggagccgacauuaaccugaugccuaucuga

SEQ ID NO: 213788 - RNA, 1410 nt, Artificial Sequence
  derived and/or modified CDS sequence (opt5) from neuraminidase__InfluenzaA__AFD63595
augaaccccaaucagaagaucauuaccaucggcagcgugucccugacaauugccgcuaucugcuuccucaugcaaauugccauccuggucacgaccguuacacuucacuuuaaacagcaugaguguaacucuccuccgaauaaccaggugaugcugugcgaacccaccaucauugagagaaauaucacagaaauuguguaccucaccaacacaaccaucgagaaggaaauuuguccuaaacuggcggaguaucggaauuggagcaagccccagugcaacaucacgggguucgcuccuuuuuccaaagacaauucuauucgccuuagcgccggaggcgauaucugggucaccagagagcccuacguguccugugacccugauaagugcuaucaauucgcccuggggcagggaacaacccucaacaauggccacucuaacgacacaguucaugaucggaccccguaccgcacgcugcugaugaaugaacucggggugcccuuucaccugggaacaagacaggucuguaucgcuuggagcuccagcucuugccaugacggcaaggccuggcuucacguguguguuaccggcgaugacaaaaacgcuacagccuccuucauuuauaaugggcggcugguggauagcaucggaucuugguccaagaaaauucuccgcacccaggagagcgaaugcgucuguaucaacgggaccugcacaguggugaugacggacggcucugcguccggaaaggccgauaccaaaauucuguuuaucgaggagggcaagaucguccacauuagcacacuuuccgggucugcucaacauguugaagagugcagcuguuacccuagauaucccggagugcggugcguguguaaggacaacuggaaaggcuccaaucgcccuaucgucgauauuaacgugaaggacuacagcaucguuucuuccuacgugugcagcggccuggucggggacacccccagaaagaaugauucuuucagcuccucucacugucucgacccgaacaaugaagagggaggccauggggugaaaggaugggccuuugaugacggcaacgauguuuggauggggcggacaauuagcgaaaaacugcgcuccggauaugagaccuucaaggugaucgagggcuggagcaaaccuaauucuaagcugcagaucaacagacaggucauuguggaacggggcaaucgcuccggguacagcggaaucuuuucugucgagggcaaguccugcauuaacagauguuucuauguggaacucauccgggggagaaaagaggaaacggagguuugguggacaagcaauuccauuguggucuuuugcggaaccucuggcaccuacgggacaggcagcuggcccgacggagcugauaucaaccugaugccuauuuga

SEQ ID NO: 213789 - RNA, 1410 nt, Artificial Sequence; identical to SEQ ID NO: 206297
  derived and/or modified CDS sequence (opt5) from neuraminidase__InfluenzaA__AFD63606

SEQ ID NO: 213790 - RNA, 1410 nt, Artificial Sequence; identical to SEQ ID NO: 206217
  derived and/or modified CDS sequence (opt5) from neuraminidase__InfluenzaA__AFD63628

SEQ ID NO: 213791 - RNA, 1410 nt, Artificial Sequence; identical to SEQ ID NO: 206297
  derived and/or modified CDS sequence (opt5) from neuraminidase__InfluenzaA__AFD63639

SEQ ID NO: 213792 - RNA, 1410 nt, Artificial Sequence; identical to SEQ ID NO: 206297
  derived and/or modified CDS sequence (opt5) from neuraminidase__InfluenzaA__AFD63650

SEQ ID NO: 213793 - RNA, 1410 nt, Artificial Sequence
  derived and/or modified CDS sequence (opt5) from neuraminidase__InfluenzaA__AFD63661
augaaccccaaucagaagaucauuaccaucggcagcgugucccugacaauugccgcuaucugcuuccucaugcaaauugccauccuggucacgaccguuacacuucacuuuaaacagcaugaguguaacucuccuccgaauaaccaggugaugcugugcgaacccaccaucauugagagaaauaucacagaaauuguguaccucaccaacagcacaaucgagaaggaaauuuguccuaaacuggcggaguaucggaauugguccaagccccagugcaacaucaccggguucgcuccuuuuucuaaagacaauagcauucgccuuuccgccggaggcgauaucugggucacgagagagcccuacgugucuugugacccugauaagugcuaucaauucgcccuggggcagggaaccacacucaacaauggccacagcaacgacaccguucaugaucggacaccguaccgcacccugcugaugaaugaacucggggugcccuuucaccugggaacgagacaggucuguaucgcuugguccucuagcuccugccaugacggcaaggccuggcuucacguguguguuacaggcgaugacaaaaacgcuaccgccagcuucauuuauaaugggcggcugguggauucuaucggauccuggagcaagaaaauucuccgcacacaggagucugaaugcgucuguaucaacgggaccugcaccguggugaugacagacggcuccgcgagcggaaaggccgauacgaaaauucuguuuaucgaggagggcaagaucguccacauuuccacccuuucugggagcgcucaacauguugaagagugcuccuguuacccuagauaucccggagugcggugcgugugucgcgacaacuggaagggcagcaauagaccuaucgucgauauuaacgugaaagacuacucuaucguuuccagcuacgugugcucuggccuggucggggacacaccccggaagaaugauagcuucuccucuagccacugucucgacccgaacaaugaagagggaggccauggggugaaaggaugggccuuugaugacggcaacgauguuuggauggggcgcaccauuuccgaaaagcugagaagcggauaugagacauucaaagugaucgagggcuggucuaagccuaauuccaaacugcagaucaaccggcaggucauuguggaacgcggcaauagaagcggguacucuggaaucuuuuccgucgagggcaagagcugcauuaaccgguguuucuauguggaacucaucagagggcgcaaggaggaaaccgagguuugguggacguccaauucuauuguggucuuuugcggaacaagcggcaccuacgggaccggcuccuggcccgacggagcugauaucaaccugaugccuauuuga

SEQ ID NO: 213794 - RNA, 1410 nt, Artificial Sequence; identical to SEQ ID NO: 208003
  derived and/or modified CDS sequence (opt5) from neuraminidase__InfluenzaA__AFD63672

SEQ ID NO: 213795 - RNA, 1410 nt, Artificial Sequence
  derived and/or modified CDS sequence (opt5) from neuraminidase__InfluenzaA__AFD63683
augaaccccaaucagaagaucauuaccaugggcagcgugucccugacaaucgccacgauuugcuuccucaugcaaaucgcuauucuggucaccacaguuacccuucacuuuaaacaguacgaguguaacucuccuccgaauaaccaggugaugcugugcgaacccacaaucaucgagagaaauauuaccgaaaucguguaucucacaaacaccacgauugagaaggaaaucuguccuaaacuggccgaguaccggaauuggagcaagccccagugcaacauuaccggguucgcgccuuuuuccaaagacaauucuauccgccuuagcgcuggaggcgauauuugggucacaagagagcccuauguguccugugacccugauaagugcuaccaauucgcccuggggcagggaaccacacucaacaauggccauucuaacgacaccguucacgggcggacgccguaucgcacacugcugaugaaugaacucggagugcccuuucaucugggcaccagacaggucuguaucgccuggagcuccagcucuugccacgauggcaaggcuuggcuucauguguguguuacaggggacgauaaaaacgccaccgcuuccuucaucuacaauggacggcugguggacagcauuggcucuugguccaagaaaauccuccgcacccaggagagcgaaugcgucuguauuaacgggacaugcacgguggugaugaccgauggaucugccuccggcaaggcggacacaaaaauccuguuuauugaggaggggaagaucauccacauuagcacccuuuccggaucugcccaacacgucgaagagugcagcuguuauccuagauaccccggcguucggugcgugugucgcgauaacuggaagggcuccaauagaccuaucguggacauuaacgucaaagauuacagcaucgugucuuccuauguuugcagcgggcuggugggagacacaccccggaagaaugacucuagcuccucuagccauugucucgauccgaacaaugaagagggcgggcacggagucaaaggcugggcuuucgacgaugggaacgacguguggaugggacgcaccauuuccgaaaagcugagaagcggcuacgagacguuuaaaguuaucgagggcuggucuaagccuaauuccaaacugcagaucaaccgccaggugauugucgaacgggggaauagaagcggauauucuggcaucuucuccguggagggaaagagcugcauuaaccgguguuuuuacgucgaacucaucagagggcgcaaggaggaaacagaggugugguggaccuccaauucuauuguuguguucugcggcaccagcgggacauauggcaccggauccuggcccgauggcgccgacaucaaccugaugccuauuuga

SEQ ID NO: 213796 - RNA, 1410 nt, Artificial Sequence
  derived and/or modified CDS sequence (opt5) from neuraminidase__InfluenzaA__AFD63694
augaaccccaaucagaagaucauuaccaucggcagcgugucccugacaauugccacgaucugcuuccucaugcaaauugcuauccuggucaccacaaucacccuucacuuuaaacagcaugaguguaacucuccuccgaauaaccagguuaugcugugcgaacccacaauuaucgagagaaauauuaccgaaaucguguaccucacaaacaccacgauugagaaggaaaucuguccuaaacuggccgaguaucggaauuggagcaagccccagugcaacauuaccggguucgcgccuuuuuccaaagacaauucuauccgccuuagcgcuggaggcgauaucugggugacaagagagcccuacgucuccugugacccugauaagugcuaucaauucgcccuggggcagggaaccacacucaacaauggccacucuaacgacaccgugcaugaucggacgccguaccgcacacugcugaugaaugaacucgggguucccuuucaccugggaaccagacagguguguauugccuggagcuccagcucuugccaugacggcaaggcuuggcuucacgucugugugacaggcgaugacaaaaacgccaccgcuuccuucaucuauaaugggcggcugguugauagcauuggaucuugguccaagaaaauccuccgcacccaggagagcgaaugcguguguauuaacggcacaugcacggucgugaugaccgacgggucugccuccggaaaggcggauacaaaaauccuguuuaucgaggagggcaagauugugcacaucagcacccuuuccgggucugcccaacaugucgaagagugcagcuguuacccuagauaucccggaguucggugcgugugucgcgacaacuggaagggcuccaauagaccuauuguggauaucaacgucaaagacuacagcauugugucuuccuacguuugcagcggccuggugggggacacaccccggaagaaugauucuuucagcuccucucacugucucgacccgaacaaugaagagggaggccauggggucaaaggaugggcuuuugaugacggcaacgauguguggauggggcgcaccaucagcgaaaagcugagauccggauaugagacguucaaaguuaucgagggcuggagcaagccuaauucuaaacugcagauuaaccgccaggugaucgucgaacggggcaauagauccggguacagcggaaucuuuucuguggagggcaaguccugcauuaaccgguguuucuaugucgaacucauuagagggcgcaaggaggaaacagaggugugguggaccagcaauuccaucguuguguuuugcggaaccucuggcacauacgggaccggcagcuggcccgacggagccgauauuaaccugaugccuaucuga

SEQ ID NO: 213797 - RNA, 1410 nt, Artificial Sequence
  derived and/or modified CDS sequence (opt5) from neuraminidase__InfluenzaA__AFD63705
augaaccccaaucagaagaucauuaccaucggcagcgugucccugacaauugccgcuaucugcuuccucaugcaaauugccauccuggucacgaccguuacacuucacuuuaaacagcaugaguguaacucuccuccgaauaaccaggugaugcugugcgaacccaccaucauugagagaaauaucacagaaauuguguaccucaccaacacaaccaucgagaaggaaauuuguccuaaacuggcggaguaucggaauuggagcaagccccagugcaacaucacgggguucgcuccuuuuuccaaagacaauucuauucgccuuagcgccggaggcgauaucugggucaccagagagcccuacguguccugugacccugauaagugcuaucaauucgcccuggggaagggaacaacccucaacaauggccacucuaacgacacaguucaugaucggaccccguaccgcacgcugcugaugaaugaacucggggugcccuuucaccugggaacaagacaggucuguaucgcuuggagcuccagcucuugccaugacggcaaagccuggcuucacguguguguuaccggcgaugacaagaacgcuacagccuccuucauuuauaaugggcggcugguggauagcaucggaucuugguccaaaaagauucuccgcacccaggagagcgaaugcgucuguaucaacgggaccugcacaguggugaugacggacggcucugcguccggaaaagccgauaccaagauucuguuuaucgaggagggcaagaucguccacauuagcacacuuuccgggucugcucagcauguugaagagugcagcuguuacccuagauaucccggagugcggugcgugugucgcgacaacuggaaaggcuccaauagaccuaucgucgauauuaacgugaaggacuacagcaucguuucuuccuacgugugcagcggccuggucggggacacaccccggaaaaaugauucuuucagcuccucucacugucucgacccgaacaaugaagagggaggccauggggugaagggaugggccuuugaugacggcaacgauguuuggauggggcgcaccauuagcgaaaaacugagauccggauaugagaccuucaaggugaucgagggcuggagcaaaccuaauucuaagcugcaaaucaaccggcaggucauuguggaacgcggcaauagauccggguacagcggaaucuuuucugucgagggcaaguccugcauuaaccgguguuucuauguggaacucaucagagggcgcaaagaggaaacggagguuugguggacaagcaauuccauuguggucuuuugcggaaccucuggcaccuacgggacaggcagcuggcccgacggagcugauaucaaccugaugccuauuuga

SEQ ID NO: 213798 - RNA, 1410 nt, Artificial Sequence
  derived and/or modified CDS sequence (opt5) from neuraminidase__InfluenzaA__AFD63716
augaaccccaaucagaagaucauuaccaucggcagcgugucccugacaauugccgcuaucugcuuccucaugcaaauugccauccuggucacgaccguuacacuucacuuuaaacagcaugaguguaacucuccuccgaauaaccaggugaugcugugcgaacccaccaucauugagagaaauaucacagaaauuguguaccucaccaacacaaccaucgagaaggaaauuuguccuaaacuggcggaguaucggaauuggagcaagccccagugcaacaucacgggguucgcuccuuuuuccaaagacaauucuauucgccuuagcgccggaggcgauaucugggucaccagagagcccuacguguccugugacccugauaagugccaccaauucgcccuggggcagggaacaacccucaacaauggccauucuaacgacacaguucacgaucggaccccguaucgcacgcugcugaugaaugaacucggggugcccuuucaucugggaacaagacaggucuguaucgcuuggagcuccagcucuugccacgacggcaaggccuggcuucacguguguguuaccggcgaugacaaaaacgcuacagccuccuucauuuacaaugggcggcugguggauagcaucggaucuugguccaagaaaauucuccgcacccaggagagcgaaugcgucuguaucaacgggaccugcacaguggugaugacggacggcucugcguccggaaaggccgauaccaaaauucuguuuaucgaggagggcaagaucguccauauuagcacacuuuccgggucugcucaacacguugaagagugcagcuguuauccuagauaccccggagugcggugcgugugucgcgacaacuggaagggcuccaauagaccuaucgucgauauuaacgugaaagacuauagcaucguuucuuccuacgugugcagcggccuggucggggacacaccccggaagaaugauucuuucagcuccucucauugucucgacccgaacaaugaagagggaggccacggggugaaaggaugggccuuugaugacggcaacgauguuuggauggggcgcaccauuagcgaaaagcugagauccggauacgagaccuucaaagugaucgagggcuggagcaagccuaauucuaaacugcagaucaaccggcaggucauuguggaacgcggcaauagauccggguauagcggaaucuuuucugucgagggcaaguccugcauuaaccgguguuucuacguggaacucaucagagggcgcaaggaggaaacggagguuugguggacaagcaauuccauuguggucuuuugcggaaccucuggcaccuaugggacaggcagcuggcccgacggagcugauaucaaccugaugccuauuuga

SEQ ID NO: 213799 - RNA, 1410 nt, Artificial Sequence; identical to SEQ ID NO: 206297
  derived and/or modified CDS sequence (opt5) from neuraminidase__InfluenzaA__AFD63727

SEQ ID NO: 213800 - RNA, 1410 nt, Artificial Sequence; identical to SEQ ID NO: 206297
  derived and/or modified CDS sequence (opt5) from neuraminidase__InfluenzaA__AFD63738

SEQ ID NO: 213801 - RNA, 1410 nt, Artificial Sequence
  derived and/or modified CDS sequence (opt5) from neuraminidase__InfluenzaA__AFD63749
augaaccccaaucagaagaucauuaccaucagcuccgugucucugacaauugccacgaucugcuuccucaugcaaauugcuauccuggucaccacaguuacccuucacuuuaaacagcaugaguguaacagcccuccgaauaaccaggugaugcugugcgaacccacaaucauugagagaaauaucaccgaaauuguguaccucacaaacaccacgaucgagaaggaaauuuguccuaaacuggccgaguaucggaauugguccaagccccagugcaacaucaccggcuucgcgccuuuuucuaaagacaauagcauucgccuuuccgcugggggagauaucugggucacaagagagcccuacgugucuugugacccugauaagugcuaucaauucgcccugggccaggggaccacacucaacaauggacacagcaacgacaccguucaugaucggacgccguaccgcacacugcugaugaaugaacucggcgugcccuuucaccuggggaccagacaggucuguaucgccugguccucuagcuccugccaugacggaaaggcuuggcuucacguguguguuacaggcgaugacaaaaacgccaccgcuagcuucauuuauaauggccggcugguggauucuaucggguccuggagcaagaaaauucuccgcacccaggagucugaaugcgucuguaucaacggaacaugcacgguggugaugaccgacggcuccgccagcgggaaggcggauacaaaaauucuguuuaucgaggagggaaagaucguccacauuuccacccuuucuggcagcgcccaacauguugaagagugcuccuguuacccuagauaucccggggugcggugcgugugucgcgacaacuggaagggaagcaauagaccuaucgucgauauuaacgugaaagacuacucuaucguuuccagcuacgugugcucuggccuggucggcgacacaccccggaagaaugauagcuucuccucuagccacugucucgacccgaacaaugaagaagggggacauggcgugaaagggugggcuuuugaugacggaaacgauguuuggaugggccgcaccauuuccgagaagcugagaagcggguaugagacguucaaagugaucgagggauggucuaagccuaauuccaaacugcagaucaaccggcaggucauuguggaacgcggcaauagaagcggcuacucugggaucuuuuccgucgagggaaagagcugcauuaaccgguguuucuauguggaacucaucagaggccgcaaggaggaaacagagguuugguggaccuccaauucuauuguggucuuuugcgggaccagcggaacauacggcaccggguccuggcccgacggcgccgauaucaaccugaugccuauuuga

SEQ ID NO: 213802 - RNA, 1410 nt, Artificial Sequence
  derived and/or modified CDS sequence (opt5) from neuraminidase__InfluenzaA__AFD63760
augaaccccaaucagaagaucauuaccaucggcagcgugucccugacaauugccacgaucugcuuccucaugcaaauugcuauccuggucaccacaguuacccuucacuuuaaacaguacgaguguaacucuccuccgaauaaccaggugaugcugugcgaacccacaaucauugagagaaauaucaccgaaauuguguaucucacaaacaccacgaucgagaaggaaauuuguccuaaacuggccgaguaccggaauuggagcaagccccagugcaacaucaccggguucgcgccuuuuuccaaagacaauucuauucgccuuagcgcuggaggcgauaucugggucacaagagagcccuauguguccugugacccugauaagugcuaccaauucgcccuggggcagggaaccacacucaacaauggccauucuaacgacaccguucacgaucggacgccguaucgcacacugcugaugaaugaacucggggugcccuuucaucugggaaccagacaggucuguaucgccuggagcuccagcucuugccacgacggcaaggcuuggcuucauguguguguuacaggcgaugacaaaaacgccaccgcuuccuucauuuacaaugggcggcugguggauagcaucggaucuugguccaagaaaauucuccgcacccaggagagcgaaugcgucuguaucaacggcacaugcacgguggugaugaccgacgggucugccuccggaaaggcggauacaaaaauucuguuuaucgaggagggcaagaucauucacaucagcacccuuuccgggucugcccaacacgucgaagagugcagcuguuauccuagauaccccggaguucggugcgugugucgcgacaacuggaagggcuccaauagaccuauuguggauaucaacgucaaagacuacagcauugugucuuccuauguuugcagcggccuggugggggacacaccccggaagaaugauucuagcuccucuagccauugucucgacccgaacaaugaagagggaggccacggggucaaaggaugggcuuucgaugacggcaacgauguguggauggggcgcaccaucuccgaaaagcugagaagcggauacgagacguuuaaaguuaucgagggcuggucuaagccuaauuccaaacugcagauuaaccgccaggugaucgucgaacggggcaauagaagcggguauucuggaauuuucuccguggagggcaagagcugcaucaaccgguguuuuuacgucgaacucauuagagggcgcaaggaggaaacagaggugugguggaccuccaauucuaucguuguguucugcggaaccagcggcacauaugggaccggcuccuggcccgacggagccgauauuaaccugaugccuaucuga

SEQ ID NO: 213803 - RNA, 1410 nt, Artificial Sequence; identical to SEQ ID NO: 206297
  derived and/or modified CDS sequence (opt5) from neuraminidase__InfluenzaA__AFD63771

SEQ ID NO: 213804 - RNA, 1410 nt, Artificial Sequence; identical to SEQ ID NO: 206297
  derived and/or modified CDS sequence (opt5) from neuraminidase__InfluenzaA__AFD63782

SEQ ID NO: 213805 - RNA, 1410 nt, Artificial Sequence; identical to SEQ ID NO: 213802
  derived and/or modified CDS sequence (opt5) from neuraminidase__InfluenzaA__AFD63793

SEQ ID NO: 213806 - RNA, 1410 nt, Artificial Sequence; identical to SEQ ID NO: 206297
  derived and/or modified CDS sequence (opt5) from neuraminidase__InfluenzaA__AFD63804

SEQ ID NO: 213807 - RNA, 1410 nt, Artificial Sequence; identical to SEQ ID NO: 206297
  derived and/or modified CDS sequence (opt5) from neuraminidase__InfluenzaA__AFD63815

SEQ ID NO: 213808 - RNA, 1410 nt, Artificial Sequence; identical to SEQ ID NO: 206297
  derived and/or modified CDS sequence (opt5) from neuraminidase__InfluenzaA__AFD63826

SEQ ID NO: 213809 - RNA, 1410 nt, Artificial Sequence; identical to SEQ ID NO: 213802
  derived and/or modified CDS sequence (opt5) from neuraminidase__InfluenzaA__AFD63837

SEQ ID NO: 213810 - RNA, 1410 nt, Artificial Sequence
  derived and/or modified CDS sequence (opt5) from neuraminidase__InfluenzaA__AFD63848
augaaccccaaucagaagaucauuaccaucggcagcgugucccugacaauugccgcuaucugcuuccucaugcaaauugccauccuggucacgaccguuacacuucacuuuaaacagagagaguguaacucuccuccgaauaaccaggugaugcugugcgaacccaccaucauugagcggaauaucacagaaauuguguaccucaccaacacaaccaucgagaaggaaauuuguccuaaacuggcggaguaucgcaauuggagcaagccccagugcaacaucacgggguucgcuccuuuuuccaaagacaauucuauuagacuuagcgccggaggcgauaucugggucacccgggagcccuacguguccugugacccugauaagugcuaucaauucgcccuggggcagggaacaacccucaacaauggccauucuaacgacacaguucacgaucgcaccccguacagaacgcugcugaugaaugaacucggggugcccuuucaucugggaacacggcaggucuguaucgcuuggagcuccagcucuugccacgacggcaaggccuggcuucauguguguguuaccggcgaugacaaaaacgcuacagccuccuucauuuauaaugggcgccugguggauagcaucggaucuugguccaagaaaauucucagaacccaggagagcgaaugcgucuguaucaacgggaccugcacaguggugaugacggacggcucugcguccggaaaggccgauaccaaaauucuguuuaucgaggagggcaagaucguccacauuagcacacuuuccgggucugcucaacacguugaagagugcagcuguuacccucgguaucccggagugcgcugcguguguagagacaacuggaagggcuccaaucggccuaucgucgauauuaacgugaaagacuacagcaucguuucuuccuacgugugcagcggccuggucggggacacaccccgcaagaaugauucuuucagcuccucucauugucucgacccgaacaaugaagagggaggccacggggugaaaggaugggccuuugaugacggcaacgauguuuggauggggagaaccauuagcgaaaagcugcgguccggauaugagaccuucaaagugaucgagggcuggagcaagccuaauucuaaacugcagaucaaccgccaggucauuguggaaagaggcaaucgguccggguacagcggaaucuuuucugucgagggcaaguccugcauuaacagauguuucuauguggaacucauccgcgggcggaaggagaaaacggaaguuugguggacaagcaauuccauuguggucuuuugcggaaccucuggcaccuacgggacaggcagcuggcccgacggagcugauaucaaccugaugccuauuuga

SEQ ID NO: 213811 - RNA, 1410 nt, Artificial Sequence; identical to SEQ ID NO: 206217
  derived and/or modified CDS sequence (opt5) from neuraminidase__InfluenzaA__AFD63859

SEQ ID NO: 213812 - RNA, 1410 nt, Artificial Sequence; identical to SEQ ID NO: 206217
  derived and/or modified CDS sequence (opt5) from neuraminidase__InfluenzaA__AFD63870

SEQ ID NO: 213813 - RNA, 1410 nt, Artificial Sequence; identical to SEQ ID NO: 206297
  derived and/or modified CDS sequence (opt5) from neuraminidase__InfluenzaA__AFD63881

SEQ ID NO: 213814 - RNA, 1410 nt, Artificial Sequence; identical to SEQ ID NO: 206297
  derived and/or modified CDS sequence (opt5) from neuraminidase__InfluenzaA__AFD63892

SEQ ID NO: 213815 - RNA, 1410 nt, Artificial Sequence
  derived and/or modified CDS sequence (opt5) from neuraminidase__InfluenzaA__AFD63903
augaaccccaaucagaagaucauuaccaucggcagcgugucccugacaauugccgcuaucugcuuccucaugcaaauugccauccuggucacgaccguuacacuucacuuuaaacagcaugaguguaacucuccuccgaauaaccaggugaugcugugcgaacccaccaucauugagagaaauaucacagggauuguguaccucaccaacacaaccaucgaaaaggagauuuguccuaaacuggcggaauaucggaauuggagcaagccccagugcaacaucacgggauucgcuccuuuuuccaaagacaauucuauucgccuuagcgccggcggggauaucugggucaccagagagcccuacguguccugugacccugauaagugcuaucaauucgcccugggacagggcacaacccucaacaaugggcacucuaacgacacaguucaugaucggaccccguaccgcacgcugcugaugaaugagcucggagugcccuuucaccugggcacaagacaggucuguaucgcuuggagcuccagcucuugccaugacggcaaggccuggcuucacguguguguuaccggggaugacaaaaacgcuacagccuccuucauuuauaauggacggcugguggauagcaucggcucuugguccaagaaaauucuccgcacccaggaaagcgagugcgucuguaucaacgggaccugcacaguggugaugacggacggaucugcguccggcaaggccgauaccaaaauucuguuuaucgaagaggggaagaucguccacauuagcacacuuuccggaucugcucaacauguugaggaaugcagcuguuacccuagauaucccggcgugcggugcgugugucgcgacaacuggaagggcuccaauagaccuaucgucgauauuaacgugaaagacuacagcaucguuucuuccuacgugugcagcgggcuggucggagacacaccccggaagaaugauucuuucagcuccucucacugucucgacccgaacaaugaggaaggcgggcauggagugaaaggcugggccuuugaugacgggaacgauguuuggaugggacgcaccauuagcgagaagcugagauccggcuaugaaaccuucaaagugaucgagggcuggagcaagccuaauucuaaacugcagaucaaccggcaggucauuguggagcgcgggaauagauccggauacagcggcaucuuuucugucgaagggaaguccugcauuaaccgguguuucuauguggagcucaucagaggacgcaaggaagagacggaaguuugguggacaagcaauuccauuguggucuuuugcggcaccucugggaccuacggcacaggaagcuggcccgacggcgcugauaucaaccugaugccuauuuga

SEQ ID NO: 213816 - RNA, 1410 nt, Artificial Sequence
  derived and/or modified CDS sequence (opt5) from neuraminidase__InfluenzaA__AFD63914
augaaccccaaucagaagaucauuaccaucggcagcgugucccugacaauugccgcuaucugcuuccucaugcaaauugccauccuggucacgaccguuacacuucacuuuaaacagcaugaguguaacucuccuccgaauaaccaggugaugcugugcgaacccaccaucauugagagaaauaucacagaaauuguguaccucaccaacacaaccaucgagaaggaaauuuguccuaaacuggcggaguaucggaauuggagcaagccccagugcaacaucacgggguucgcuccuuuuuccaaagacaauucuauucgccuuagcgccggaggcgauaucugggucaccagagagcccuacguguccugugacccugauaagugcuaucaauucgcccuggggcagggaacaacccucaacaauggccacucuaacgacacaguucaugaucggaccccguaccgcacgcugcugaugaaugaacucggggugcccuuucaccugggaacaagacaggucuguaucgcuuggagcuccagcucuugccaugacggcaaggccuggcuucacguguguguuaccggcgaugacaaaaacgcuacagccuccuucauuuauaaugggcggcugguggauagcaucggaucuugguccaagaaaauucuccgcacccaggagagcgaaugcgucuguaucaacgggaccugcacaguggugaugacggacggcucugcguccggaaaggccgauaccaaaauucuguuuaucgaggagggcaagaucguccacauuagcacacuuuccgggucugcucaacauguugaagagugcagcuguuacccuagauaucccggagugcggugcgugugucgcgacaacuggaagggcuccaauagaccuaucgucgauauuaacgugaaagacuacagcaucguuucuuccuacgugugcagcggccuggucggggacacaccccggaagaaugauucuuucagcuccucucacugucucgacccgaacaaugaagagggaggccauggggugaaaggaugggccuuugaugacggcaacgauguuuggauggggcgcaccauuagcgaaaagcugagauccggauaugagaccuucaaagugaucgagggcuggagcaagccuaauucuaaacugcagaucaaccggcaggucauuguggaacgcggcaauagauccggguacagcggaaucuuuucugucgagggcaaguccugcauuaaccgguguuucuauguggaacucaucagagggcgcaaggagaaaacggaaguuugguggacaagcaauuccauuguggucuuuugcggaaccucuggcaccuacgggacaggcagcuggcccgacggagcugauaucaaccugaugccuauuuga

SEQ ID NO: 213817 - RNA, 1410 nt, Artificial Sequence; identical to SEQ ID NO: 213802
  derived and/or modified CDS sequence (opt5) from neuraminidase__InfluenzaA__AFD63925

SEQ ID NO: 213818 - RNA, 1410 nt, Artificial Sequence
  derived and/or modified CDS sequence (opt5) from neuraminidase__InfluenzaA__AFD63936
augaaccccaaucagaagaucauuaccaucggcagcgugucccugacaauugccacgaucugcuuccucaugcaaauugcuauccuggucaccacaguuacccuucacuuuaaacagcaugaguguaacccuccgcccaauaaccaggugaugcugugcgaaccuacaaucauugagagaaauaucaccgaaauuguguaccucacaaacaccacgaucgagaaggaaauuugucccaaacuggccgaguaucggaauuggucuaagccucagugcaacaucaccggguucgcgcccuuuagcaaagacaauuccauucgccuuucugcuggaggcgauaucugggucacaagagagccuuacgugagcugugacccggauaagugcuaucaauucgcccuggggcagggaaccacacucaacaauggccacuccaacgacaccguucaugaucggacgcccuaccgcacacugcugaugaaugaacucggggugccuuuucaccugggaaccagacaggucuguaucgccuggucuagcuccagcugccaugacggcaaggcuuggcuucacguguguguuacaggcgaugacaaaaacgccaccgcuucuuucauuuauaaugggcggcugguggauuccaucggaagcuggucuaagaaaauucuccgcacccaggaguccgaaugcgucuguaucaacggcacaugcacgguggugaugaccgacgggagcgccucuggaaaggcggauacaaaaauucuguuuaucgaggagggcaagaucguccacauuuccacccuuagcggguccgcccaacauguugaagagugcucuuguuaccccagauauccuggagugcggugcgugugucgcgacaacuggaagggcagcaauagacccaucgucgauauuaacgugaaagacuacuccaucguuagcucuuacgugugcuccggccuggucggggacacaccgcggaagaaugauagcuucucuagcucccacugucucgacccuaacaaugaagagggaggccauggggugaaaggaugggcuuuugaugacggcaacgauguuuggauggggcgcaccauuucugaaaagcugagaagcggauaugagacguucaaagugaucgagggcugguccaagcccaauagcaaacugcagaucaaccggcaggucauuguggaacgcggcaauagaucuggguacuccggaaucuuuagcgucgagggcaagucuugcauuaaccgguguuucuauguggaacucaucagagggcgcaaggaggaaacagagguuugguggaccuccaauagcauuguggucuuuugcggaaccuccggcacauacgggaccggcucuuggccugacggagccgauaucaaccugaugcccauuuga

SEQ ID NO: 213819 - RNA, 1410 nt, Artificial Sequence; identical to SEQ ID NO: 206297
  derived and/or modified CDS sequence (opt5) from neuraminidase__InfluenzaA__AFD63947

SEQ ID NO: 213820 - RNA, 1410 nt, Artificial Sequence; identical to SEQ ID NO: 206297
  derived and/or modified CDS sequence (opt5) from neuraminidase__InfluenzaA__AFD63958

SEQ ID NO: 213821 - RNA, 1410 nt, Artificial Sequence; identical to SEQ ID NO: 206297
  derived and/or modified CDS sequence (opt5) from neuraminidase__InfluenzaA__AFD63969

SEQ ID NO: 213822 - RNA, 1410 nt, Artificial Sequence; identical to SEQ ID NO: 206297
  derived and/or modified CDS sequence (opt5) from neuraminidase__InfluenzaA__AFD63980

SEQ ID NO: 213823 - RNA, 1410 nt, Artificial Sequence
  derived and/or modified CDS sequence (opt5) from neuraminidase__InfluenzaA__AFD64002
augaaccccaaucagaagaucauuaccaucggcagcgugucccugacaauugccgcuaucugcuuccucaugcaaauugccauccuggucacgaccguuacacuucacuuuaaacagcaugaguguaacucuccuccgaauaaccaggugaugcugugcgaacccaccaucauugagagaaauaucacagaaauuguguaccucaccaacacaaccaucgagaaggaaauuuguccuaaacuggcggaguaucggaauuggagcaagccccagugcaacaucacgggguucgcuccuuuuuccaaagacaauucuauucgccuuagcgccggaggcgauaucugggucaccagagagcccuacguguccugugacccugauaagugcuaucaauucgcccuggggcagggaacaacccucaacaauggccacucuaacgacacaguucaugaucggaccccguaccgcacgcugcugaugaaugaacucggggugcccuuucaccugggaacaagacaggucuguaucgcuuggagcuccagcucuugccaugacggcaaggccuggcuucacguguguguuaccggcgaugacaaaaacgcuacagccuccuucauuuauaaugggcggcugguggauagcaucggaucuugguccaagaaaauucuccgcacccaggagagcgaaugcgucuguaucaacgggaccugcacaguggugaugacggacggcucugcguccggaaaggccgauaccaaaauucuguuuaucgaggagggcaagaucguccacauuagcacacuuuccgggucugcucaacauguugaagagugcagcuguuacccuagauaucccggagugcggugcgugugucgcgacaacuggaagggcuccaauagaccuaucgucgauauuaacgugaaagacuacagcaucguuucuuccuacgugugcagcggccuggucggggacacaccccggaagaccgauucuuucagcuccucucacugucucgacccgaauaacgaagagggaggccauggggugaaaggaugggccuuugaugacggcaaugauguuuggauggggcgcaccauuagcgaaaagcugagauccggauaugagacguucaaagugaucgagggcuggagcaagccuaacucuaaacugcagaucaaucggcaggucauuguggaacgcggcaacagauccggguacagcggaaucuuuucugucgagggcaaguccugcauuaaucgguguuucuauguggaacucaucagagggcgcaaggaggaaacagagguuugguggaccagcaacuccauuguggucuuuugcggaaccucuggcacauacgggaccggcagcuggcccgacggagcugauaucaaucugaugccuauuuga

SEQ ID NO: 213824 - RNA, 1410 nt, Artificial Sequence; identical to SEQ ID NO: 206207
  derived and/or modified CDS sequence (opt5) from neuraminidase__InfluenzaA__AFD64013

SEQ ID NO: 213825 - RNA, 1410 nt, Artificial Sequence
  derived and/or modified CDS sequence (opt5) from neuraminidase__InfluenzaA__AFD64024
augaaccccaaucagaagaucauuaccaucggcagcgugucccugacaauugccgcuaucugcuuccucaugcaaauugccauccuggucacgaccguuacacuucacuuuaaacagcaugaguguaacucuccuccgaauaaccaggugaugcugugcgaacccaccaucauugagaagaauaucacagaaauuguguaccucaccaacacaaccaucgagaaagaaauuuguccuaagcuggcggaguauagaaauuggagcaaaccccagugcaacaucacgggguucgcuccuuuuuccaaggacaauucuauucggcuuagcgccggaggcgauaucugggucacccgcgagcccuacguguccugugacccugauaagugcuaucaauucgcccuggggcagggaacaacccucaacaauggccacucuaacgacacaguucaugauagaaccccguaccggacgcugcugaugaaugaacucggggugcccuuucaccugggaacacgccaggucuguaucgcuuggagcuccagcucuugccaugacggcaaagccuggcuucacguguguguuaccggcgaugacaagaacgcuacagccuccuucauuuauaaugggagacugguggauagcaucggaucuugguccaaaaagauucuccggacccaggagagcgaaugcgucuguaucaacgggaccugcacaguggugaugacggacggcucugcguccggaaaagccgauaccaagauucuguuuaucgaggagggcaagaucguccacauuagcacacuuuccgggucugcucaacauguugaagagugcagcuguuacccucgcuaucccggagugagaugcgugugucgggacaacuggaaaggcuccaaucgcccuaucgucgauauuaacgugaaggacuacagcaucguuucuuccuacgugugcagcggccuggucggggacacccccagaaagaaugauucuuucagcuccucucacugucucgacccgaacaaugaagagggaggccauggggugaaaggaugggccuuugaugacggcaacgauguuuggauggggcggacaauuagcgaaaaacugcgcuccggauaugagaccuucaaggugaucgagggcuggagcaaaccuaauucuaagcugcagaucaacagacaggucauuguggaacggggcaaucgcuccggguacagcggaaucuuuucugucgagggcaaguccugcauuaacagauguuucuauguggaacucauccgggggagaaaagaggaaacggagguuugguggacaagcaauuccauuguggucuuuugcggaaccucuggcaccuacgggacaggcagcuggcccgacggagcugauaucaaccugaugccuauuuga

SEQ ID NO: 213826 - RNA, 1410 nt, Artificial Sequence
  derived and/or modified CDS sequence (opt5) from neuraminidase__InfluenzaA__AFD64035
augaaccccaaucagaagaucauuaccaucggcagcgugucccugacaauugccgcuaucugcuuccucaugcaaauugccauccuggucacgaccguuacacuucacuuuaaacagcaugaguguaacucuccuccgaauaaccaggugaugcugugcgaacccaccaucauugagagaaauaucacagaaauuguguaccucaccaacacaaccaucgagaaggaaauuuguccuaaacuggcggaguaucggaauuggagcaagccccagugcaacaucacgggguucgcuccuuuuuccaaagacaauucuauucgccuuagcgccggaggcgauaucugggucaccagagagcccuacguguccugugacccugauaagugcuaucaauucgcccuggggcagggaacaacccucaacaauggccacucuaacgacacaguucaugaucggaccccguaccgcacgcugcugaugaaugaacucggggugcccuuucaccugggaacaagacaggucuguaucgcuuggagcuccagcucuugccaugacggcaaggccuggcuucacguguguguuaccggcgaugacaaaaacgcuacagccuccuucauuuauaaugggcggcugguggauagcaucggaucuugguccaagaaaauucuccgcacccaggagagcgaaugcgucuguaucaacgggaccugcacaguggugaugacggacggcucugcguccggaaaggccgauaccaaaauucuguuuaucgaggagggcaagaucguccacauuagcacacuuuccgggucugcucaacauguugaagagugcagcuguuacccuagauaucccggagugcggugcgugugucgcgacaacuggaagggcuccaauagaccuaucgucgauauuaacgugaaagacuacagcaucguuucuuccuacgugugcagcggccuggucggggacacaccccggaagaaugauucuuucagcuccucucacugucucgacccgaacaaugaagagggaggccauggggugaaaggaugggccuuugaugacggcaacgauguuuggauggggcgcaccauuagcgaaaagcugagauccggauaugagaccuucaaagugaucgagggcuggagcaagccuaauucuaaacugcagaucaaccggcaggucauuguggaacgcggcaauagauccggguacagcggaaucuuuucugucgagggcaaguccugcauuaaccgguguuucuauguggaacucaucagagggcgcaaggaggaaacggagguuugguggacaagcaauuccguggucguguuuugcggaaccucuggcaccuacgggacaggcagcuggcccgacggagcugauauuaaccugaugccuaucuga

SEQ ID NO: 213827 - RNA, 1410 nt, Artificial Sequence
  derived and/or modified CDS sequence (opt5) from neuraminidase__InfluenzaA__AFD64046
augaaccccaaucagaagaucauuaccaucggcagcgugucccugacaauugccacgaucugcuuccucaugcaaauugcuauccuggucaccacaguuacccuucacuuuaaacagcaugaguguaacucuccuccgaauaaccaggugaugcugugcgaacccacaaucauugagagaaauaucaccgaaauuguguaccucacaaacaccacgaucgagaaggaaauuuguccuaaacuggccgaguaucggaauuggagcaagccccagugcaacaucaccggguucgcgccuuuuuccaaagacaauucuauucgccuuagcgcuggaggcgauaucugggucacaagagagcccuacguguccugugacccugauaagugcuaucaauucgcccuggggcagggaaccacacucaacaauggccacucuaacgacaccguucaugaacggacgccguaccgcacacugcugaugaaugagcucggggugcccuuucaccugggaaccagacaggucuguaucgccuggagcuccagcucuugccaugauggcaaggcuuggcuucacguguguguuacaggcgacgauaaaaacgccaccgcuuccuucauuuauaaugggcggcugguggacagcaucggaucuugguccaagaaaauucuccgcacccaggaaagcgagugcgucuguaucaacggcacaugcacgguggugaugaccgaugggucugccuccggaaaggcggacacaaaaauucuguuuaucgaggaaggcaagaucguccacauuagcacccuuuccgggucugcccaacauguugaggaaugcagcuguuacccuagauaucccggagugcggugcgugugucgcgauaacuggaagggcuccaauagaccuaucgucgacauuaacgugaaagauuacagcaucguuucuuccuacgugugcagcggccuggucggggacacaccccggaagaaugacucuuucagcuccucucacugucucgauccgaacaaugaggaaggaggccauggggugaaaggaugggcuuuugacgauggcaacgacguuuggauggggcgcaccauuagcgagaagcugagauccggauaugagacguucaaagugaucgaaggcuggagcaagccuaauucuaaacugcagaucaaccggcaggucauuguggagcgcggcaauagauccggguacagcggaaucuuuucugucgaaggcaaguccugcauuaaccgguguuucuauguggagcucaucagagggcgcaaggaagagacagagguuugguggaccagcaauuccauuguggucuuuugcggaaccucuggcacauacgggaccggcagcuggcccgauggagccgacaucaaccugaugccuauuuga

SEQ ID NO: 213828 - RNA, 1410 nt, Artificial Sequence; identical to SEQ ID NO: 213802
  derived and/or modified CDS sequence (opt5) from neuraminidase__InfluenzaA__AFD64057

SEQ ID NO: 213829 - RNA, 1410 nt, Artificial Sequence
  derived and/or modified CDS sequence (opt5) from neuraminidase__InfluenzaA__AFD64068
augaaccccaaucagaagaucauuaccaucggcagcgugucccugacaauuucuacgaucugcuucuuuaugcaaauugccauccucaucaccacagucacccugcacuucaaacaguacgaguuuaacagcccuccgaauaaccagguuaugcuuugugaacccacaauuaucgagagaaauauuaccgaaaucguguaucugacaaacaccacgauugagaaggaaaucugcccuaaacucgcugaguaccggaauugguccaagccccagugugacauuaccggguucgccccuuuuucuaaagauaacagcauccgccuguccgcgggaggcgacaucugggugacaagagagcccuaugucucuugcgauccugacaaguguuaccaauucgcucuugggcagggaaccacacugaauaacgugcauagcaaugauaccguucacaaccggacgccguaucgcacacuccugaugaaugaacugggcgugcccuuucaucucgggaccaagcaggucugcauugccugguccucuagcuccugucacgacggaaaagccuggcugcaugugugcguuacaggcgaugacaagaacgcuaccgccagcuucaucuacaauggcagacuuguggauucuauugucuccuggagcaaaaagauccugcggacccaggagucugaaugugugugcauuaacgggacauguacgguggucaugaccgacggauccgcuagcggcaaagccgauacaaagauccucuuuaucgaggaggggaagauuguucacaccuccacacugucuggaagcgcgcaacacguggaagagugcuccugcuauccucgcuaccccggcgugagaugugucugccgggacaacuggaaagggagcaaucgcccuaucguggauauuaacaucaaggacuacucuauuguuuccagcuauguguguucuggacuugucggcgacacccccagaaagaaugauagcuccucuagcucccauugccuggacccgaacaaugaagagggcgggcacggagugaaaggcugggccuucgaugacgggaacgauguuuggaugggacggacgaucagcgaaaaaucucgcuccggcuacgagacauuuaaggugaucgagggguggagcaauccuaacucuaaacuccagauuaauagacaggucaucguggaccggggaaaccgcuccggcuauagcggcauuuucuccgucgaagggaagucuuguaucaauagaugcuuuuacguggagcugauucggggaagaaaggaagagaccgaaguucuguggaccagcaacuccaucguggucuucuguggcacaucugggaccuauggaacaggcagcuggcccgauggggcugacauuaaucucaugccuaucuga

SEQ ID NO: 213830 - RNA, 1410 nt, Artificial Sequence
  derived and/or modified CDS sequence (opt5) from neuraminidase__InfluenzaA__AFD64079
augaaccccaaucagaagaucauuaccaucggcagcgugucccugacaauugccgcuaucugcuuccucaugcaaauugccauccuggucacgaccguuacacuucacuuuaaacagcaugaguguaacucuccuccgaauaaccaggugaugcugugcgaacccaccaucauugagagaaauaucacagaaauuguguaccucaccaacacaaccaucgagaaggaaauuuguccuaaacuggcggaguaucggaauuggagcaagccccagugcaacaucacgggguucgcuccuuuuuccaaagacaauucuauucgcaucagcgccggaggcgauaucugggucaccagagagcccuacguguccugugacccugauaagugcuaucaauucgcccuugggcagggaacaacccugaacaauggccacucuaacgacacaguucaugaucggaccccguaccgcacgcuccugaugaaugaacugggggugcccuuucaccucggaacaagacaggucuguauugcuuggagcuccagcucuugccaugacggcaaggccuggcugcacguguguguuaccggcgaugacaaaaacgcuacagccuccuucaucuauaaugggcggcuuguggauagcauuggaucuugguccaagaaaauccugcgcacccaggagagcgaaugcgucuguauuaacgggaccugcacaguggugaugacggacggcucugcguccggaaaggccgauaccaaaauccucuuuaucgaggagggcaagauuguccacaucagcacacuguccgggucugcucaacauguugaagagugcagcuguuacccuagauaucccggagugcggugcgugugucgcgacaacuggaagggcuccaauagaccuauugucgauaucaacgugaaagacuacagcauuguuucuuccuacgugugcagcggccuugucggggacacaccccggaagaaugauucuuucagcuccucucacugucuggacccgaacaaugaagagggaggccauggggugaaaggaugggccuuugaugacggcaacgauguuuggauggggcgcaccaucagcgaaaagcucagauccggauaugagaccuucaaagugaucgagggcuggagcaagccuaauucuaaacugcagauuaaccggcaggucaucguggaacgcggcaauagauccggguacagcggaaucuuuucugucgagggcaaguccugcauuaaccgguguuucuauguggaacugauuagagggcgcaaggaggaaacggagguuugguggacaagcaauuccaucguggucuuuugcggaaccucuggcaccuacgggacaggcagcuggcccgacggagcugauauuaaccucaugccuaucuga

SEQ ID NO: 213831 - RNA, 1410 nt, Artificial Sequence; identical to SEQ ID NO: 206297
  derived and/or modified CDS sequence (opt5) from neuraminidase__InfluenzaA__AFD64090

SEQ ID NO: 213832 - RNA, 1410 nt, Artificial Sequence
  derived and/or modified CDS sequence (opt5) from neuraminidase__InfluenzaA__AFD64101
augaaccccaaucagaagaucauuaccaucggcagcgugucccugacaauugccgcuaucugcuuccucaugcaaauugccauccuggucacgaccguuacacuucacuuuaaacagcaugaguguaacucuccuccgaauaaccaggugaugcugugcgaacccaccaucauugagagaaauaucacagaaauuguguaccucaccaacacaaccaucgagaaggaaauuuguccuaaacuggcggaguaucggaauuggagcaagccccagugcaacaucacgggguucgcuccuuuuuccaaagacaauucuauucgccuuagcgccggaggcgauaucugggucaccagagagcccuacguguccugugacccugauaagugcuaucaauucgcccuggggcagggaacaacccucaacaauggccacucuaacgacacaguucaugggcggaccccguaccgcacgcugcugaugaaugaacucggagugcccuuucaccugggcacaagacaggucuguaucgcuuggagcuccagcucuugccaugauggcaaggccuggcuucacguguguguuaccggggacgauaaaaacgcuacagccuccuucauuuauaauggacggcugguggacagcaucggcucuugguccaagaaaauucuccgcacccaggagagcgaaugcgucuguaucaacgggaccugcacaguggugaugacggauggaucugcguccggcaaggccgacaccaaaauucuguuuaucgaggaggggaagaucguccacauuagcacacuuuccggaucugcucaacauguugaagagugcagcuguuacccuagauaucccggcgugcggugcgugugucgcgauaacuggaagggcuccaauagaccuaucgucgacauuaacgugaaagauuacagcaucguuucuuccuacgugugcagcgggcuggucggagacacaccccggaagaaugacucuuucagcuccucucacugucucgauccgaacaaugaagagggcgggcauggagugaaaggcugggccuuugacgaugggaacgacguuuggaugggacgcaccauuagcgaaaagcugagauccggcuaugagaccuucaaagugaucgagggcuggagcaagccuaauucuaaacugcagaucaaccggcaggucauuguggaacgcgggaauagauccggauacagcggcaucuuuucugucgaggggaaguccugcauuaaccgguguuucuauguggaacucaucagaggacgcaaggaggaaacggagguuugguggacaagcaauuccauuguggucuuuugcggcaccucugggaccuacggcacaggaagcuggcccgauggcgcugacaucaaccugaugccuauuuga

SEQ ID NO: 213833 - RNA, 1410 nt, Artificial Sequence
  derived and/or modified CDS sequence (opt5) from neuraminidase__InfluenzaA__AFD64112
augaaccccaaucagaagaucauuaccaucggcagcgugucccugacaauugccacgaucugcuuccucaugcaaauugcuauccuggucaccacaguuacccuucacuuuaaacaguacgaguguaacucuccuccgaauaaccaggugaugcugugcgaacccacaaucauugagagaaauaucaccgaaauuguguaucucacaaacaccacgaucgagaaggaaauuuguccuaaacuggccgaguaccggaauuggagcaagccccagugcaacaucaccggguucgcgccuuuuuccaaagacaauucuauucgccuuagcgcuggaggcgauaucugggucacaagagagcccuauguguccugugacccugauaagugcuaccaauucgcccuggggcagggaaccacacucaacaauggccauucuaacgacaccguucacgaucggacgccguaucgcacacugcugaugaaugaacucggggugcccuuucaucugggaaccagacaggucuguaucgccuggagcuccagcucuugccacgacggcaaggcuuggcuucauguguguguuacaggcgaugacaaaaacgccaccgcuuccuucauuuacaaugggcggcugguggauagcaucggaucuugguccaagaaaauucuccgcacccaggagagcgaaugcgucuguaucaacggcacaugcacgguggugaugaccgacgggucugccuccggaaaggcggauacaaaaauucuguuuaucgaggagggcaagaucauucacaucagcacccuuuccgggucugcccaacacgucgaagagugcagcuguuauccuagauaccccggaguucggugcgugugucgcgacaacuggaagggcuccaauagaccuauuguggauaucaacgucaaagacuacagcauugugucuuccuauguuugcagcggccuggugggggacacaccccggaagaaugauucuagcuccucuagccauugucucgacccgaacaaugaagagggaggccacggggucaaaggaugggcuuucgaugacggcaacgauguguggauggggcgcaccaucuccgaaaagcugagaagcggauacgagacguuuaaaguuaucgagggcuggucuaagccuaauuccaaacugcagauuaaccgccaggugaucgucgaacgggacaauagaagcggcuauucugggauuuucuccguggagggaaagagcugcaucaaccgguguuuuuacgucgaacucauuagaggccgcaaggaggaaacagaggugugguggaccuccaauucuaucguuguguucugcgggaccagcggaacauauggcaccggguccuggcccgauggcgccgacauuaaccugaugccuaucuga

SEQ ID NO: 213834 - RNA, 1410 nt, Artificial Sequence; identical to SEQ ID NO: 208003
  derived and/or modified CDS sequence (opt5) from neuraminidase__InfluenzaA__AFD64123

SEQ ID NO: 213835 - RNA, 1410 nt, Artificial Sequence; identical to SEQ ID NO: 206297
  derived and/or modified CDS sequence (opt5) from neuraminidase__InfluenzaA__AFD64134

SEQ ID NO: 213836 - RNA, 1410 nt, Artificial Sequence; identical to SEQ ID NO: 206297
  derived and/or modified CDS sequence (opt5) from neuraminidase__InfluenzaA__AFD64145

SEQ ID NO: 213837 - RNA, 1410 nt, Artificial Sequence; identical to SEQ ID NO: 206297
  derived and/or modified CDS sequence (opt5) from neuraminidase__InfluenzaA__AFD64156

SEQ ID NO: 213838 - RNA, 1410 nt, Artificial Sequence; identical to SEQ ID NO: 206217
  derived and/or modified CDS sequence (opt5) from neuraminidase__InfluenzaA__AFD64167

SEQ ID NO: 213839 - RNA, 1410 nt, Artificial Sequence; identical to SEQ ID NO: 206297
  derived and/or modified CDS sequence (opt5) from neuraminidase__InfluenzaA__AFD64181

SEQ ID NO: 213840 - RNA, 1410 nt, Artificial Sequence
  derived and/or modified CDS sequence (opt5) from neuraminidase__InfluenzaA__AFD64192
augaaccccaaucagaagaucauuaccaucggcagcgugucccugacaauugccgcuaucugcuuccucaugcaaauugccauccuggucacgaccguuacacuucacuuuaaacagcaugaguguaacucuccuccgaauaaccaggugaugcugugcgaacccaccaucauugagagaaauaucacagaaauuguguaccucaccaacacaaccaucgagaaggaaauuuguccuaaacuggcggaguaucggaauuggagcaagccccagugcaacaucacgggguucgcuccuuuuuccaaagacaauucuauucgccuuagcgccggaggcgauaucugggucaccagagagcccuacguguccugugacccugauaagugcuaucaauucgcccuggggcagggaacaacccucaacaauggccacucuaacgacacaguucaugaucggaccccguaccgcacgcugcugaugaaugaacucggggugcccuuucaccugggaacaagacaggucuguaucgcuuggagcuccagcucuugccaugacggcaaggccuggcuucacguguguguuaccggcgaugacaaaaacgcuacagccuccuucauuuauaaugggcggcugguggauagcaucggaucuugguccaagaaaauucuccgcacccaggagagcgaaugcgucuguaucaacgggaccugcacaguggugaugacggacggcucugcguccggaaaggccgauaccaaaauucuguuuaucgaggagggcaagaucguccacguuagcacacuuuccgggucugcucaacauguggaagagugcagcuguuacccuagauaucccggagugcggugcgucugucgcgacaacuggaagggcuccaauagaccuauuguggauaucaacguuaaagacuacagcauugugucuuccuacgucugcagcggccuggugggggacacaccccggaagaaugauucuuucagcuccucucacugucucgacccgaacaaugaagagggaggccaugggguuaaaggaugggccuuugaugacggcaacgauguguggauggggcgcaccaucagcgaaaagcugagauccggauaugagaccuucaaagucauugagggcuggagcaagccuaauucuaaacugcagaucaaccgccaggugaucgucgaacggggcaauagauccggguacagcggaaucuuuucuguggagggcaaguccugcauuaaccgguguuucuauguugaacucauuagagggcgcaaggaggaaacggaggugugguggacaagcaauuccaucgucguguuuugcggaaccucuggcaccuacgggacaggcagcuggcccgacggagcugauauuaaccugaugccuaucuga

SEQ ID NO: 213841 - RNA, 1410 nt, Artificial Sequence
  derived and/or modified CDS sequence (opt5) from neuraminidase__InfluenzaA__AFD64203
augaaccccaaucagaagaucauuaccaucggcagcgugucccugacaauugccgcuaucugcuuccucaugcaaauugccauccuggucacgaccguuacacuucacuuuaaacagcaugaguguaacucuccuccgaauaaccaggugaugcugugcgaacccaccaucauugagagaaauaucacagaaauuguguaccucaccaacacaaccaucgagaaggaaauuuguccuaaacuggcggaguaucggaauuggagcaagccccagugcaacaucacgggguucgcuccuuuuuccaaagacaauucuauucgccuuagcgccggaggcgauaucugggucaccagagagcccuacguguccugugacccugauaagugcuaucaauucgcccuggggcagggaacaacccucaacaaucggcacucuaacgacacaguucaugaucgcaccccguacagaacgcugcugaugaaugaacucggcgugcccuuucaccuggggacacggcaggucuguaucgcuuggagcuccagcucuugccaugacggaaaggccuggcuucacguguguguuaccggcgaugacaaaaacgcuacagccuccuucauuuauaauggccgccugguggauagcaucgggucuugguccaagaaaauucucagaacccaggagagcgaaugcgucuguaucaacggaaccugcacaguggugaugacggacggcucugcguccgggaaggccgauaccaaaauucuguuuaucgaggagggaaagaucguccacauuagcacacuuuccggcucugcucaacauguugaagagugcagcuguuacccucgguaucccggggugcgcugcguguguagagacaacuggaagggauccaaucggccuaucgucgauauuaacgugaaagacuacagcaucguuucuuccuacgugugcagcggccuggucggcgacacaccccgcaagaaugauucuuucagcuccucucacugucucgacccgaacaaugaagaagggggacauggcgugaaagggugggccuuugaugacggaaacgauguuuggaugggcagaacccugagcgagaagcugcgguccggguaugagaccuucaaagugauugagggauggagcaagccuaauucuaaacuccagaucaaccgccaggucaucguggaaagaggcaaucgguccggcuacagcgggaucuuuucugucgagggaaaguccugcauuaacagauguuucuauguggaacugauucgcggccggaaggaggaaacggagguuugguggacaagcaauuccaucguggucuuuugcgggaccucuggaaccuacggcacagggagcuggcccgacggcgcugauauuaaccuuaugccuaucuga

SEQ ID NO: 213842 - RNA, 1410 nt, Artificial Sequence; identical to SEQ ID NO: 213802
  derived and/or modified CDS sequence (opt5) from neuraminidase__InfluenzaA__AFD64214

SEQ ID NO: 213843 - RNA, 1410 nt, Artificial Sequence; identical to SEQ ID NO: 208001
  derived and/or modified CDS sequence (opt5) from neuraminidase__InfluenzaA__AFD64225

SEQ ID NO: 213844 - RNA, 1410 nt, Artificial Sequence; identical to SEQ ID NO: 206297
  derived and/or modified CDS sequence (opt5) from neuraminidase__InfluenzaA__AFD64317

SEQ ID NO: 213845 - RNA, 1410 nt, Artificial Sequence; identical to SEQ ID NO: 208003
  derived and/or modified CDS sequence (opt5) from neuraminidase__InfluenzaA__AFD64328

SEQ ID NO: 213846 - RNA, 1410 nt, Artificial Sequence; identical to SEQ ID NO: 213802
  derived and/or modified CDS sequence (opt5) from neuraminidase__InfluenzaA__AFD64339

SEQ ID NO: 213847 - RNA, 1410 nt, Artificial Sequence; identical to SEQ ID NO: 206297
  derived and/or modified CDS sequence (opt5) from neuraminidase__InfluenzaA__AFD64350

SEQ ID NO: 213848 - RNA, 1410 nt, Artificial Sequence; identical to SEQ ID NO: 213802
  derived and/or modified CDS sequence (opt5) from neuraminidase__InfluenzaA__AFD64361

SEQ ID NO: 213849 - RNA, 1410 nt, Artificial Sequence; identical to SEQ ID NO: 213802
  derived and/or modified CDS sequence (opt5) from neuraminidase__InfluenzaA__AFD64372

SEQ ID NO: 213850 - RNA, 1410 nt, Artificial Sequence; identical to SEQ ID NO: 206297
  derived and/or modified CDS sequence (opt5) from neuraminidase__InfluenzaA__AFD64383

SEQ ID NO: 213851 - RNA, 1410 nt, Artificial Sequence; identical to SEQ ID NO: 213802
  derived and/or modified CDS sequence (opt5) from neuraminidase__InfluenzaA__AFD64394

SEQ ID NO: 213852 - RNA, 1410 nt, Artificial Sequence; identical to SEQ ID NO: 206297
  derived and/or modified CDS sequence (opt5) from neuraminidase__InfluenzaA__AFD64405

SEQ ID NO: 213853 - RNA, 1410 nt, Artificial Sequence; identical to SEQ ID NO: 206297
  derived and/or modified CDS sequence (opt5) from neuraminidase__InfluenzaA__AFD64416

SEQ ID NO: 213854 - RNA, 1410 nt, Artificial Sequence; identical to SEQ ID NO: 206297
  derived and/or modified CDS sequence (opt5) from neuraminidase__InfluenzaA__AFD64427

SEQ ID NO: 213855 - RNA, 1410 nt, Artificial Sequence
  derived and/or modified CDS sequence (opt5) from neuraminidase__InfluenzaA__AFD64438
augaaccccaaucagaagaucauuaccaucggcagcgugucccugacaauugccgcuaucugcuuccucaugcaaauugccauccuggucacgaccguuacacuucacuuuaaacagcaugaguguaacucuccuccgaauaaccaggugaugcugugcgaacccaccaucauugagagaaauaucacagaaauuguguaccucaccaacacaaccaucgagaaggaaauuuguccuaaucuggcggaguaucggaacuggagcaaaccccagugcaauaucacgggguucgcuccuuuuuccaaggacaacucuauucgccuuagcgccggaggcgauaucugggucaccagagagcccuacguguccugugacccugauaaaugcuaucaauucgcccuggggcagggaacaacccucaauaacggccacucuaaugacacaguucaugaucggaccccguaccgcacgcugcugaugaacgaacucggggugcccuuucaccugggaacaagacaggucuguaucgcuuggagcuccagcucuugccaugacggcaaggccuggcuucacguguguguuaccggcgaugacaagaaugcuacagccuccuucauuuauaacgggcggcugguggauagcaucggaucuugguccaaaaagauucuccgcacccaggagagcgaaugcgucuguaucaacgggaccugcacaguggugaugacggacggcucugcguccggaaaagccgauaccaagauucuguuuaucgaggagggcaaaaucguccacauuagcacacuuuccgggucugcucaacauguugaagagugcagcuguuacccuagauaucccggagugcggugcgugugucgcgacaauuggaagggcuccaacagaccuaucgucgauauuaaugugaaggacuacagcaucguuucuuccuacgugugcagcggccuggucggggacacaccccggaaaaacgauucuuucagcuccucucacugucucgacccgaauaacgaagagggaggccauggggugaagggaugggccuuugaugacggcaaugauguuuggauggggcgcaccauuagcgaaaaacugagauccggauaugagaccuucaaggugaucgagggcuggagcaaaccuaacucuaagcugcagaucaaucggcaggucauuguggaacgcggcaacagauccggguacagcggaaucuuuucugucgagggcaaauccugcauuaaucgguguuucuauguggaacucaucagagggcgcaaggaggaaacggagguuugguggacaagcaacuccauuguggucuuuugcggaaccucuggcaccuacgggacaggcagcuggcccgacggagcugauaucaaucugaugccuauuuga

SEQ ID NO: 213856 - RNA, 1410 nt, Artificial Sequence; identical to SEQ ID NO: 206297
  derived and/or modified CDS sequence (opt5) from neuraminidase__InfluenzaA__AFD64449

SEQ ID NO: 213857 - RNA, 1410 nt, Artificial Sequence; identical to SEQ ID NO: 206217
  derived and/or modified CDS sequence (opt5) from neuraminidase__InfluenzaA__AFD64460

SEQ ID NO: 213858 - RNA, 1410 nt, Artificial Sequence; identical to SEQ ID NO: 213215
  derived and/or modified CDS sequence (opt5) from neuraminidase__InfluenzaA__AFD98098

SEQ ID NO: 213859 - RNA, 1410 nt, Artificial Sequence
  derived and/or modified CDS sequence (opt5) from neuraminidase__InfluenzaA__AFD98120
augaaccccaaucagaagaucauuaccaucggcagcgugucccugacaauuucuacgaucugcuucuuuaugcaaauugccauccucaucaccacagucacccugcacuucaaacaguacgaguuuaacagcccuccgaauaaccagguuaugcuuugugaacccacaauuaucgagagaaauauuaccgaaaucguguaucugacaaacaccacgauugagaaggaaaucugcccuaaacucgcugaguaccggaauugguccaagccccagugugacauuaccggguucgccccuuuuucuaaagauaacagcauccgccuguccgcgggaggcgacaucugggugacaagagagcccuaugucucuugcgauccugacaaguguuaccaauucgcucuugggcagggaaccacacugaauaacgugcauagcaauaacaccguucgggaucgcacgccguauagaacacuccugaugaaugaacugggcgugcccuuucaccucgggaccaagcaggucugcauugccugguccagcagcuccugucaugacggaaaagccuggcugcacgugugcaucacaggcgaugacaagaacgcuaccgccagcuucauuuacaauggccggcuuguugauucuguggucuccuggagcaaagagauccugcgcacccaggaaucugagugugugugcauuaacgggacauguacgguggucaugaccgacggauccgcuagcggcaaggccgauacaaaaauccucuuuaucgaggaagggaagauuguucauaccuccacacugucuggaagcgcgcaacacguggaggaaugcuccugcuauccuagauaccccggcgugcggugugucugccgcgacaacuggaaggggagcaauagaccuaucguggauauuaacaucaaagaccacucuauuguuuccagcuacguguguucuggacuugucggcgacacgccccggaagaaugauagcuccucuagcucccauugccuggacccgaacaaugaggaaggcgggcacggagugaaaggcugggccuucgaugacgggaacgauguuuggaugggacgcaccaucaaugagacaagcagacucggcuaugagaccuuuaaggugaucgaaggguggucuaacccuaaauccaagcugcagauuaaucggcaggucaucguggacaaaggaaaccgcagcggcuacucuggcauuuucuccgucgaggggaagucuuguaucaauagaugcuuuuauguggaacugauucggggaagaaaggaggaaaccgagguucucuggacauccaacucuaucguggucuucuguggcaccagcgggacauacggaacgggcuccuggcccgauggggcugaccugaaucuuaugccuauuuga

SEQ ID NO: 213860 - RNA, 1410 nt, Artificial Sequence; identical to SEQ ID NO: 211590
  derived and/or modified CDS sequence (opt5) from neuraminidase__InfluenzaA__AFD98131

SEQ ID NO: 213861 - RNA, 1410 nt, Artificial Sequence; identical to SEQ ID NO: 213215
  derived and/or modified CDS sequence (opt5) from neuraminidase__InfluenzaA__AFD98142

SEQ ID NO: 213862 - RNA, 1410 nt, Artificial Sequence; identical to SEQ ID NO: 213859
  derived and/or modified CDS sequence (opt5) from neuraminidase__InfluenzaA__AFD98164

SEQ ID NO: 213863 - RNA, 1410 nt, Artificial Sequence
  derived and/or modified CDS sequence (opt5) from neuraminidase__InfluenzaA__AFD98175
augaaccccaaucagaagaucauuaccaucggcagcgugucccugacaauuucuacgaucugcuucuuuaugcaaauugccauccucaucaccacagucacccugcacuucaaacaguacgaguuuaacagcccuccgaauaaccagguuaugcuuugugaacccacaauuaucgagagaaauauuaccgaaaucguguaucugacaaacaccacgauugagaaggaaaucugcccuaaacucgcugaguaccggaauugguccaagccccagugugacauuaccggguucgccccuuuuucuaaagauaacagcauccgccuguccgcgggaggcgacaucugggugacaagagagcccuaugucucuugcgauccugacaaguguuaccaauucgcucuugggcagggaaccacacugaauaacgugcauagcaauaacaccguucacgaucggacgccguaucgcacacuccugaugaaugaacugggcgugcccuuucaucucgggaccaagcaggucugcauugccugguccagcagcuccugucacgacggaaaagccuggcugcaugugugcaucacaggcgaugacaagaacgcuaccgccagcuucauuuacaauggcagacuuguugauucuguggucuccuggagcaaagagauccugcggacccaggaaucugagugugugugcauuaacgggacauguacgguggucaugaccgacggauccgcuagcggcaaggccgauacaaaaauccucuuuaucgaggaagggaagauuguucacaccuccacacugucuggaagcgcgcaacacguggaggaaugcuccugcuauccucgcuaccccggcgugagaugugucugccgggacaacuggaaggggagcaaucgcccuaucguggauauuaacaucaaagaccauucuauuguuuccagcuacguguguucuggacuugucggcgacacccccagaaagaaugauagcuccucuagcucccacugccuggacccgaacaaugaggaaggcgggcauggagugaaaggcugggccuucgaugacgggaacgauguuuggaugggacggacgaucaaugagacaagccgccucggcuaugagaccuuuaaggugaucgaaggguggucuaacccuaaauccaagcugcagauuaauagacaggucaucguggacaaaggaaaccggagcggcuacucuggcauuuucuccgucgaggggaagucuuguaucaaucgcugcuuuuauguggaacugauuagaggacggaaggaggaaaccgagguucucuggacauccaacucuaucguggucuucuguggcaccagcgggacauacggaacgggcuccuggcccgauggggcugaccugaaucuuaugccuauuuga

SEQ ID NO: 213864 - RNA, 1410 nt, Artificial Sequence
  derived and/or modified CDS sequence (opt5) from neuraminidase__InfluenzaA__AFD98186
augaaccccaaucagaagaucauuaccaucggcagcgugucccugacaauuucuacgaucugcuucuuuaugcaaauugccauccucaucaccacagucacccugcacuucaaacaguacgaguuuaacagcccuccgaauaaccagguuaugcuuugugaacccacaauuaucgagagaaauauuaccgaaaucguguaucugacaaacaccacgauugagaaggaaaucugcccuaaacucgcugaguaccggaauugguccaagccccagugugacauuaccggguucgccccuuuuucuaaagauaacagcauccgccuguccgcgggaggcgacaucugggugacaagagagcccuaugucucuugcgauccugacaaguguuaccaauucgcucuugggcagggaaccacacugaauaacgugcauagcaauaacaccguucgggaucgcacgccguauagaacacuccugaugaaugaacugggcgugcccuuucaccucgggaccaagcaggucugcauugccugguccucuagcuccugucaugacggaaaagccuggcugcacgugugcaucacaggcgaugacaagaacgcuaccgccagcuucauuuacaauggcaaacuuguugauucuguggucuccuggagcaaggagauccugcggacccaggaaucugagugugugugcauuaacgggacauguacgguggucaugaccgacggauccgcuagcggcaaagccgauacaaagauccucuuuguugaggaagggaagaucgugcauaccuccacacugucuggaagcgcgcaacacguggaggaaugcuccugcuauccucgcuaccccggcgucagaugugugugccgggacaacuggaaagggagcaaucgcccuauuguugauaucaacauuaaggaccacucuaucauuuccagcuacguguguucuggacuugucggcgacacccccagaaagaaugauagcuccucuagcucccauugccuggacccgaacaaugaggaaggcgggcacggagugaagggcugggccuucgaugacgggaacgauguuuggaugggacggacgaucaaugagacaagccgccucggcuaugagaccuuuaaagugaucgaaggguggucuaacccuaaguccaaacugcagauuaauagacaggucaucguggaccggggaaaccgcagcggcuacucuggcauuuucuccgucgaggggaaaagcuguaucaauagaugcuuuuauguggaacugauucggggaagaaaggaggaaaccgagguucucuggacauccaacucuaucguggucuucuguggcaccagcgggacauacggaacgggcuccuggcccgauggggcugaccugaaucuuaugccuauuuga

SEQ ID NO: 213865 - RNA, 1410 nt, Artificial Sequence; identical to SEQ ID NO: 211590
  derived and/or modified CDS sequence (opt5) from neuraminidase__InfluenzaA__AFD98197

SEQ ID NO: 213866 - RNA, 1410 nt, Artificial Sequence; identical to SEQ ID NO: 212327
  derived and/or modified CDS sequence (opt5) from neuraminidase__InfluenzaA__AFD98208

SEQ ID NO: 213867 - RNA, 1410 nt, Artificial Sequence
  derived and/or modified CDS sequence (opt5) from neuraminidase__InfluenzaA__AFD98218
augaaccccaaucagaagaucauuaccaucggcagcgugucccugacaauuucuacgaucugcuucuuuaugcaaauugccauccucaucaccacagucacccugcacuucaaacaguacgaguuuaacagcccuccgaauaaccagguuaugcuuugugaacccacaauuaucgagagaaauauuaccgaaaucguguaucugacaaacaccacgauugagaaggaaaucugcccuaaacccgcugaguaccggaauugguccaagccucagugugacauuaccggguucgcccccuuuucuaaagauaacagcauccgccucuccgcgggaggcgacaucugggugacaagagagccuuaugucucuugcgauccggacaaguguuaccaauucgcucuggggcagggaaccacacuuaauaacgugcauagcaauaacaccguucgggaucgcacgcccuauagaacacugcucaugaaugaacugggcgugccuuuucaccuggggaccaagcaggucugcauugccugguccagcagcuccugucaugacggaaaagccuggcuccacgugugcaucacaggcgaugacaagaacgcuaccgccagcuucauuuacaauggccggcugguugauucuguggucuccuggagcaaagagauccuucgcacccaggaaucugagugugugugcauuaacgggacauguacgguggucaugaccgacggauccgcuagcggcaaggccgauacaaaaauccuguuuaucgaggaagggaagauuguucauaccuccacacucucuggaagcgcgcaacacguggaggaaugcuccugcuaucccagauacccuggcgugcggugugucugccgcgacaacuggaaggggagcaauagacccaucguggauauuaacaucaaagaccacucuauuguuuccagcuacguguguucuggacuggucggcgacaccccgcggaagaaugauagcuccucuagcucccauugccuugacccuaacaaugaggaaggcgggcacggagugaaaggcugggccuucgaugacgggaacgauguuuggaugggacgcacgaucgacgagacaagcagacugggcuaugagaccuuuaaggugaucgaaggguggucuaaucccaaauccaagcuccagauuaaccggcaggucaucguggauaaaggaaaucgcagcggcuacucuggcauuuucuccgucgaggggaagucuuguaucaacagaugcuuuuauguggaacugauucggggaagaaaggaggaaaccgagguucuguggacauccaauucuaucguggucagcuguggcaccuccgggacauacggaacgggcucuuggccugacggggcugaucucaaccugaugcccauuuga

SEQ ID NO: 213868 - RNA, 1410 nt, Artificial Sequence; identical to SEQ ID NO: 211590
  derived and/or modified CDS sequence (opt5) from neuraminidase__InfluenzaA__AFD98229

SEQ ID NO: 213869 - RNA, 1410 nt, Artificial Sequence; identical to SEQ ID NO: 211590
  derived and/or modified CDS sequence (opt5) from neuraminidase__InfluenzaA__AFD98240

SEQ ID NO: 213870 - RNA, 1410 nt, Artificial Sequence; identical to SEQ ID NO: 213859
  derived and/or modified CDS sequence (opt5) from neuraminidase__InfluenzaA__AFD98251

SEQ ID NO: 213871 - RNA, 1410 nt, Artificial Sequence; identical to SEQ ID NO: 213859
  derived and/or modified CDS sequence (opt5) from neuraminidase__InfluenzaA__AFD98262

SEQ ID NO: 213872 - RNA, 1410 nt, Artificial Sequence; identical to SEQ ID NO: 212781
  derived and/or modified CDS sequence (opt5) from neuraminidase__InfluenzaA__AFD98273

SEQ ID NO: 213873 - RNA, 1410 nt, Artificial Sequence; identical to SEQ ID NO: 212329
  derived and/or modified CDS sequence (opt5) from neuraminidase__InfluenzaA__AFD98283

SEQ ID NO: 213874 - RNA, 1410 nt, Artificial Sequence; identical to SEQ ID NO: 211590
  derived and/or modified CDS sequence (opt5) from neuraminidase__InfluenzaA__AFD98293

SEQ ID NO: 213875 - RNA, 1410 nt, Artificial Sequence; identical to SEQ ID NO: 212781
  derived and/or modified CDS sequence (opt5) from neuraminidase__InfluenzaA__AFD98313

SEQ ID NO: 213876 - RNA, 1410 nt, Artificial Sequence; identical to SEQ ID NO: 212329
  derived and/or modified CDS sequence (opt5) from neuraminidase__InfluenzaA__AFD98323

SEQ ID NO: 213877 - RNA, 1410 nt, Artificial Sequence; identical to SEQ ID NO: 212781
  derived and/or modified CDS sequence (opt5) from neuraminidase__InfluenzaA__AFD98333

SEQ ID NO: 213878 - RNA, 1410 nt, Artificial Sequence; identical to SEQ ID NO: 213859
  derived and/or modified CDS sequence (opt5) from neuraminidase__InfluenzaA__AFD98343

SEQ ID NO: 213879 - RNA, 1410 nt, Artificial Sequence
  derived and/or modified CDS sequence (opt5) from neuraminidase__InfluenzaA__AFD98354
augaaccccaaucagaagaucauuaccaucggcagcgugucccugacaauuucuacgaucugcuucuuuaugcaaauugccauccucaucaccacagucacccugcacuucaaacaguacgaguuuaacagcccuccgaauaaccagguuaugcuuugugaacccacaauuaucgagagaaauauuaccgaaaucguguaucugacaaacaccacgauugagaaggaaaucugcccuaaacucgcugaguaccggaauugguccaagccccagugugacauuaccggguucgccccuuuuucuaaagauaacagcauccgccuguccgcgggaggcgacaucugggugacaagagagcccuaugucucuugcgauccugacaaguguuaccaauucgcucuugggcagggaaccacacugaauaacgugcauagcaauaacaccguucgggaucgcacgccguauagaacacuccugaugaaugaacugggcgugcccuuucaccucgggaccaagcaggucugcauugccugguccucuagcuccugucaugacggaaaagccuggcugcacgugugcaucacaggcgaugacaagaacgcuaccgccagcuucauuuacaauggccggcuuguugauucuguggucuccuggagcaaagagauccugcgcacccaggaaucugagugugugugcauuaacgggacauguacgguggucaugaccgacggaaacgcuuccggcaaggccgauacaaaaauccucuuuaucgaggaagggaagauuguucauaccagcacacugcuuggauccgcgcaacacguggaggaaugcucuugcuauccuagauaccccggcgugcggugugucugccgcgacaauuggaaggggagcaacagaccuaucguggauauuaauaucaaagaccacuccauuguuagcucuuacguguguuccggacuggucggcgacacgccccggaagaacgauagcucuagcuccucucauugccucgacccgaauaacgaggaaggcgggcacggagugaaaggcugggccuucgaugacgggaaugauguuuggaugggacgcaccaucaacgagacaagcagacugggcuaugagaccuuuaaggugaucgaagggugguccaauccuaaaagcaagcugcagauuaaccggcaggucaucguggacaaaggaaaucgcucuggcuacuccggcauuuucagcgucgaggggaagucuuguaucaacagaugcuuuuauguggaacucauucggggaagaaaggaggaaaccgagguucuguggacauccaauagcaucguggucuucuguggcaccuccgggacauacggaacgggcucuuggcccgauggggcugaccuuaaccugaugccuauuuga

SEQ ID NO: 213880 - RNA, 1410 nt, Artificial Sequence
  derived and/or modified CDS sequence (opt5) from neuraminidase__InfluenzaA__AFD98365
augaaccccaaucagaagaucauuaccaucggcagcgugucccugacaauuucuacgaucugcuucuuuaugcaaauugccauccucaucaccacagucacccugcacuucaaacaguacgaguuuuauagcccuccgaacaaucagguuaugcuuugugaacccacaauuaucgagagaaacauuaccgaaaucguguaccugacaaauaccacgauugagaaggaaaucugcccuaaacucgcugaguaucggaacugguccaagccccagugugacauuaccggguucgccccuuuuucuaaagauaauagcauccgccuguccgcgggaggcgacaucugggugacaagagagcccuacgucucuugcgauccugacaaguguuaucaauucgcucuugggcagggaaccacacugaacaaugugcauagcaacaauaccguucgggaucgcacgccguacagaacacuccugaugaacgaacugggcgugcccuuucaccucgggaccaagcaggucugcauugccugguccucuagcuccugucaugacggaaaagccuggcugcacgugugcaucacaggcgaugacaagaaugcuaccgccagcuucauuuauaacggccggcuuguugauucuguggucuccuggagcaaagagauccugcgcacccaggaaucugagugugugugcauuaaugggacauguacgguggucaugaccgacggauccgcuagcggcaaggccgauacaaaaauccucuuuaucgaggaagggaagauuguucauaccuccacacugucuggaagcgcgcaacacguggaggaaugcuccugcuacccuagauaccccggcgugcggugugucugccgcgacaacuggaaggggagcaacagaccuaucguggauauuaauaucaaagaccacucuauuguuuccagcuauguguguucuggacuugucggcgacacgccccggaagaacgauagcuccucuagcucccauugccuggacccgaauaacgaggaaggcgggcacggagugaaaggcugggccuucgaugacgggaaugauguuuggaugggacgcaccaucaacgagacaagcagacucggcuacgagaccuuuaaggugaucgaaggguggucuaauccuaaauccaagcugcagauuaaccggcaggucaucguggaccgcggaaauagaagcggcuauucuggcauuuucuccgucgaggggaaaagcuguaucaaccggugcuuuuacguggaacugauuagaggacgcaaggaggaaaccaagguucucuggacauccaauucuaucguggucuucuguggcaccagcgggacauauggaacgggcuccuggcccgauggggcugaccugaaccuuaugccuauuuga

SEQ ID NO: 213881 - RNA, 1410 nt, Artificial Sequence
  derived and/or modified CDS sequence (opt5) from neuraminidase__InfluenzaA__AFD98376
augaaccccaaucagaagaucauuaccaucggcagcgugucccugacaauuucuacgaucugcuucuuuaugcaaauugccauccucaucaccacagucacccugcacuucaaacaguacgaguuuaacuucccuccgaauaaccagguuaugcuuugugaacccacaauuaucgagagaaauauuaccgaaaucguguaucugacaaacaccacgauugagaaggaaaucugcccuaaacucgcugaguaccggaauuggagcaagccccagugugacauuaccggguuugccccuuucuccaaagauaacucuauccgccugagcgcgggaggcgacaucugggugacaagagagcccuaugucuccugcgauccugacaaguguuaccaauuugcucuugggcagggaaccacacugaauaacgugcauucuaauaacaccguucgggaucgcacgccguauagaacacuccugaugaaugaacugggcgugcccuuccaccucgggaccaagcaggucugcauugccuggagcuccagcucuugucaugacggaaaagccuggcugcacgugugcaucacaggcgaugacaagaacgcuaccgccuccuuuauuuacaauggccggcuuguugauagcguggucucuugguccaaagagauccugcgcacccaggaaagcgagugugugugcauuaacgggacauguacgguggucaugaccgacggaucugcuuccggcaaggccgauacaaaaauccucuucaucgaggaagggaagauuguucauaccagcacacuguccggaucugcgcaacacguggaggaaugcagcugcuauccuagauaccccggcgugcggugugucugccgcgacaacuggaagggguccaauagaccuaucguggauauuaacaucaaagaccacagcauuguuucuuccuacguguguagcggacuugucggcgacacgccccggaagaaugauucuagcuccucuggccauugccuggacccgaacaaugaggaagggggacacggcgugaaagggugggccuuugaugacggaaacgauguuuggaugggccgcaccaucaaugagacaagcagacucggguaugagaccuucaaggugaucgaaggaugguccaacccuaaaagcaagcugcagauuaaucggcaggucaucguggacaaaggcaaccgcucuggcuacuccgggauuuuuagcgucgagggaaagucuuguaucaauagaugcuucuauguggaacugauucggggcagaaaggaggaaaccgagguucucuggacauccaacagcaucguggucuucugugggaccuccggaacauacggcacggggucuuggcccgauggcgcugaccugaaucuuaugccuauuuga

SEQ ID NO: 213882 - RNA, 1410 nt, Artificial Sequence
  derived and/or modified CDS sequence (opt5) from neuraminidase__InfluenzaA__AFD98387
augaaccccaaucagaagaucauuaccaucggcagcgugucccugacaauuucuacgaucugcuuccucaugcaaauugccauccugaucaccacagucacccuucacuuuaaacaguacgaguucaacagcccuccgaauaaccagguuaugcugugugaacccacaauuaucgagagaaauauuaccgaaaucguguaucucacaaacaccacgauugagaaggaaaucugcccuaaacuggcugaguaccgggacugguccaagccccagugugauauuaccggguuugccccuuucucuaaagacaauagcauccgccuuuccgcgggaggcgauaucugggugacaagagagcccuaugucucuugcgacccugauaaguguuaccaauuugcucuggggcagggaaccacacucaacaaugugcauagcaacaauaccguucgggaccgcacgccguauagaacacugcugaugaacgaacucggcgugcccuuccaccuggggaccaagcaggucugcauugccugguccucuagcuccugucaugauggaaaagccuggcuucacgugugcaucacaggcgacgauaagaaugcuaccgccagcuuuauuuacaacggcaaacugguugacucuguggucuccuggagcaaggagauccuccggacccaggaaucugagugugugugcauuaaugggacauguacgguggucaugaccgauggauccgcuagcggcaaagccgacacaaagauccuguucaucgaggaagggaagauuguucauaccuccacacuuucuggaagcgcgcaacacguggaggaaugcuccugcuauccucgcuaccccggcgugagaugugucugccgggauaacuggaaagggagcaaccgcccuaucguggacauuaauaucaaggaccacucuauuguuuccagcuacguguguucuggacuggucggcgauacccccagaaagaacgaccggagcuccaauucucauugccucgauccgaacaaugaggaaggcgggcacggagugaaaggcugggccuuugacgaugggaacgacguuuggaugggacgcacgaucaaugagacaagcagacugggcuaugagaccuucaaagugaucgaagggugguccaacccuaagagcaaacugcagauuaaucggcaggucaucguggaucgcggaaacagaucuggcuacuccggcauuuuuagcgucgaggggaagucuuguaucaaucggugcuucuauguggaacucauuagaggacgcaaggaggaaaccgagguucuguggacauccaacagcaucguggucuuuuguggcaccuccgggacauacggaacgggcucuuggcccgacggggcugaucuuaaucugaugccuauuuga

SEQ ID NO: 213883 - RNA, 1410 nt, Artificial Sequence
  derived and/or modified CDS sequence (opt5) from neuraminidase__InfluenzaA__AFD98398
augaaccccaaucagaagaucauuaccaucggcagcgugucccugacaauuucuacgaucugcuucuuuaugcaaauugccauccucaucaccacagucacccugcacuucaaacaguacgaguuuaacagcccuccgaauaaccagguuaugcuuugugaacccacaauuaucgagagaaauauuaccgaaaucguguaucugacaaacaccacgauugagaaggaaaucugcccuaaacucgcugaguaccggaauugguccaagccccagugugacauuaccggguucgccccuuuuucuaaagauaacagcauccgccuguccgcgggaggcgacaucugggugacaagagagcccuaugucucuugcgauccugacaaguguuaccaauucgcucuugggcagggaaccacacugaauaacgugcauagcaauaacaccguucgggaucgcacgccguauagaacacuccugaugaaugaacugggcgugcccuuucaccucgggacccggcaggucugcauugccugguccucuagcuccugucaugacggaaaggccuggcugcacgugugcaucacaggcgaugacaaaaacgcuaccgccagcuucauuuacaauggccgccuuguugauucuguggucuccuggagcaaggagauccugagaacccaggaaucugagugugugugcauuaacgggacauguacgguggucaugaccgacggauccgcuagcggcaaagccgauacaaagauccucuuuaucgaggaagggaaaauuguucauaccuccacacugucuggaagcgcgcaacacguggaggaaugcuccugcuauccucgguaccccggcgugcgcugugucugcagagacaacuggaaggggagcaaucggccuaucguggauauuaacaucaaggaccacucuauuguuuccagcuacguguguucuggacuugucggcgacacgccccgcaaaaaugauagcuccucuagcucccauugccuggacccgaacaaugaggaaggcgggcacggagugaagggcugggccuucgaugacgggaacgauguuuggaugggaagaaccaucaaugagacaagccggcucggcuaugagaccuuuaaagugaucgaaggguggucuaacccuaaguccaaacugcagauuaaucgccaggucaucguggacaagggaaacagaagcggcuacucuggcauuuucuccgucgaggggaaaagcuguaucaaucggugcuuuuauguggaacugauuagaggacgcaaggaggaaaccgagguucucuggacauccaacucuaucguggucuucuguggcaccagcgggacauacggaacgggcuccuggcccgauggggcugaccugaaucuuaugccuauuuga

SEQ ID NO: 213884 - RNA, 1410 nt, Artificial Sequence
  derived and/or modified CDS sequence (opt5) from neuraminidase__InfluenzaA__AFD98409
augaaccccaaucagaagaucauuaccaucggcagcgugucccugacaauuucuacgaucugcuucuuuaugcaaauugccauccucaucaccacagucacccugcacuucaaacaguacgaguuuaacagcccuccgaauaaccagguuaugcuuugugaacccacaauuaucgagagaaauauuaccgaaaucguguaucugacaaacaccacgauugagaaggaaaucugcccuaaacucgcugaguaccggaauugguccaagccccagugugacauuaccggguucgccccuuuuucuaaagauaacagcauccgccuguccgcgggaggcgacaucugggugacaagagagcccuaugucucuugcgauccugacaaguguuaccaauucgcucuugggcagggaaccacacugaauaacgugcauagcaauaacaccguucgggaucgcacgccguauagaacacuccugaugaaugaacugggcgugcccuuucaccucgggaccaagcaggucugcauugccugguccucuagcuccugucaugacggaaaagccuggcugcacgugugcaucacaggcgaugacaagaacgcuaccgccagcuucauuuacaauggccggcuuguugauucuguggucuccuggagcaaagagauccugcgcacccaggaaucugagugugugugcauuaacgggacauguacgguggucaugaccgacggauccgcuagcggcaaggccgauacaaaaauccucuuuaucgaggaagggaagauuguucauaccuccacacugucuggaagcgcgcaacacguggaggaaugcuccugcuauccuagauaccccggcgugcggugugucugccgcgacaacuggaaggggagcaauagaccuaucguggauauuaacaucaaagaccacucuauuguuuccagcuacguguguucuggacuugucggcgacacgccccggaagaaugauagcuccucuagcggccauugccuggacccgaacaaugaggaagggggacacggcgugaaagggugggccuucgaugacggaaacgauguuuggaugggccgcaccaucaaugagacauccagacucggguaugagaccuuuaaggugaucgaaggauggagcaacccuaaaucuaagcugcagauuaaucggcaggucaucguggacaaaggcaaccgcuccggcuacagcgggauuuucucugucgagggaaaguccuguaucaauagaugcuuuuauguggaacugauucggggcagaaaggaggaaaccgagguucucuggacaagcaacuccaucguggucuucugugggaccucuggaacauacggcacggggagcuggcccgauggcgcugaccugaaucuuaugccuauuuga

SEQ ID NO: 213885 - RNA, 1410 nt, Artificial Sequence; identical to SEQ ID NO: 213859
  derived and/or modified CDS sequence (opt5) from neuraminidase__InfluenzaA__AFD98420

SEQ ID NO: 213886 - RNA, 1410 nt, Artificial Sequence
  derived and/or modified CDS sequence (opt5) from neuraminidase__InfluenzaA__AFD98431
augaaccccaaucagaagaucauuaccaucggcagcgugucccugacaauuucuacgaucugcuucuuuaugcaaauugccauccucaucaccacagucacccugcacuucaaacaguacgaguuuaacagcccuccgaauaaccagguuaugcuuugugaacccacaauuaucgagagaaauauuaccgaaaucguguaucugacaaacaccacgauugagaaggaaaucugcccuaaacucgcugaguaccggaauugguccaagccccagugugacauuaccggguucgccccuuuuucuaaagauaacagcauccgccuguccgcgggaggcgacaucugggugacaagagagcccuaugucucuugcgauccugacaaguguuaccaauucgcucuugggcagggaaccacacugaauaacgugcauagcaauaacaccguucgggaucgcacgccguauagaacacuccugaugaaugaacugggcgugcccuuucaccucgggaccaagcaggucugcauugccugguccucuagcuccugucaugacggaaaagccuggcugcacgugugcaucacaggcgaugacaagaacgcuaccgccagcuucauuuacaauggccggcuuguugauucuguggucuccuggagcaaagagauccugcgcacccaggaaucugagugugugugcauuaacgggacauguacgguggucaugaccgacggauccgcuagcggcaaggccgauacaaaaauccucuuuaucgaggaagggaagauuguucauaccuccacacugucuggaagcgcgcaacacguggaggaaugcuccugcuauccuagauaccccggcgugcggugugucugccgcgacaacuggaaggggagcaauagaccuaucguggauauuaacaucaaagaccacucuauuguuuccagcuacguguguucuggacuugucggcgacacgccccggaagaaugauagcuccucuagcucccauugccuggacccgaacaaugaggaaggcgggcacggagugaaaggcugggccuucgaugacgggaacgauguuuggaugggacgcaccaucaaugagacaagcagacucggcuaugagaccuuuaaggugaucgaaggguggucuaacccuaaauccaagcugcagauuaaucggcaggucaucgugggacgcggcaacagaagcggcuacucugggauuuucuccgucgagggaaaaagcuguaucaaucggugcuuuuauguggaacugauuagaggccgcaaggaggaaaccgagguucucuggacauccaacucuaucguggucuucugugggaccagcggaacauacggcacgggguccuggcccgacggcgcugaucugaaucuuaugccuauuuga

SEQ ID NO: 213887 - RNA, 1410 nt, Artificial Sequence
  derived and/or modified CDS sequence (opt5) from neuraminidase__InfluenzaA__AFD98442
augaaccccaaucagaagaucauuaccaucggcagcgugugcaugacaauugggauggccaaccugauccuccaaauuggaaauaucaucuccauuuggaucucucacagcauucagcugggcaaccagaaucagaucgagacguguaaccaauccgucauuaccuacgaaaauaacacauggguuaaucagaccuaugugaacaucucuaauacaaacuucgcugccgggcagagcguggucuccgugaaacuugcgggaaauucuagccugugcccuguuuccggcugggcuauuuacagcaaggacaacucuaucagaaucggguccaaaggagauguguuugucauucgggagccguucaucagcuguucuccccucgaaugccgcaccuuuuuccugacacagggcgcccuucugaaugacaagcauuccaacggcaccauuaaagauagaagcccuuaucggacgcucaugucuugucccaucggggaggugccuucccccuacaacagccgcuuugaauccguugccuggucugcuagcgccugccacgacggaauuaauuggcugaccaucggcaucuccgggccugauaacggagcuguggccguccugaaguauaauggcauuaucacagacaccauuaagagcuggagaaacaauauccuccggacacaagagucugagugugcgugcgugaacggguccuguuucaccauuaugacggauggaccgagcgacggccaggccucuuacaaaaucuuucgcaucgaaaagggcaaaauugucaagagcguggagaugaaugcucccaacuaucauuacgaagagugcuccuguuacccugauucuggggagaucacaugcguuugcagagacaauuggcacggaagcaaccggcccuggguguccuucaaucagaaccuggaauaucagauuggcuacaucuguagcgggauuuuuggagauaauccucgccccaacgacaaaaccggcucuugcgggccgguguccagcaauggagccaacggcgucaagggcuucucuuuuaaguaugggaacggaguguggaucggcagaacaaaauccauuagcucccggaagggguucgagaugaucugggauccuaauggauggaccggcaccgacaacaauuuugcuaucaaacaagacauuguugggaucaacgaauggucuggcuacagcggauccuucgugcagcaucccgagcuuacaggccuggauuguauucgcccuugcuucugggucgaacucaucagagggcggcccaaggagaauacgauuuggaccucuggaagcuccaucagcuuuuguggcgugaacucugacacaguugggugguccuggcccgauggagccgagcugccuuucaccaucgacaaauga

SEQ ID NO: 213888 - RNA, 1410 nt, Artificial Sequence
  derived and/or modified CDS sequence (opt5) from neuraminidase__InfluenzaA__AFD98452
augaaccccaaucagaagaucauuacccugggcagcgugucccucacaaucucuacgauuugcuucuuuauccaaauugccauccugaucaccacagucacccuucacuucaaacaguacgaguuuaacagcccuccgaauaaccagguuaugcugugugaacccacaauuaucgagagaaauauuaccgaaaucguguaucucacaaacaccacgauugagaaggaaaucugcccuaaacuggcugaguaccggaauugguccaagccccagugugacauuaccggguucgccccuuuuucuaaagauaacagcauccgccuuuccgcgggaggcgacaucugggugacaagagagcccuaugucucuugcgauccugacaaguguuaccaauucgcucuggggcagggaaccacacucaauaacgugcauagcaauaacaccguucgggaucgcacgccguauagaacacugcugaugaaugaacucggcgugcccuuucaccuggggaccaagcaggucugcauugccugguccucuagcuccugucaugacggaaaagccuggcuucacgugugcaucacaggcgaugacaagaacgcuaccgccagcuucauuuacaauggccggcugguugauucuguggucuccuggagcaaagagauccuccgcacccaggaaucugagugugugugcauuaacgggacauguacgguggucaugaccgacggauccgcuagcggcaaggccgauacaaaaauccuguuuaucgaggaagggaagauuguucauaccuccacacuuucuggaagcgcgcaacacguggaggaaugcuccugcuauccuagauaccccggcgugcggugugucugccgcgacaacuggaaggggagcaauagaccuaucguggauauuaacaucaaagaccacucuauuguuuccagcuacguguguucuggacuggucggcgacacgccccggaagaaugauagcuccucuagcucccauugccucgacccgaacaaugaggaaggcgggcacggagugaaaggcugggccuucgaugacgggaacgauguuuggaugggacgcaccaucaaugagacaagcagacugggcuaugagaccuuuaaggugaucgaaggguggucuaacccuaaauccaagcugcagauuaaucggcaggucaucguggaccgcggaaacagaagcggcuacucuggcauuuucuccgucgaggggaaaagcuguaucaaucggugcuuuuauguggaacucauuagaggacgcaaggaggaaaccgagguucuguggacauccaacucuaucguggucuucuguggcaccagcgggacauacggaacgggcuccuggcccgauggggcugaccuuaaucugaugccuauuuga

SEQ ID NO: 213889 - RNA, 1410 nt, Artificial Sequence; identical to SEQ ID NO: 213859
  derived and/or modified CDS sequence (opt5) from neuraminidase__InfluenzaA__AFD98463

SEQ ID NO: 213890 - RNA, 1410 nt, Artificial Sequence
  derived and/or modified CDS sequence (opt5) from neuraminidase__InfluenzaA__AFD98474
augaaccccaaucagaagaucauuaccaucggcagcgugugcaugacaauugggauggccaaccugauccuccaaauuggaaauaucaucuccauuuggaucucucacagcauucagcugggcaaccagaaucagaucgagacguguaaccaauccgucauuaccuacgaaaauaacacauggguuaaucagaccuaugugaacaucucuaauacaaacuucgcugccgggcagagcguggucuccgugaaacuugcgggaaauucuagccugugcccuguuuccggcugggcuauuuacagcaaggacaacucuaucagaaucggguccaaaggagauguguuugucauucgggagccguucaucagcuguucuccccucgaaugccgcaccuuuuuccugacacagggcgcccuucugaaugacaagcauuccaacggcaccauuaaagauagaagcccuuaucggacgcucaugucuugucccaucggggaggugccuucccccuacaacagccgcuuugaauccguugccuggucugcuagcgccugccacgacggaauuaauuggcugaccaucggcaucuccgggccugauaacggagcuguggccguccugaaguauaauggcauuaucacagacaccauuaagagcuggagaaacaauauccuccggacacaagagucugagugugcgugcgugaacggguccuguuucaccauuaugacggauggaccgagcgacggccaggccucuuacaaaaucuuucgcaucgaaaagggcaaaauugucaagagcguggagaugaaugcucccaacuaucauuacgaagagugcuccuguuacccugauucuagcgagaucacaugcguuugcagagacaauuggcacggguccaaccggcccugggugagcuucaaucagaaccuggaauaucagauuggauacaucuguucuggcauuuuuggggauaauccucgccccaacgacaaaaccggauccugcggcccggugagcucuaauggggccaacggagucaagggcuucuccuuuaaguauggcaacgggguguggaucggaagaacaaaaagcauuuccucucggaagggcuucgagaugaucugggauccuaauggguggaccggaaccgacaacaauuuuagcaucaaacaagacauuaucggcauuaacgaaugguccggguacucuggcagcuucguucagcaucccgagcuuacaggacuggauuguauccgcccuugcuucuggguggaacucauuagaggccggcccaaggagaauacgaucuggaccuccgggagcucuaucuccuuuuguggagucaacagcgacacagugggcuggucuuggcccgauggggcugagcugccuuucaccauugacaaauga

SEQ ID NO: 213891 - RNA, 1410 nt, Artificial Sequence
  derived and/or modified CDS sequence (opt5) from neuraminidase__InfluenzaA__AFD98484
augaaccccaaucagaagaucauuaccaucggcagcgugucccugacaauuucuacgaucugcuucuuuaugcaaauugccauccucaucaccacagucacccugcacuucaaacaguacgaguuuaacagcccuccgaauaaccagguuaugcuuugugaacccacaauuaucgagagaaauauuaccgaaaucguguaucugacaaacaccacgauugagaaggaaaucugcccuaaacucgcugaguaccggaauugguccaagccccagugugacauuaccggguucgccccuuuuucuaaagauaacagcauccgccuguccgcgggaggcgacaucugggugacaagagagcccuaugucucuugcgauccugacaaguguuaccaauucgcucuugggcagggaaccacacugaauaacgugcauagcaauaacaccguucgggaucgcacgccguauagaacacuccugaugaaugaacugggcgugcccuuucaccucgggaccaagcaggucugcauugccugguccucuagcuccugucaugacggaaaagccuggcugcacgugugcaucacaggcgaugacaagaacgcuaccgccagcuucauuuacaauggccggcuuguugauucuguggucuccuggagcaaagagauccugcgcacccaggaaucugagugugugugcauuaacgggacauguacgguggucaugaccgacggauccgcuagcggcaaggccgauacaaaaauccucuuuaucgaggaagggaagauuguucauaccuccacacugucuggaagcgcgcaacacguggaggaaugcuccugcuauccuagauaccccggcgugcggugugucugccgcgacaacuggaaggggagcaauagaccuaucguggauauuaacaucaaagaccacucuauuguuuccagcuacguguguucuggacuugucggcgacacgccccggaagaaugauagcuccucuagcucccauugccuggacccgaacaaugaggaaggcgggcacggagugaaaggcugggccuucgaugacgggaacgauguuuggaugggacgcaccaucaaugagacaagcagacucggcuaugagaccuuuaaggugaucgaaggguggucuaacccuaaauccaagcugcagaugaaucggcaggucauuguggaccgcggaaacagaagcggcuacucuggcaucuucuccgucgaggggaaaagcuguauuaaucggugcuuuuauguggaacugaucagaggacgcaaggaggaaaccgagguucucuggacauccaacucuauuguggucuucuguggcaccagcgggacauacggaacgggcuccuggcccgauggggcugaccugaaucuuaugccuaucuga

SEQ ID NO: 213892 - RNA, 1410 nt, Artificial Sequence
  derived and/or modified CDS sequence (opt5) from neuraminidase__InfluenzaA__AFD98495
augaaccccaaucagaagaucauuaccaucggcagcgugucccugacaauuucuacgaucugcuucuuuaugcaaauugccauccucaucaccacagucacccugcacuucaaacaguacgaguuuaacagcccuccgaauaaccagguuaugcuuugugaacccacaauuaucgagagaaauauuaccgaaaucguguaucugacaaacaccacgauugagaaggaaaucugcccuaaacucgcugaguaccggaauugguccaagccccagugugacauuaccggguucgccccuuuuucuaaagauaacagcauccgccuguccgcgggaggcgacaucugggugacaagagagcccuaugucucuugcgauccugacaaguguuaccaauucgcucuugggcagggaaccacacugaauaacgugcauagcaauaacaccguucgggaucgcacgccguauagaacacuccugaugaaugaacugggcgugcccuuucaccucgggaccaagcaggucugcauugccugguccucuagcuccugucaugacggaaaagccuggcugcacgugugcaucacaggcgaugacaagaacgcuaccgccagcuucauuuacaauggcaaacuuguugauucuguggucuccuggagcaaggagauccugcggacccaggaaucugagugugugugcauuaacgggacauguacgguggucaugaccgacggauccgcuagcggcaaagccaacacaaagauccucuuuaucgaggaagggaagauuguucauaccuccacacugucuggaagcgcgcaacacguggaggaaugcuccugcuauccucgcuaccccggcgugagaugugucugccgggauaauuggaaagggagcaaccgcccuaucguggacauuaauaucaaggaucacucuauuguuuccagcuacguguguucuggacuugucggcgacacccccagaaagaacgacagcuccucuagcucccauugccuggauccgaauaacgaggaaggcgggcacggagugaagggcugggccuucgacgaugggaaugacguuuggaugggacggacgaucaacgagacaagccgccucggcuaugagaccuuuaaagugaucgaaggguggucuaauccuaaguccaaacugcagauuaacagacaggucaucguggaucggggaaaucgcagcggcuacucuggcauuuucuccgucgaggggaaaagcuguaucaacagaugcuuuuauguggaacugauucggggaagaaaggaggaaaccgagguucucuggacauccaauucuaucguggucuucuguggcaccagcgggacauacggaacgggcuccuggcccgacggggcugaucugaaccuuaugccuauuuga

SEQ ID NO: 213893 - RNA, 1410 nt, Artificial Sequence; identical to SEQ ID NO: 213859
  derived and/or modified CDS sequence (opt5) from neuraminidase__InfluenzaA__AFD98506

SEQ ID NO: 213894 - RNA, 1410 nt, Artificial Sequence
  derived and/or modified CDS sequence (opt5) from neuraminidase__InfluenzaA__AFD98517
augaaccccaaucagaagaucauuaccaucggcagcgugucccugacaauuucuacgaucugcuucuuuaugcaaauugccauccucaucaccacagucacccugcacuucaaacaguacgaguuuaacagcccuccgaauaaccagguuaugcuuugugaacccacaauuaucgagagaaauauuaccgaaaucguguaucugacaaacaccacgauugagaaggaaaucugcccuaaacucgcugaguaccggaauugguccaagccccagugugacauuaccggguucgccccuuuuucuaaagauaacagcauccgccuguccgcgggaggcgacaucugggugacaagagagcccuaugucucuugcgauccugacaaguguuaccaauucgcucuugggcagggaaccacacugaauaacgugcauagcaauaacaccguucgggaucgcacgccguauagaacacuccugaugaaugaacugggcgugcccuuucaccucgggaccaagcaggucugcauugccugguccagcagcuccugucaugacggaaaagccuggcugcacgugugcaucacaggcgaugacaagaacgcuaccgccagcuucauuuacaauggcaaacuuguugauucuguggucuccuggagcaaggagauccugcggacccaggaaucugagugugugugcauuaacgggacauguacgguggucaugaccgacggauccgcuagcggcaaagccgauacaaagauccucuuuaucaaggaggggaaaauuguucauaccuccacacugucuggaagcgcgcaacacguggaagagugcuccugcuauccucgcuaccccggcgugagaugugucugccgggacaacuggaaggggagcaaucgcccuaucguggauauuaacaucaaagaccacucuauuguuuccagcuacguguguucuggacuugucggcgacacccccagaaagaaugauagcuccucuagcucccauugccuggacccgaacaaugaagagggcgggcacggagugaaaggcugggccuucgaugacgggaacgauguuuggaugggacggacgaucaaugaaacaagccgccucggcuaugagaccuuuaaggugaucgagggguggucuaacccuaaauccaagcugcagauuaauagacaggucaucguggaccggggaaaccgcagcggcuacucuggcauuuucuccgucgaagggaagucuuguaucaauagaugcuuuuauguggagcugauucggggaagaaaagaagagaccgaaguucucuggacauccaacucuaucguggucuucuguggcaccagcgggacauacggaacgggcuccuggcccgauggggcugaccugaaucuuaugccuauuuga

SEQ ID NO: 213895 - RNA, 1410 nt, Artificial Sequence; identical to SEQ ID NO: 211590
  derived and/or modified CDS sequence (opt5) from neuraminidase__InfluenzaA__AFD98528

SEQ ID NO: 213896 - RNA, 1410 nt, Artificial Sequence; identical to SEQ ID NO: 213859
  derived and/or modified CDS sequence (opt5) from neuraminidase__InfluenzaA__AFD98539

SEQ ID NO: 213897 - RNA, 1410 nt, Artificial Sequence; identical to SEQ ID NO: 213859
  derived and/or modified CDS sequence (opt5) from neuraminidase__InfluenzaA__AFD98550

SEQ ID NO: 213898 - RNA, 1410 nt, Artificial Sequence
  derived and/or modified CDS sequence (opt5) from neuraminidase__InfluenzaA__AFD98561
augaaccccaaucagaagaucauuaccaucggcagcgugucccugacaauuucuacgaucugcuucuuuaugcaaauugccauccucaucaccacagucacccugcacuucaaacaguacgaguuuaacagcccuccgaauaaccagguuaugcuuugugaacccacaauuaucgagagaaauauuaccgaaaucguguaucugacaaacaccacgauugagaaggaaaucugcccuaaacucgcugaguaccggaauugguccaagccccagugugacauuaccggguucgccccuuuuucuaaagauaacagcauccgccuguccgcgggaggcgacaucugggugacaagagagcccuaugucucuugcgauccugacaaguguuaccaauucgcucuugggcagggaaccacacugaauaacgugcauagcaauaacaccguucgggaucgcacgccguauagaacacuccugaugaaugaacugggcgugcccuuucaccucgggaccaagcaggucugcauugccugguccagcagcuccugucaugacggaaaagccuggcugcacgugugcaucacaggcgaugacaagaacgcuaccgccagcuucauuuacaauggccggcuuguugauucuguggucuccuggagcaaagagauccugcgcacccaggaaucugagugugugugcauuaacgggacaugugcuguggucaugacggacggauccgccagcggcaaggcggauaccaaaauccucuuuaucgaggaagggaagauuguucauacauccacccugucuggaagcgcccaacacguggaggaaugcuccugcuauccuagauaccccggcgugcggugugucugccgcgacaacuggaaggggagcaauagaccuaucguggauauuaacaucaaagaccacucuauuguuuccagcuacguguguucuggacuugucggcgacacaccccggaagucugauuccucuagcuccagccauugccuggacccgaauaacgaggaaggcgggcacggagugaaaggcugggcuuucgaugacgggaaugauguuuggaugggacgcaccaucaacgagacgucuagacucggcuaugagacauuuaaggugaucgaagggugguccaauccuaaaagcaagcugcagauuaaccggcaggucaucguggaccgcggaaauagaucuggcuacuccggcauuuucagcgucgaggggaaauccuguaucaaccggugcuuuuauguggaacugauuagaggacgcaaggaggaaaccgagguucucuggaccucuaauagcaucguggucuucuguggcacauccgggaccuacggaacaggcucuuggcccgauggggccgaccugaaccuuaugccuauuuga

SEQ ID NO: 213899 - RNA, 1410 nt, Artificial Sequence
  derived and/or modified CDS sequence (opt5) from neuraminidase__InfluenzaA__AFD98572
augaaccccaaucagaagaucauuaccaucggcagcgugucccugacaauuucuacgaucugcuucuuuaugcaaauugccauccucaucaccacagucacccugcacuucaaacaguacgaguuuaacagcccuccgaauaaccagguuaugcuuugugaacccacaauuaucgagagaaauauuaccgaaaucguguaucugacaaacaccacgcucgagaaggaaauuugcccuaaacuggcugaguaccggaauugguccaagccccagugugacaucaccggguucgccccuuuuucuaaagauaacagcauucgccuuuccgcgggaggcgacaucugggugacaagagagcccuaugucucuugcgauccugacaaguguuaccaauucgcucuggggcagggaaccacacucaauaacgugcauagcaauaacaccguucgggaucgcacgccguauagaacacugcugaugaaugaacucggcgugcccuuucaccuggggaccaagcaggucugcaucgccugguccucuagcuccugucaugacggaaaagccuggcuucacgugugcauuacaggcgaugacaagaacgcuaccgccagcuucaucuacaauggccggcugguugauucuguggucuccuggagcaaagagauucuccgcacccaggaaucugagugugugugcaucaacgggacauguacgguggucaugaccgacggauccgcuagcggcaaggccgauacaaaaauucuguuuaucgaggaagggaagaucguucauaccuccacacuuucuggaagcgcgcaacacguggaggaaugcuccugcuauccuagauaccccggcgugcggugugucugccgcgacaacuggaaggggagcaauagaccuauuguggauaucaacauuaaagaccacucuaucguuuccagcuacguguguucuggacuggucggcgacacgccccggaagaaugauagcuccucuagcucccauugccucgacccgaacaaugaggaaggcgggcacggagugaaaggcugggccuucgaugacgggaacgauguuuggaugggacgcaccauuaaugagacaagcagacugggcuaugagaccuuuaaggugaucgaaggguggucuaacccuaaauccaagcugcagaucaaucggcaggucauuguggaccgcggaaacagaagcggcuacucuggcaucuucuccgucgaggggaaaagcuguauuaaucggugcuuuuauguggaacucaucagaggacgcaaggaggaaaccgagguucuguggacauccaacucuauuguggucuucuguggcaccagcgggacauacggaacgggcuccuggcccgauggggcugaccuuaaucugaugccuaucuga

SEQ ID NO: 213900 - RNA, 1410 nt, Artificial Sequence
  derived and/or modified CDS sequence (opt5) from neuraminidase__InfluenzaA__AFD98583
augaaccccaaucagaagaucauuaccaucggcagcgugucccugacaauuucuacgaucugcuucuuuaugcaaauugccauccucaucaccacagucacccugcacuucaaacaguacgaguuuaacagcccuccgaauaaccagguuaugcuuugugaacccacaauuaucgagagaaauauuaccgaaaucguguaucugacaaacaccacgauugagaaggaaaucugcccuaaacucgcugaguaccggaauugguccaagccccagugugacauuaccggguucgccccuuuuucucgcgauaacagcaucagacuguccgcgggaggcgacaucugggugacacgggagcccuaugucucuugcgauccugacaaauguuaccaauucgcucuugggcagggaaccacacugaauaacgugcauagcaauaacaccguucgcgauagaacgccguaucggacacuccugaugaaugaacugggcgugcccuuucaccucgggaccaagcaggucugcauugccugguccucuagcuccugucaugacggaaaggccuggcugcacgugugcaucacaggcgaugacaaaaacgcuaccgccagcuucauuuacaauggccgccuuguugauucuguggucuccuggagcaaggagauccugagaacccaggaaucugagugugugugcauuaacgggacauguacgguggucaugaccgacggauccgcuagcggcaaagccgauacaaagauccucuuuaucgaggaagggaaaauuguucauaccuccacacugucuggaagcgcgcaacacguggaggaaugcuccugcuauccucgguaccccggcgugcgcugugucugcagagacaacuggaaggggagcaaucggccuaucguggauauuaacaucaaggaccacucuauuguuuccagcuacguguguucuggacuugucggcgacacgccccgcaaaagcgauuccucuagcuccagccauugccuggacccgaauaacgaggaaggcgggcacggagugaagggcugggccuucgaugacgggaaugauguuuggaugggaagaaccaucaacgagacaucucggcucggcuaugagaccuuuaaagugaucgaagggugguccaauccuaagagcaaacugcagauuaaccgccaggucaucguggacagaggaaaucggucuggcuacuccggcauuuucagcgucgaggggaaguccuguaucaacagaugcuuuuauguggaacugauucgcggacggaaagaggaaaccgagguucucuggacaucuaauagcaucguggucuucuguggcaccuccgggacauacggaacgggcucuuggcccgauggggcugaccugaaccuuaugccuauuuga

SEQ ID NO: 213901 - RNA, 1410 nt, Artificial Sequence
  derived and/or modified CDS sequence (opt5) from neuraminidase__InfluenzaA__AFE02944
augaaccccaaucagaagaucauuaccaucggcagcgugugcaugacaauugggauggccaaccugauccuccaaauuggaaauaucaucuccauuuggaucucucacagcauucagcugggcaaccagaaucagaucgagacguguaaccaauccgucauuaccuacgaaaauaacacauggguuaaucagaccuaugugaacaucucuaauacaaacuucgcugccgggcagagcguggucuccgugaaacuugcgggaaauucuagccugugcccuguuuccggcugggcuauuuacagcaaggacaacucuaucagaaucggguccaaaggagauguguuugucauucgggagccguucaucagcuguucuccccucgaaugccgcaccuuuuuccugacacagggcgcccuucugaaugacaagcauuccaacggcaccauuaaagauagaagcccuuaucggacgcucaugucuugucccaucggggaggugccuucccccuacaacagccgcuuugaauccguugccuggucugcuagcgccugccacgacggaauuaauuggcugaccaucggcaucuccgggccugauaacggagcuguggccguccugaaguauaauggcauuaucacagacaccauuaagagcuggagaaacaauauccuccggacacaagagucugagugugcgugcgugaacggguccuguuucaccgugaugacggauggaccgagcgacggccaggccucuuacaaaauuuuucgcaucgaaaagggcaaaaucgucaagagcguugagaugaaugcucccaacuaucauuacgaagagugcuccuguuacccugauucuagcgagauuacaugcgugugcagagacaauuggcacggguccaaccggcccugggugagcuucaaucagaaccuggaauaucagaucggauacauuuguucuggcaucuuuggggauaauccucgccccaacgacaaaaccggauccugcggcccggucagcucuaauggggccaacggagugaagggcuucuccuuuaaguauggcaacgggguuuggauuggaagaacaaaaagcaucuccucucggaauggcuucgagaugauuugggauccuaacggguggaccggaaccgacaauaacuuuagcaucaagcaagacaucgugggcauuaaugaaugguccggguacucuggcagcuucguccagcaucccgagcuuacaggacugaacuguauccgcccuugcuucuggguggaacucauuagaggccggcccaaagagaauacgguuuggaccuccgggagcucuaucuccuuuuguggagugaacagcgauacagucggcuggucuuggcccgacggggcugagcugccuuucaccauugauaaguga

SEQ ID NO: 213902 - RNA, 1410 nt, Artificial Sequence
  derived and/or modified CDS sequence (opt5) from neuraminidase__InfluenzaA__AFE47627
augaaccccaaucagaagaucauuaccaucggcagcgugucccugacaauugccacgaucugcuuccucaugcaaauugcuauccuggucaccacaguuacccuucacuuuaaacaguacgaguguaacucuccuccgaauaaccaggugaugcugugcgaacccacaaucauugagagaaauaucaccgaaauuguguaucucacaaacaccacgaucgagaaggaaauuuguccuaaacuggccgaguaccggaauuggagcaagccccagugcaacaucaccggguucgcgccuuuuuccaaagacaauucuauucgccuuagcgcuggaggcgauaucugggucacaagagagcccuauguguccugugacccugauaagugcuaccaauucgcccuggggcagggaaccacacucaacaauggccauucuaacgacaccguucacgaucggacgccguaucgcacacugcugaugaaugaacucggggugcccuuucaucugggaaccaagcaggucuguaucgccuggagcuccagcucuugccacgacggcaaagccuggcuucauguguguguuacaggcgaugacgagaacgcuaccgcuuccuucauuuacaaugggagacugguggauagcaucggaucuugguccaagaaaauucuccggacccaggaaagcgagugcgucuguaucaacggcacaugcacgguggugaugaccgacgggucugccuccggaaaggcggauacaaaaauucuguuuaucgaggaaggcaagaucguccacaccagcucccuuucugggagcgcccaacacguugaggaaugcuccuguuauccucgcuaccccggagugagaugcgugugucgggacaacuggaagggcagcaaucgcccuauugucgauaucaacgugaaagacuacucuauuguuuccagcuaugugugcucuggccuggucggggacacacccagaaagaaugauagcuccucuagcucccauugucucgacccgaacaaugaggaaggaggccacggggugaaaggaugggcuuucgaugacggcaacgauguuuggauggggcggaccaucagcgagaagcugcgcucuggauacgagacguuuaaagugauugaaggcugguccaagccuaauagcaaacugcagacaaacagacaggucaucguggaccggggcaaucgcucuggguauuccggaaucuucagcgucgaguccaagucuugcauuaacagauguuuuuacguggaacucauccggggcagaaagcaggagaccgaaguucuguggaccagcaauuccauuguggucuucugcgggacaucuggaaccuauggcacagggagcuggcccgauggcgccgacaucaaccuuaugccuauuuga

SEQ ID NO: 213903 - RNA, 1410 nt, Artificial Sequence; identical to SEQ ID NO: 213215
  derived and/or modified CDS sequence (opt5) from neuraminidase__InfluenzaA__AFF18509

SEQ ID NO: 213904 - RNA, 1410 nt, Artificial Sequence
  derived and/or modified CDS sequence (opt5) from neuraminidase__InfluenzaA__AFF57129
augaaccccaaucagaagaucauuaccaucggcagcgugugcaugacaauugggauggccaaccugauccuccaaauuggaaauaucaucuccauuuggaucucucacagcauucagcugggcaaccagaaucagaucgagacguguaaccaauccgucauuaccuacgaaaauaacacauggguuaaucagaccuaugugaacaucucuaauacaaacuucgcugccgggcagagcguggucuccgugaaacuugcgggaaauucuagccugugcccuguuuccggcugggcuauuuacagcaaggacaacucuaucagaaucggguccaaaggagauguguuugucauucgggagccguucaucagcuguucuccccucgaaugccgcaccuuuuuccugacacagggcgcccuucugaaugacaagcauuccaacggcaccauuaaagauagaagcccuuaucggacgcucaugucuugucccaucggggaggugccuucccccuacaacagccgcuuugaauccguugccuggucugcuagcgccugccacgacggaauuaauuggcugaccaucggcaucuccgggccugauaacggagcuguggccguccugaaguauaauggcauuaucacagacaccauuaagagcuggagaaacaauauccuccggacacaagagucugagugugcgugcgugaacggguccuguuucaccauuaugacggauggaccgagcgacggccaggccucuuacaaaaucuuucgcaucgaaaagggcaaaauugucaagagcguggagaugaaugcucccaacuaucauuacgaagagugcuccuguuacccugauucuagcgagaucacaugcguuugcagagacaauuggcacggguccaaccggcccugggugagcuucaaucagaaccuggaauaucagauuggauacaucuguucuggcauuuuuggggauaauccucgccccaacgacaaaaccggauccugcggcccggugagcucuaauggggccaacggagucaagggcuucuccuuuaaguauggcaacgggguguggaucggaagaacaaaaagcauuuccucucggaagggcuucgagaugaucugggauccuaauggguggaacggaaccgacaauaacuuuagcaucaaacaagacauuguuggcaucaaugaaugguccggguacucuggcagcuucgugcagcaucccgagcuuaccggacuggauuguauucgcccuugcuucugggucgaacucaucagaggccggcccaaggagaacacaauuuggacguccgggagcucuaucuccuuuuguggagugaauagcgacaccguuggcuggucuuggcccgauggggcugagcugccuuucacaaucgacaaauga

SEQ ID NO: 213905 - RNA, 1410 nt, Artificial Sequence
  derived and/or modified CDS sequence (opt5) from neuraminidase__InfluenzaA__AFF57133
augaaccccaaucagaagaucauuaccaucggcagcgugugcaugacaauugggauggccaaccugauccuccaaauuggaaauaucaucuccauuuggaucucucacagcauucagcugggcaaccagucccagaucgagacguguaaucaaucugucauuaccuacgaaaacaauacauggcuuaaccagaccuauguuaauaucagcaacacaaauuucgcugccgggcaguccguggugucugucaaacuggcgggaaacagcucccucugcccugugagcggcugggcuauuuacucuaaggacaauuccaucagaaucgggagcaaaggagauguuuuugugauucgggagccguucaucucuuguucccccagcgaaugccgcaccuuuuuccugacacagggcgcccuucugaacgacaagcauucuaauggcaccauuaaagauagauccccuuaucggacgcucaugagcugucccaucggggaggucccuucccccuacaacucucgcuuugaaagcguggccugguccgcuagcgccugccacgacggaauuaacuggcugaccaucggcaucucugggccugauaauggagcuguugccgugcugaaguauaacggcauuaucacagacaccauuaaguccuggagaaauaacauccuccggacacaagagagcgagugugcgugcgucaaugggucuuguuucaccauuaugacggauggaccgagcgacggccaggccuccuacaaaaucuuucgcaucgaaaagggcaaaauugugaagucuguggagaugaacgcucccaauuaucauuacgaagagugcagcuguuacccugauuccagcgagaucacaugcgucugcagagacaacuggcacgggucuaaucggcccuggguuuccuucaaccagaaucuggaauaucagauuggauacaucuguagcggcauuuuuggggauaacccucgccccaaugacaaaaccggaucuugcggcccgguguccagcaacggggccaauggagugaagggcuucuccuuuaaguauggcaacggggucuggaucggaagaacaaaaucuauuagcucccggaagggcuucgagaugaucugggauccuaacggguggaccggaaccgacaauaacuuuucuaucaaacaagacauugugggcaucaaugaauggagcggguacuccggcagcuucguucagcaucccgagcuuacaggacuggauuguauucgcccuugcuucuggguggaacucaucagaggccggcccaaggagaacacgauuuggaccucuggguccagcaucucuuuuuguggagucaauuccgacacagugggcuggagcuggcccgauggggcugagcugccuuucaccaucgacaaauga

SEQ ID NO: 213906 - RNA, 1410 nt, Artificial Sequence; identical to SEQ ID NO: 208965
  derived and/or modified CDS sequence (opt5) from neuraminidase__InfluenzaA__AFF57137

SEQ ID NO: 213907 - RNA, 1410 nt, Artificial Sequence; identical to SEQ ID NO: 208965
  derived and/or modified CDS sequence (opt5) from neuraminidase__InfluenzaA__AFF57141

SEQ ID NO: 213908 - RNA, 1410 nt, Artificial Sequence; identical to SEQ ID NO: 208965
  derived and/or modified CDS sequence (opt5) from neuraminidase__InfluenzaA__AFF57145

SEQ ID NO: 213909 - RNA, 1410 nt, Artificial Sequence; identical to SEQ ID NO: 208965
  derived and/or modified CDS sequence (opt5) from neuraminidase__InfluenzaA__AFF57149

SEQ ID NO: 213910 - RNA, 1410 nt, Artificial Sequence; identical to SEQ ID NO: 208965
  derived and/or modified CDS sequence (opt5) from neuraminidase__InfluenzaA__AFF57153

SEQ ID NO: 213911 - RNA, 1410 nt, Artificial Sequence; identical to SEQ ID NO: 208965
  derived and/or modified CDS sequence (opt5) from neuraminidase__InfluenzaA__AFF57157

SEQ ID NO: 213912 - RNA, 1410 nt, Artificial Sequence; identical to SEQ ID NO: 208965
  derived and/or modified CDS sequence (opt5) from neuraminidase__InfluenzaA__AFF57161

SEQ ID NO: 213913 - RNA, 1410 nt, Artificial Sequence; identical to SEQ ID NO: 208965
  derived and/or modified CDS sequence (opt5) from neuraminidase__InfluenzaA__AFF57165

SEQ ID NO: 213914 - RNA, 1410 nt, Artificial Sequence; identical to SEQ ID NO: 208965
  derived and/or modified CDS sequence (opt5) from neuraminidase__InfluenzaA__AFF57169

SEQ ID NO: 213915 - RNA, 1410 nt, Artificial Sequence; identical to SEQ ID NO: 208965
  derived and/or modified CDS sequence (opt5) from neuraminidase__InfluenzaA__AFF57173

SEQ ID NO: 213916 - RNA, 1410 nt, Artificial Sequence; identical to SEQ ID NO: 208965
  derived and/or modified CDS sequence (opt5) from neuraminidase__InfluenzaA__AFF57177

SEQ ID NO: 213917 - RNA, 1410 nt, Artificial Sequence; identical to SEQ ID NO: 208965
  derived and/or modified CDS sequence (opt5) from neuraminidase__InfluenzaA__AFF57181

SEQ ID NO: 213918 - RNA, 1410 nt, Artificial Sequence; identical to SEQ ID NO: 208965
  derived and/or modified CDS sequence (opt5) from neuraminidase__InfluenzaA__AFF57185

SEQ ID NO: 213919 - RNA, 1410 nt, Artificial Sequence; identical to SEQ ID NO: 208965
  derived and/or modified CDS sequence (opt5) from neuraminidase__InfluenzaA__AFF57189

SEQ ID NO: 213920 - RNA, 1350 nt, Artificial Sequence
  derived and/or modified CDS sequence (opt5) from neuraminidase__InfluenzaA__AFF60789
augaaccccaauaagaaaaucauuaccaucggcagcauuugcauggugacagggauggucucccugaugcuccagaucggaaaccugauuucuaucuggguuagccacuccauccauacgggcaaucaacacaaggccgagccuauuucuaacaccaauuuccuuacagaaaaagcuguggccagcgugaagcuggcggggaacuccucucucuguccgaucaauggaugggcugucuacagcaaagacaacuccauuagaaucggcagcaagggggauguguuuguuauucgggagcccuucaucucuugcucccaucuggaaugucgcaccuuuuuccuuacacagggagcccugcucaaugacaagcacagcaacggcaccgugaaagauagaucuccucaucggacacugauguccugccccgucggcgaggccccuagccccuauaauucucgcuuugaauccguggcuuggagcgccuccgcuugucacgacgggaccucuuggcugacgauuggaaucagcggcccugauaacggggccguugcggugcucaaguacaauggaaucauuaccgacacaaucaaauccuggagaaacaauauucugcggacccaggagagcgagugcgccugugucaacggcucuugcuucacagugaugaccgaugggccguccaacggacaggcuagccacaagaucuuuaaaauggaaaagggcaagguggucaaaucuguugagcuugacgcccccaauuaucauuacgaagaguguagcugcuauccugaugcuggcgagauuacgugugugugccgcgacaacuggcacggguccaauagacccugggugucuuucaaccaaaaucuggaauaccagaucggauauaucugcagcggcgucuuuggggauaacccucggcccaaugacggaacaggcuccugugggccggugagcucuaacggagccuacggcguuaagggcuucuccuuuaaauacgggaauggaguguggauuggccgcaccaagagcacaaacucuagauccggguucgagaugaucugggauccuaauggauggaccgaaaccgacagcuccuuuucugucaaacaggacauuguggcgaucacagauuggagcggcuauuccgggucuuucguucagcaucccgagcucacgggccuggacugcauucggccuuguuucuggguggaacuuauccgcggaagacccaaggagagcaccaucuggacauccggcagcucuauuuccuuuugcggggucaccagcgauacagugggauggucuuggcccgacggcgccgagcugccuuucaccaucgauaaauga

SEQ ID NO: 213921 - RNA, 1410 nt, Artificial Sequence
  derived and/or modified CDS sequence (opt5) from neuraminidase__InfluenzaA__AFG29043
augaaccccaaucagaagaucauuaccaucggcagcgugugcaugacaauugggauggccaaccugauccuccaaauuggaaauaucaucuccauuuggaucucucacagcauucagcugggcaaccagaaucagaucgagacguguaaccaauccgucauuaccuacgaaaauaacacauggguuaaucagaccuaugugaacaucucuaauacaaacuucgcugccgggcagagcguggucuccgugaaacuugcgggaaauucuagccugugcccuguuuccggcugggcuauuuacagcaaggacaacucuaucagaaucggguccaaaggagauguguuugucauucgggagccguucaucagcuguucuccccucgaaugccgcaccuuuuuccugacacagggcgcccuucugaaugacaagcauuccaacggcaccauuagagaucggagcccuuaucgcacgcucaugucuugucccaucggggaggugccuucccccuacaacagcagauuugaauccguugccuggucugcuagcgccugccacgacggaauuaauuggcugaccaucggcaucuccgggccugauaacggagcuguggccguccugaaauauaauggcauuaucacagacaccauuaagagcuggcggaacaauauccuccgcacacaagagucugagugugcgugcgugaacggguccuguuucaccgugaugacggauggaccgagcgacggccaggccucuuacaagauuuuuagaaucgaaaaaggcaagaucgucaaaagcguugagaugaaugcucccaacuaucauuacgaagagugcuccuguuacccugauucuagcgagauuacaugcgugugccgggacaauuggcacggguccaaccgccccugggugagcuucaaucagaaccuggaauaucagaucggauacauuuguucuggcaucuuuggggauaauccuagacccaacgacaagaccggauccugcggcccggucagcucuaauggggccaacggagugaaaggcuucuccuuuaaguauggcaacgggguuuggauuggacggacaaagagcaucuccucucgcaauggcuucgagaugauuugggauccuaacggguggaccggaaccgacaauaacuuuagcaucaaacaagacaucgugggcauuaaugaaugguccggguacucuggcagcuucguccagcaucccgagcuuacaggacuggauuguaucagaccuugcuucuggguggaacucauucggggccgccccaaggagaacacgaucuggaccuccgggagcucuauuuccuuuuguggaguuaauagcgacacagugggcuggucuuggcccgauggggcugagcugccuuucaccaucgacaaauga

SEQ ID NO: 213922 - RNA, 1410 nt, Artificial Sequence; identical to SEQ ID NO: 210591
  derived and/or modified CDS sequence (opt5) from neuraminidase__InfluenzaA__AFG29045

SEQ ID NO: 213923 - RNA, 1410 nt, Artificial Sequence; identical to SEQ ID NO: 210723
  derived and/or modified CDS sequence (opt5) from neuraminidase__InfluenzaA__AFG31063

SEQ ID NO: 213924 - RNA, 1410 nt, Artificial Sequence; identical to SEQ ID NO: 208810
  derived and/or modified CDS sequence (opt5) from neuraminidase__InfluenzaA__AFG31073

SEQ ID NO: 213925 - RNA, 1410 nt, Artificial Sequence
  derived and/or modified CDS sequence (opt5) from neuraminidase__InfluenzaA__AFG31083
augaaccccaaucagaagaucauuaccaucggcagcgugugcaugacaauugggauggccaaccugauccuccaaauuggaaauaucaucuccauuuggaucucucacagcauucagcuggucaaccagaaucagaucgagacguguaaccaauccguuauuaccuacgaaaauaacacaugggugaaucagaccuaugugaacaucucuaauacaaacuucgcugccggccagagcgucguguccguuaaacuugcggggaauagcagccugugcccuguguccggaugggcuauuuacagcaaggacaacucugucagaaucggcuccaaaggggauguguuuguuauccgggagccguucauuagcuguucuccccucgaaugccgcaccuuuuuccugacacagggagcccuucugaaugacaagcauuccaacggcaccaucaaagauagaagcccuuaucggacgcucaugucuugucccauuggcgaggugccuucccccuacaacagccgcuuugaauccgucgccuggucugcuagcgccugccacgacgggaucaauuggcugaccauuggaaucuccggcccugauaacggggcuguggccgugcugaaguauaauggaaucauuacagacaccaucaagagcuggagaaacaauauucuccggacacaagagucugagugugcgugcgucaacggcuccuguuucaccguuaugacggaugggccgagcaauggacaggccucuuacaaaaucuuucgcauugaaaagggcaaaaucgugaagucuguggagaugaacgcucccaauuaucauuacgaagagugcuccuguuacccugacucuagcgagaucacaugcgucugcagagauaacuggcacggcuccaaucggcccugggugagcuucaaccagaaucuggaauaucagauuggguacaucuguucuggaauuuuuggcgacaacccucgccccaaugauaaaaccggguccugcggaccgguuagcucuaacggcgccaacggggugaagggauucuccuuuaaguauggcaauggcgucuggaucgggagaacaaaaagcauuuccucucggaacggauucgagaugaucugggacccuaauggcuggaccgggaccgauaacaauuuuagcauuaagcaagacaucgugggaaucaacgaaugguccggcuacucugggagcuucguucagcaucccgagcuuacaggccuggacuguauucgcccuugcuucuggguggaacucaucagaggacggcccaaagagaauacgauuuggaccuccggcagcucuaucuccuuuuguggggucaacagcgauacagugggauggucuuggcccgacggcgcugagcugccuuucaccauugauaaguga

SEQ ID NO: 213926 - RNA, 1410 nt, Artificial Sequence; identical to SEQ ID NO: 208810
  derived and/or modified CDS sequence (opt5) from neuraminidase__InfluenzaA__AFG31093

SEQ ID NO: 213927 - RNA, 1410 nt, Artificial Sequence; identical to SEQ ID NO: 208810
  derived and/or modified CDS sequence (opt5) from neuraminidase__InfluenzaA__AFG31103

SEQ ID NO: 213928 - RNA, 1410 nt, Artificial Sequence; identical to SEQ ID NO: 208810
  derived and/or modified CDS sequence (opt5) from neuraminidase__InfluenzaA__AFG31113

SEQ ID NO: 213929 - RNA, 1410 nt, Artificial Sequence; identical to SEQ ID NO: 208810
  derived and/or modified CDS sequence (opt5) from neuraminidase__InfluenzaA__AFG31123

SEQ ID NO: 213930 - RNA, 1410 nt, Artificial Sequence; identical to SEQ ID NO: 208810
  derived and/or modified CDS sequence (opt5) from neuraminidase__InfluenzaA__AFG31133

SEQ ID NO: 213931 - RNA, 1410 nt, Artificial Sequence; identical to SEQ ID NO: 208810
  derived and/or modified CDS sequence (opt5) from neuraminidase__InfluenzaA__AFG31143

SEQ ID NO: 213932 - RNA, 1410 nt, Artificial Sequence; identical to SEQ ID NO: 208810
  derived and/or modified CDS sequence (opt5) from neuraminidase__InfluenzaA__AFG31153

SEQ ID NO: 213933 - RNA, 1410 nt, Artificial Sequence; identical to SEQ ID NO: 208810
  derived and/or modified CDS sequence (opt5) from neuraminidase__InfluenzaA__AFG31163

SEQ ID NO: 213934 - RNA, 1410 nt, Artificial Sequence
  derived and/or modified CDS sequence (opt5) from neuraminidase__InfluenzaA__AFG31173
augaaccccaaucagaagaucauuaccaucggcagcgugugcaugacaauugggauggccaaccugauccuccaaauuggaaauaucaucuccauuuggaucucucacagcauucagcugggcaaccagaaucagaucgagacguguaaccaauccgucauuaccuacgaaaauaacacauggguuaaucagaccuaugugaacaucucuaauacaaacuucgcugccgggcagagcguggucuccgugaaacuugcgggaaauucuagccugugcccuguuuccggcugggcuauuuacagcaaggacaacucuaucagaaucggguccaaaggagauguguuugucauucgggagccguucaucagcuguucuccccucgaaugccgcaccuuuuuccugacacagggcgcccuucugaaugacaagcauuccaacggcaccauuaaagauagaagcccuuaucggacgcucaugucuugucccaucggggaggugccuucccccuacaacagccgcuuugaauccguugccuggucugcuagcgccugccacgacggaauuaauuggcugaccaucggcaucuccgggccugauaacggagcuguggccguccugaaguauaauggcauuaucacagacaccauuaagagcuggagaaacaauauccuccggacacaagagucugagugugcgugcgugaacggguccuguuucaccgugaugacggauggaccgagcgacggccaggccucuuacaaaauuuuucgcaucgaaaagggcaaaaucgucaagagcguugagaugaaugcucccaacuaucauuacgaagagugcuccuguuacccugauucuagcgagauuacaugcgugugcagagacaauuggcacggguccaaccggcccugggugagcuucaaucagaaccuggaauaucagaucggauacauuuguucuggcaucuuuggggauaauccucgccccaacgacaaaaccggauccugcggcccggucagcucuaauggggccaacggagugaagggcuucuccuuuaaguauggcaacgggguuuggauuggaagaacaaaaagcaucuccucucggaauggcuucgagaugauuugggauccuaacggguggaccggaaccgacaauaacuuuagcaucaagcaagacaucgugggcauuaaugaaugguccggguacucuggcagcuucguccagcaucccgagcuuacaggacuggauuguauccgcccuugcuucuggguggaacucauuagaggccugcccaaagagaacacgaucuggaccuccgggagcucuauuuccuuuuguggaguuaauagcgacacagugggcuggucuuggcccgauggggcugagcuuccuuucaccaucgacaaguga

SEQ ID NO: 213935 - RNA, 1410 nt, Artificial Sequence; identical to SEQ ID NO: 213934
  derived and/or modified CDS sequence (opt5) from neuraminidase__InfluenzaA__AFG31183

SEQ ID NO: 213936 - RNA, 1410 nt, Artificial Sequence; identical to SEQ ID NO: 208810
  derived and/or modified CDS sequence (opt5) from neuraminidase__InfluenzaA__AFG31193

SEQ ID NO: 213937 - RNA, 1410 nt, Artificial Sequence; identical to SEQ ID NO: 208810
  derived and/or modified CDS sequence (opt5) from neuraminidase__InfluenzaA__AFG31203

SEQ ID NO: 213938 - RNA, 1410 nt, Artificial Sequence; identical to SEQ ID NO: 208810
  derived and/or modified CDS sequence (opt5) from neuraminidase__InfluenzaA__AFG31213

SEQ ID NO: 213939 - RNA, 1410 nt, Artificial Sequence; identical to SEQ ID NO: 208810
  derived and/or modified CDS sequence (opt5) from neuraminidase__InfluenzaA__AFG31223

SEQ ID NO: 213940 - RNA, 1410 nt, Artificial Sequence; identical to SEQ ID NO: 208810
  derived and/or modified CDS sequence (opt5) from neuraminidase__InfluenzaA__AFG31233

SEQ ID NO: 213941 - RNA, 1410 nt, Artificial Sequence
  derived and/or modified CDS sequence (opt5) from neuraminidase__InfluenzaA__AFG31243
augaaccccaaucagaagaucauuaccaucggcagcgugugcaugacaauugggauggccaaccugauccuccaaauuggaaauaucaucuccauuuggaucucucacagcauucagcugggcaaccagaaucagaucgagacguguaaccaauccgucauuaccuacgaaaauaacacauggguuaaucagaccuaugugaacaucucuaauacaaacuucguggcugggcagagcgucguguccguuaaacuugccggaaauucuagccugugcccuguguccggcugggcgauuuacagcaaggacaacucuaucagaaucggguccaaaggagaugucuuugugauucgggagccguucaucagcuguucuccccucgaaugccgcaccuuuuuccugacacagggcgcccuucugaaugacaagcauuccaacggcaccauuaaagauagaagcccuuaucggacgcucaugucuugucccaucggggagguuccuucccccuacaacagccgcuuugaauccguggcuuggucugccagcgcuugccacgacggaauuaauuggcugaccaucggcaucuccgggccugauaacggagccgucgcugugcugaaguauaauggcauuaucacagacaccauuaagagcuggagaaacaauauccuccggacacaagagucugagugugccugcgugaacggguccuguuucaccgucaugacggauggaccgagcgacggccaggcgucuuacaaaauuuuucgcaucgaaaagggcaaaaucguuaagagcguggagaugaaugcccccaacuaucauuacgaagagugcuccuguuacccugauucuagcgagauuacaugcgugugcagagacaauuggcacggguccaaccggcccugggucagcuucaaucagaaccuggaauaucagaucggauacauuuguucuggcaucuuuggggauaauccucgccccaacgacaaaaccggauccugcggcccggugagcucuaauggggcuaacggaguuaagggcuucuccuuuaaguauggcaacgggguguggauuggaagaacaaaaagcaucuccucucggaauggcuucgagaugauuugggauccuaacggguggaccggaaccgacaauaacuuuagcaucaagcaagacaucgucggcauuaaugaaugguccggguacucuggcagcuucgugcagcaucccgagcuuacaggacuggauuguauccgcccuugcuucuggguugaacucauuagaggccggcccaaagagaacacgaucuggaccuccgggagcucuauuuccuuuuguggagugaauagcgacacagucggcuggucuuggcccgauggggccgagcugccuuucaccaucgacaaguga

SEQ ID NO: 213942 - RNA, 1410 nt, Artificial Sequence; identical to SEQ ID NO: 211802
  derived and/or modified CDS sequence (opt5) from neuraminidase__InfluenzaA__AFG31253

SEQ ID NO: 213943 - RNA, 1410 nt, Artificial Sequence; identical to SEQ ID NO: 208810
  derived and/or modified CDS sequence (opt5) from neuraminidase__InfluenzaA__AFG31263

SEQ ID NO: 213944 - RNA, 1410 nt, Artificial Sequence; identical to SEQ ID NO: 208810
  derived and/or modified CDS sequence (opt5) from neuraminidase__InfluenzaA__AFG31273

SEQ ID NO: 213945 - RNA, 1410 nt, Artificial Sequence; identical to SEQ ID NO: 208810
  derived and/or modified CDS sequence (opt5) from neuraminidase__InfluenzaA__AFG31283

SEQ ID NO: 213946 - RNA, 1410 nt, Artificial Sequence; identical to SEQ ID NO: 208810
  derived and/or modified CDS sequence (opt5) from neuraminidase__InfluenzaA__AFG31293

SEQ ID NO: 213947 - RNA, 1410 nt, Artificial Sequence; identical to SEQ ID NO: 208810
  derived and/or modified CDS sequence (opt5) from neuraminidase__InfluenzaA__AFG31303

SEQ ID NO: 213948 - RNA, 1410 nt, Artificial Sequence; identical to SEQ ID NO: 208810
  derived and/or modified CDS sequence (opt5) from neuraminidase__InfluenzaA__AFG31313

SEQ ID NO: 213949 - RNA, 1410 nt, Artificial Sequence; identical to SEQ ID NO: 208810
  derived and/or modified CDS sequence (opt5) from neuraminidase__InfluenzaA__AFG31326

SEQ ID NO: 213950 - RNA, 1410 nt, Artificial Sequence; identical to SEQ ID NO: 208810
  derived and/or modified CDS sequence (opt5) from neuraminidase__InfluenzaA__AFG31336

SEQ ID NO: 213951 - RNA, 1410 nt, Artificial Sequence; identical to SEQ ID NO: 211802
  derived and/or modified CDS sequence (opt5) from neuraminidase__InfluenzaA__AFG31346

SEQ ID NO: 213952 - RNA, 1410 nt, Artificial Sequence; identical to SEQ ID NO: 211802
  derived and/or modified CDS sequence (opt5) from neuraminidase__InfluenzaA__AFG31356

SEQ ID NO: 213953 - RNA, 1410 nt, Artificial Sequence; identical to SEQ ID NO: 211802
  derived and/or modified CDS sequence (opt5) from neuraminidase__InfluenzaA__AFG31366

SEQ ID NO: 213954 - RNA, 1410 nt, Artificial Sequence; identical to SEQ ID NO: 211802
  derived and/or modified CDS sequence (opt5) from neuraminidase__InfluenzaA__AFG31379

SEQ ID NO: 213955 - RNA, 1410 nt, Artificial Sequence; identical to SEQ ID NO: 211802
  derived and/or modified CDS sequence (opt5) from neuraminidase__InfluenzaA__AFG31389

SEQ ID NO: 213956 - RNA, 1410 nt, Artificial Sequence; identical to SEQ ID NO: 211802
  derived and/or modified CDS sequence (opt5) from neuraminidase__InfluenzaA__AFG31399

SEQ ID NO: 213957 - RNA, 1410 nt, Artificial Sequence; identical to SEQ ID NO: 211802
  derived and/or modified CDS sequence (opt5) from neuraminidase__InfluenzaA__AFG31409

SEQ ID NO: 213958 - RNA, 1410 nt, Artificial Sequence; identical to SEQ ID NO: 208810
  derived and/or modified CDS sequence (opt5) from neuraminidase__InfluenzaA__AFG31419

SEQ ID NO: 213959 - RNA, 1410 nt, Artificial Sequence; identical to SEQ ID NO: 208810
  derived and/or modified CDS sequence (opt5) from neuraminidase__InfluenzaA__AFG31429

SEQ ID NO: 213960 - RNA, 1410 nt, Artificial Sequence; identical to SEQ ID NO: 208810
  derived and/or modified CDS sequence (opt5) from neuraminidase__InfluenzaA__AFG31439

SEQ ID NO: 213961 - RNA, 1410 nt, Artificial Sequence; identical to SEQ ID NO: 208810
  derived and/or modified CDS sequence (opt5) from neuraminidase__InfluenzaA__AFG31449

SEQ ID NO: 213962 - RNA, 1410 nt, Artificial Sequence; identical to SEQ ID NO: 208810
  derived and/or modified CDS sequence (opt5) from neuraminidase__InfluenzaA__AFG31459

SEQ ID NO: 213963 - RNA, 1410 nt, Artificial Sequence; identical to SEQ ID NO: 208810
  derived and/or modified CDS sequence (opt5) from neuraminidase__InfluenzaA__AFG31469

SEQ ID NO: 213964 - RNA, 1410 nt, Artificial Sequence; identical to SEQ ID NO: 208810
  derived and/or modified CDS sequence (opt5) from neuraminidase__InfluenzaA__AFG31479

SEQ ID NO: 213965 - RNA, 1410 nt, Artificial Sequence; identical to SEQ ID NO: 208810
  derived and/or modified CDS sequence (opt5) from neuraminidase__InfluenzaA__AFG31499

SEQ ID NO: 213966 - RNA, 1410 nt, Artificial Sequence; identical to SEQ ID NO: 210701
  derived and/or modified CDS sequence (opt5) from neuraminidase__InfluenzaA__AFG31509

SEQ ID NO: 213967 - RNA, 1410 nt, Artificial Sequence; identical to SEQ ID NO: 211802
  derived and/or modified CDS sequence (opt5) from neuraminidase__InfluenzaA__AFG31519

SEQ ID NO: 213968 - RNA, 1410 nt, Artificial Sequence; identical to SEQ ID NO: 208810
  derived and/or modified CDS sequence (opt5) from neuraminidase__InfluenzaA__AFG31529

SEQ ID NO: 213969 - RNA, 1410 nt, Artificial Sequence; identical to SEQ ID NO: 210701
  derived and/or modified CDS sequence (opt5) from neuraminidase__InfluenzaA__AFG31539

SEQ ID NO: 213970 - RNA, 1410 nt, Artificial Sequence; identical to SEQ ID NO: 208810
  derived and/or modified CDS sequence (opt5) from neuraminidase__InfluenzaA__AFG31549

SEQ ID NO: 213971 - RNA, 1410 nt, Artificial Sequence; identical to SEQ ID NO: 208810
  derived and/or modified CDS sequence (opt5) from neuraminidase__InfluenzaA__AFG31559

SEQ ID NO: 213972 - RNA, 1410 nt, Artificial Sequence; identical to SEQ ID NO: 211802
  derived and/or modified CDS sequence (opt5) from neuraminidase__InfluenzaA__AFG31569

SEQ ID NO: 213973 - RNA, 1410 nt, Artificial Sequence; identical to SEQ ID NO: 208810
  derived and/or modified CDS sequence (opt5) from neuraminidase__InfluenzaA__AFG31579

SEQ ID NO: 213974 - RNA, 1410 nt, Artificial Sequence; identical to SEQ ID NO: 208810
  derived and/or modified CDS sequence (opt5) from neuraminidase__InfluenzaA__AFG31589

SEQ ID NO: 213975 - RNA, 1410 nt, Artificial Sequence; identical to SEQ ID NO: 208810
  derived and/or modified CDS sequence (opt5) from neuraminidase__InfluenzaA__AFG31599

SEQ ID NO: 213976 - RNA, 1410 nt, Artificial Sequence; identical to SEQ ID NO: 208810
  derived and/or modified CDS sequence (opt5) from neuraminidase__InfluenzaA__AFG31609

SEQ ID NO: 213977 - RNA, 1410 nt, Artificial Sequence; identical to SEQ ID NO: 208810
  derived and/or modified CDS sequence (opt5) from neuraminidase__InfluenzaA__AFG31619

SEQ ID NO: 213978 - RNA, 1410 nt, Artificial Sequence; identical to SEQ ID NO: 208810
  derived and/or modified CDS sequence (opt5) from neuraminidase__InfluenzaA__AFG31629

SEQ ID NO: 213979 - RNA, 1410 nt, Artificial Sequence; identical to SEQ ID NO: 211802
  derived and/or modified CDS sequence (opt5) from neuraminidase__InfluenzaA__AFG31639

SEQ ID NO: 213980 - RNA, 1410 nt, Artificial Sequence; identical to SEQ ID NO: 208810
  derived and/or modified CDS sequence (opt5) from neuraminidase__InfluenzaA__AFG31649

SEQ ID NO: 213981 - RNA, 1410 nt, Artificial Sequence; identical to SEQ ID NO: 208810
  derived and/or modified CDS sequence (opt5) from neuraminidase__InfluenzaA__AFG31659

SEQ ID NO: 213982 - RNA, 1410 nt, Artificial Sequence; identical to SEQ ID NO: 208810
  derived and/or modified CDS sequence (opt5) from neuraminidase__InfluenzaA__AFG31669

SEQ ID NO: 213983 - RNA, 1410 nt, Artificial Sequence; identical to SEQ ID NO: 206167
  derived and/or modified CDS sequence (opt5) from neuraminidase__InfluenzaA__AFG71868

SEQ ID NO: 213984 - RNA, 1410 nt, Artificial Sequence; identical to SEQ ID NO: 206167
  derived and/or modified CDS sequence (opt5) from neuraminidase__InfluenzaA__AFG71890

SEQ ID NO: 213985 - RNA, 1410 nt, Artificial Sequence; identical to SEQ ID NO: 206167
  derived and/or modified CDS sequence (opt5) from neuraminidase__InfluenzaA__AFG71901

SEQ ID NO: 213986 - RNA, 1410 nt, Artificial Sequence; identical to SEQ ID NO: 206186
  derived and/or modified CDS sequence (opt5) from neuraminidase__InfluenzaA__AFG71912

SEQ ID NO: 213987 - RNA, 1410 nt, Artificial Sequence
  derived and/or modified CDS sequence (opt5) from neuraminidase__InfluenzaA__AFG71934
augaaccccaaucagaagaucauuaccaucggcagcgugucccugacaauugccacggucugcuuccucaugcaaaucgcuauucugaucaccacaguuacccuucacuuuaaacaguacgagugugacucuccugccaacaaucaggugaugccgugcgaacccaucauuaucgagagaaacauuacagaaaucguguaucugaccaauacaaccauugagaaggaaaucuguccuaaacucgucgaguaccggaacuggagcaagccccagugcaaaauuacgggguucgcgccuuuuuccaaggauaauucuauccgccugagcgcuggaggcgacaucugggugaccagagagcccuauguuuccugugauccugggaagugcuaccaauucgcccuuggacagggcacaacccuggacaacaaacauucuaaugauacaauucacgaccggaucccgcaucgcacccuccugaugaacgaacugggggugcccuuucaccucggaacgagacaggucuguauugccuggagcuccagcucuugccaugauggcaaggcuuggcugcacguguguguuacaggcgacgauaaaaaugccaccgcuuccuucaucuaugacgggcggcuuguggauagcauuggaucuuggucccagaacauccugcgcacacaagagagcgaaugcgucuguaucaauggaaccugcaccguggugaugacagacgggucugccuccggcagagcggauacgcggauucucuuuaucgaggagggcaagauuguccacaucagcccucuguccgggucugcccagcauguugaagagugcagcuguuacccccgcuauccuggagugagaugcauuugucgggacaacuggaaaggcuccaaucgccccguggucgacaucaacgugaaggauuacagcaucgacucuagauacguuugcuccggccuugugggggauaccccgcggaacaaugaccgcuucagcaacucuaauuguagaaacccuaauaacgaacggggaaaucacggcgucaaggggugggcuuuugaugacggaaacgauguguggaugggcagaacaauuagcaaagacucccgcucuggguaugagaccuucaagguuaucggaggcuggagcacacccaauuccaaaagccagauuaacagacaggugaucgucgauucugacaaucgguccggcuacagcgggaucuuuucuguggaaggaaaguccugcauuaaccgcuguuucuaugucgagcugauucggggcagagagcaagaaacccgcgugugguggacgagcaauuccaucguuguguuuugcgggacaucuggaaccuacggcaccgggagcuggccugauggcgccgacaucaaccucaugcccauuuga

SEQ ID NO: 213988 - RNA, 1410 nt, Artificial Sequence
  derived and/or modified CDS sequence (opt5) from neuraminidase__InfluenzaA__AFG71945
augaaccccaaucagaagaucauuaccaucggcagcgugucccugacaauugccacggucugcuuccucaugcaaaucgcuauucugguuaccacagugacccuucacuuuaaacaguacgagugugacucuccugccaacaaucaggugaugccgugcgaacccaucaucauugagagaaacaucacagaaauugucuaucugaccaauacaaccaucgagaaggaaauuuguccuaaacucguggaguaccggaacuggagcaagccccagugcaaaaucacgggguucgcgccuuuuuccaaggauaauucuauucgccugagcgcuggaggcgacaucuggguuaccagagagcccuauguguccugugauccugggaagugcuaccaauucgcccuuggacagggcacaacccuggacaacaaacauucuaaugauacaauccacgaccggauuccgcaucgcacccuccugaugaacgaacuggggguccccuuucaccucggaacgagacagguguguaucgccuggagcuccagcucuugccaugauggcaaggcuuggcugcacguuugugugacaggcgacgaugagaaugccaccgcuuccuucauuuaugacgggcggcuugucgauagcaucggaucuuggucccagaacauucugcgcacacaagaaagcgagugcguguguaucaauggaaccugcaccguggucaugacagacgggucugccuccggcagagcggauacgcggauccucuuuauugaggaaggcaaaaucguucacauuagcccucuguccgggucugcccagcauguggaggaaugcagcuguuacccccgcuauccuggagugagaugcaucugucgggacaacuggaagggcuccaaucgccccgucguggacauuaacguuaaagauuacagcaucgacucuagauacgugugcuccggccuugucggggauaccccgcggaacaaugacaagagcucuaacagcaauugucgcaacccuaauaacgauaagggaaaucacggcgugaaagggugggcuuucgacgauggaaacgacguuuggaugggcagaacaaucuccaaggauucucggagcggguaugagaccuuuaaagugauuggaggcugguccacacccaauagcaagucucagaucaacagacaggucauuguggacuccgauaaucgcagcggcuacucugggaucuucuccgucgaaggaaaaagcugcauuaaccgguguuuuuauguggagcugaucagaggccgcgagcaagaaaccaagguuugguggacguccaauucuauuguggucuucugcgggacaagcggaaccuacggcaccggguccuggccugacggcgccgacaucaaccucaugucuaucuga

SEQ ID NO: 213989 - RNA, 1410 nt, Artificial Sequence; identical to SEQ ID NO: 206190
  derived and/or modified CDS sequence (opt5) from neuraminidase__InfluenzaA__AFG71967

SEQ ID NO: 213990 - RNA, 1410 nt, Artificial Sequence; identical to SEQ ID NO: 206190
  derived and/or modified CDS sequence (opt5) from neuraminidase__InfluenzaA__AFG71978

SEQ ID NO: 213991 - RNA, 1410 nt, Artificial Sequence
  derived and/or modified CDS sequence (opt5) from neuraminidase__InfluenzaA__AFG71988
augaaccccaaucagaagaucauuaccaucggcagcgugucccugacaauugccacgaucugcuuccucaugcaaauugcuauccuggucaccacaguuacccuucacuuuaaacaguacgagugugacucuccugccaacaaucaggugaugccgugcgaacccaucauuaucgagagaaacauuacagaaaucguguaucugaccaauacaaccauugagaaggaaaucuguccuaaacucgucgaguaccggaacuggagcaagccccagugcaaaauuacgggguucgcgccuuuuuccaaggauaauucuauccgccugagcgcuggaggcgacaucugggugaccagagagcccuauguuuccugugauccugggaagugcuaccaauucgcccuuggacagggcacaacccuggacaacaaacauucuaaugauacaauucacgaccggaccccgcaucgcacgcuccugaugaacgaacugggggugcccuuucaccucggaacaagacaggucuguaucgccuggagcuccagcucuugccaugauggcaaggcuuggcugcacguguguguuaccggcuaugacaaaaaugccacagcuuccuucauuuacgaugggcggcuuguggacagcaucggaucuuggucccagaacauucugcgcacccaagagagcgaaugcaucuguaucaauggaaccugcacagucgugaugacggaugggucugccuccggcagagcggacaccaagauucucuuuaucgaggagggcaaaauugugcacaucagcccucuguccgggucugcccagcaugucgaagagugcagcuguuauccccgguacccuggaguucgcugcauuuguagagauaacuggaagggcuccaaucggcccgugguggacaucaacgucaaggacuacagcaucgauucuuccuaugugugcagcggccuuguuggggacacaccgcgcaacaaugauagaucuagcaacuccuacugucggaauccuaacaaugaaaaaggaaaccacggcgugaaggggugggcuuucgacgauggaaaugacgucuggaugggccgcaccauuucugaggauagcagauccggguaugaaacauuuaaagugaucggaggcuggagcacccccaacucuaagcugcagauuaaucggcagguuaucguggacuccgauaacagaagcggcuacucugggauuuucuccgucgagggaaaaagcugcaucaaucgcuguuuuuauguggagcucauucggggcagagaacaagagacgcgcgucugguggacauccaacucuaucgugguuuucugcgggaccagcggaaccuacggcacaggguccuggccugacggcgccgauaucaaucugaugcccauuuga

SEQ ID NO: 213992 - RNA, 1410 nt, Artificial Sequence; identical to SEQ ID NO: 206190
  derived and/or modified CDS sequence (opt5) from neuraminidase__InfluenzaA__AFG71999

SEQ ID NO: 213993 - RNA, 1410 nt, Artificial Sequence; identical to SEQ ID NO: 206648
  derived and/or modified CDS sequence (opt5) from neuraminidase__InfluenzaA__AFG72021

SEQ ID NO: 213994 - RNA, 1410 nt, Artificial Sequence
  derived and/or modified CDS sequence (opt5) from neuraminidase__InfluenzaA__AFG72032
augaaccccaaucagaagaucauuaccaucggcagcgugucccugacaauugccacgaucugcuuccucaugcaaauugcuauccuggucaccacaguuacccuucacuuuaaacaguacgaguguucuagcccuccgaacaaucaggugaugcccugcgaaccuaucauuaucgagagaaacauuacagaaaucguguaucugaccaauacaaccauugagaaggaaaucugucccaaacucgucgaguaccggaacugguccaagccucagugcaaaauuacgggguucgcccccuuuucuaaggacaauagcauccgccuguccgcgggaggcgauaucugggugaccagagagccuuauguuucuugugacccggggaagugcuaccaauucgcucuuggacagggcacaacccuggauaacaaacauagcaaugacacaauucacgaucggacccccuaucgcacgcuccugaugaacgaacugggggugccuuuucaucucggaacaagacaggucuguaucgccugguccuccucuuccugccacgacggcaaggccuggcugcauguguguguuaccggcuacgauaaaaaugcuacagccagcuucauuuaugacgggcggcuuguggauucuaucggauccuggagcaagaacauucugcgcacccaggagucugaaugcgucuguaucaaugggaccugcacaguggugaugacggacggcuccgcuagcgagagagccgauaccaaaauccucuuuauugaggaaggaaagaucguccacauuagcccccugucuggcagcgcgcaacacguugaggaaugcuccuguuacccucgguaccccggggugcgcugcguguguagagacaacuggaagggaagcaaucggccggucguggauaucaacguuaaagacuauucuauuguguccagcuacgucugcucuggccuugugggcgacacaccucgcaagaacgauagaagcuccucuagcuauugucggaaucccaacaaugagaaagggaaccauggaguuaagggcugggccuucgacgaugggaaugacguguggaugggacgcaccaucuccgaagagagcagaucuggcuacgagacauuuaaagucaucgggggaugguccaccccuaacagcaagcugcagauuaauagacaggugaucgucgauucugacaaccgguccggcuauagcggcauuuucuccguggaagggaaaucuugcaucaaucgcuguuuuuacguugagcucauucggggaagagaacaggagacgcgcgugugguggacaagcaacuccaucgucguguucugcggcaccucugggaccuauggaacaggcagcuggcccgauggggcugacauuaaucugaugcccaucuga

SEQ ID NO: 213995 - RNA, 1410 nt, Artificial Sequence; identical to SEQ ID NO: 206885
  derived and/or modified CDS sequence (opt5) from neuraminidase__InfluenzaA__AFG72088

SEQ ID NO: 213996 - RNA, 1410 nt, Artificial Sequence
  derived and/or modified CDS sequence (opt5) from neuraminidase__InfluenzaA__AFG72121
augaaccccaaucagaagaucauuaccaucggcagcgugucccugacaauugccacgaucugcuuccucaugcaaauugcuauccuggucaccacaguuacccuucacuuuaaacaguacgaguguucuagcccuccgaacaauagagugaugcccugcgaaccuacaaucauugagcggaacaucaccgaaauuguguaucugacaaauaccacgaucgagaaggaaauuugucccaaacucgucgaguaccgcaacugguccaagccucagugcaaaaucaccggguucgcccccuuuucuaaggacaauagcauuagacuguccgcgggaggcgauaucugggugacacgggagccuuauguuucuugugacccggggaagugcuaccaguucgcucuuggacaaggcaccacacugaacaaucgccauagcaacgauaccgugcacgacagaacgcccuaucggacacuccugaugaaugaacugggggucccuuuucaucucggaaccaaacagguguguauggccugguccuccucuuccugccacgauggcaaggccuggcugcauguuugugugacaggccacgacgagaacgcuaccgccagcuucaucuacgaugggcgccuugucgacucuauuggauccuggagcaaaaauauccugagaacccaggaaucugagugcguguguauuaacggcacaugcacgguggucaugaccgauggguccgcuagcgagcgggccgacacaaagauccucuuuauugaagagggaaaaaucguucacaucagcccccugucuggcagcgcgcagcauguggaagagugcuccuguuauccucgcuaccccggggugagaugcgucugucgggauaauuggaagggaagcaaccgcccgauuguggacaucaacguuaaggauuacucuauuguguccagcuaugucugcucuggccuugugggcgacaccccucggaaaaaugacagaagcuccucuagcuacugucgcaaccccaauaacgaaaaggggucccacggaguuaaaggcugggccuucgaugacgggaaugauguguggaugggaagaacaaucggcgaggagcugcggagcggguaugaaaccuuuaaggucauuggaggcuggucuacgccuaacuccaaacuccaaaucaauagacaggugaucgucgacagcggcaaccgcucuggguacuccggaauuuucagcguggagggcaaguccugcaucaaucgguguuuuuauguugaacugauuagagggcgcaaacaggagacacgggugugguggaccucuaacagcaucgucguguucugcggaaccuccggcacauacgggaccggcucuuggcccgauggagcugacauuaaucugaugcccaucuga

SEQ ID NO: 213997 - RNA, 1410 nt, Artificial Sequence
  derived and/or modified CDS sequence (opt5) from neuraminidase__InfluenzaA__AFG72143
augaaccccaaucagaagaucauuaccaucggcagcgugucccugacaauugccacgaucugccuccugaugcaaauugcuauccuugucaccacaguuacccugcacuucaaacaguacgaguguucuagcccuccgaacaaucaggugaugcccugcgaaccuacaaucauugagagaaacaucaccgaaauuguguaucucacaaauaccacgaucgagaaggaaauuugucccaaacuggucgaguaccggaacugguccaagccucagugcaaaaucaccggguuugcccccuucucuaaggacaauagcauucgccuuuccgcgggaggcgauaucugggugacaagagagccuuauguuucuugugacccggggaagugcuaccaauuugcucugggacagggcaccacacucaacaaucggcauagcaacgauaccgugcacgaccgcacgcccuauagaacacugcugaugaaugaacucggggucccuuuccaucugggaaccaaacagguguguaucgccugguccuccucuuccugccacgauggcaaggccuggcuucauguuugugugacaggccacgacgagaacgcuaccgccagcuuuauuuacgaugggcggcuggucgacucuaucggauccuggagcaaaaauauucuccgcacccaggaaucugagugcguguguaucaacggcacaugcacgguggucaugaccgauggguccgcuagcgagagagccgacacaaagauucuguucaucgaagagggaaaaaucguucacauuagcccccuuucuggcagcgcgcaacauguggaagagugcuccuguuauccucgguaccccggggugcgcugcgucuguagagauaauuggaagggaagcaaccggccgaucguggacauuaacguuaaggauuacucuaucguguccagcuaugucugcucuggccuggugggcgacaccccucgcaaaaaugacagcuccucuagcuccuacuguagaaaccccaauaacgaaaaggggagccacggaguuaaaggcugggccuuugaugacgggaaugauguguggaugggacggacaauuggcgaggagcuccgcucuggguaugaaaccuucaaggucaucggaggcugguccacgccuaacagcaaacugcagaucaauagacaggugauugucgacucuggcaaccgguccggguacagcggaaucuuuuccguggagggcaagucuugcauuaauagauguuucuauguugaacugauccgcgggcggaaacaggagacaaaggugugguggaccagcaacuccauugucguguuuugcggaaccucuggcacauacgggaccggcagcuggcccgauggagcugacaucaaucucaugcccauuuga

SEQ ID NO: 213998 - RNA, 1410 nt, Artificial Sequence
  derived and/or modified CDS sequence (opt5) from neuraminidase__InfluenzaA__AFG72165
augaaccccaaucagaagaucauuaccaucggcagcgugucccugacaauugccacgaucugcuuccucaugcaaauugcuauccuggucaccacaguuacccuucacuuuaaacaguacgaguguaacucuccuccgaauaaccaggugaugcccugcgaaccuacaaucauugagagaaauaucaccgaaauuguguaucugacaaacaccacgaucgagaaggaaauuugucccaaacucgucgaguaccggaauuggagcaagccucagugcaaaaucaccggguucgcccccuuuuccaaggacaacucuauucgccugagcgcgggaggcgauaucugggugacaagagagccuuauguuuccugugacccggggaagugcuaccaauucgcucuuggacagggcaccacacugaauaaccggcauucuaaugauaccgugcacgaccgcacgcccuauagaacacuccugaugaacgaacugggggucccuuuucaucucggaaccaaacagguguguaucgccuggagcuccagcucuugccacgauggcaaggccuggcugcauguuugugugacaggccacgacgagaaugcuaccgccuccuucauuuacgaugggcggcuugucgacagcaucgugucuugguccaaaaacauucugcgcacccaggaaagcgagugcguguguaucaauggaacaugcacggucguuaugaccgauggcucugcuuccgagagagccgacacaaagauucucuuuaucgaagaggggaaaaucgugcacauuagcccccuguccggaucugcgcaacauguggaagagugcagcuguuauccucgguaccccggcguccgcugcguguguagagauaacuggaagggguccaaccggccgaucguugacauuaaugugaaggauuacagcaucgucucuuccuaugugugcagcggacuuguuggcgacaccccucgcaaaaacgacucuagcuccucuagcuacuguagaaaucccaacaaugaaaagggcucccacggggugaaaggaugggccuucgaugacggcaacgaugucuggauggggcggacaauuggagaggagcugcgcagcggcuaugaaaccuuuaaggugaucgggggauggucuacgccuaauuccaaacuccagacaaacagacaggucaucguggaccggggcaauagaagcggcuacucugggauuuucuccguugagggaaagagcugcaucaaccgcuguuuuuauguggaacugauucggggcagaaaacaggagaccaaggucugguggaccuccaauucuaucgugguuuucugcgggacaagcggaaccuacggcacaggguccuggcccgauggcgcugacauuaaccugaugcccaucuga

SEQ ID NO: 213999 - RNA, 1410 nt, Artificial Sequence
  derived and/or modified CDS sequence (opt5) from neuraminidase__InfluenzaA__AFG72176
augaaccccaaucagaagaucauuaccaucggcagcgugucccugacaauugccacgaucugcuuccucaugcaaauuaccauccuggucacaaccguuacacuucacuuuaaacaguacgaguguaacucuccuccgaauaaccaggugaugcugugcgaacccaccaucauugagagaaauaucacagaaauuguguaucucaccaacacgaccaucgagaaggaaaaauguccuaagcuggucgaguaccggaauuggagcaaaccccagugcaagauuacaggguucgcuccuuuuuccaaggacaacucuauccgccuuagcgccggaggcgauauuugggugaccagagagcccuauguuuccugugacccugggaaaugcuaccaauucgcgcugggacagggcacaacccucaauaaccggcauucuaaugauacggugcacgaccgcacaccguauagaacccugcugaugaacgaacucgggguccccuuucaucugggaacaaaacagguguguaucgcuuggagcuccagcucuugccacgauggcaaggccuggcuucauguuugugugaccggccacgacgagaaugccaccgcuuccuucaucuacgaugggcggcuggucgacagcauuggaucuugguccaagaacauccuccgcacacaggaaagcgagugcguguguauuaauggcacgugcaccguggucaugacagaugggucugccuccgagagagcugacaccaaaauccuguuuauugaagagggaaagaucguucacaucagcccucuuuccggcucugcccaacauguggaagagugcagcuguuauccccgguacccuggggugcgcugcgucuguagagauaacuggaagggauccaaccggcccauuguggacaucaauguuaaagauuacagcauugugucuuccuaugucugcagcggccuggugggcgacacaccgcgcaagaacgacucuagcuccucuagcuacuguagaaauccuaacaaugaaaaagggucccacggaguuaagggcugggcguucgaugacgggaacgauguguggaugggacggaccaucagcgaggagcuccgcucuggcuaugaaacguuuaaagucauugggggaugguccacacccaauagcaagcugcagaucaacagacaggugaucgucgaccggggcaauagaucuggcuacuccgggauuuucagcguggagggaaaauccugcaucaaccgcuguuuuuauguugaacugauucggggcagaaagcaggagaauaaggugugguggaccucuaacagcaucgucguguucugcgggaccuccggaacauacggcaccgggucuuggccugauggcgccgacauuaaucucaugcccaucuga

SEQ ID NO: 214000 - RNA, 1410 nt, Artificial Sequence; identical to SEQ ID NO: 213998
  derived and/or modified CDS sequence (opt5) from neuraminidase__InfluenzaA__AFG72198

SEQ ID NO: 214001 - RNA, 1410 nt, Artificial Sequence; identical to SEQ ID NO: 213998
  derived and/or modified CDS sequence (opt5) from neuraminidase__InfluenzaA__AFG72209

SEQ ID NO: 214002 - RNA, 1410 nt, Artificial Sequence
  derived and/or modified CDS sequence (opt5) from neuraminidase__InfluenzaA__AFG72220
augaaccccaaucagaagaucauuaccaucggcagcgugucccugacaauugccacgaucugcuuccucaugcaaauugcuauccuggucaccacaguuacccuucacuuuaaacaguacgaguguaacucuccuccgaauaaccaggugaugcugugcgaacccacaaucauugagagaaauaucaccgaaauugugcaucucacaaacaccacgaucgagaaggaaauuuguccuaaacuggccgaguaucggaauuggagcaagccccagugcaaaaucaccggguucgcgccuuuuuccaaggacaacucuauucgccuuagcgcuggaggcgauaucugggucacaagagagcccuacguguccugugacccugggaagugcuaucaauucgcccugggacagggcaccacacucaauaaccggcacucuaaugauaccguucaugaccgcacgccguacagaacacugcugaugaacgaacucggggugcccuuucaccugggaaccaaacaggucuguaucgccuggagcuccagcucuugccaugauggcaaggcuuggcuucacguguguguuacaggccacgacgagaaugccaccgcuuccuucauuuaugaugggcggcugguggacagcaucggaucuugguccaaaaacauucuccgcacccaggaaagcgagugcgucuguaucaauggcacaugcacgguggugaugaccgaugggucugccuccgagagagcggacacaaagauucuguuuaucgaagagggaaaaaucguccauauuagcccucuuuccggcucugcccaacacguugaagagugcagcuguuacccccgguauccuggggugcgcugcguguguagagauaacuggaagggauccaaccggcccaucgucgacauuaaugugaaggauuacagcaucguuucuuccuacgugugcagcggccuggucggcgacaccccgcgcaaaaacgacucuagcuccucuagcuauuguagaaauccuaacaaugaaaaggggucccauggagugaaaggcugggcuuucgaugacgggaacgauguuuggaugggacggacaauuagcgaggagcuccgcucuggcuacgaaaccuuuaaggugaucgggggaugguccaaacccaauagcaagcugcagaucaacagacaggucauuguggaccggggcaauagaucuggcuauuccgggaucuucagcgucgagggaaaauccugcauuaaccgcuguuuuuacguggaacugauccggggcagaaagcaggagacggaaguuugguggacaucuaauagcauuguggucuucugcgggaccuccggaaccuauggcacagggucuuggccugauggcgccgacaucaaccucaugcccauuuga

SEQ ID NO: 214003 - RNA, 1410 nt, Artificial Sequence; identical to SEQ ID NO: 213998
  derived and/or modified CDS sequence (opt5) from neuraminidase__InfluenzaA__AFG72231

SEQ ID NO: 214004 - RNA, 1410 nt, Artificial Sequence
  derived and/or modified CDS sequence (opt5) from neuraminidase__InfluenzaA__AFG72297
augaaccccaaucagaagaucauuaccaucggcagcgugucccugacaauugccacgaucugcuuccucaugcaaauugcuauccuggucaccacaguuacccuucacuuuaaacaguacgaguguaacucuccuccgaauaaccaggugaugcugugcgaacccacaaucauugagagaaauaucaccgaaauuguguaucucacaaacaccacgaucgagcgggaaauuuguccuaagcuggccgaguaccgcaauuggagcaaaccccagugcaagaucaccggguucgcgccuuuuuccaaagacaacucuauuagacuuagcgcuggaggcgauaucugggucacacgggagcccuauguguccugugacccugggaagugcuaccaauucgcccugggacagggcaccacacucaauaaccgccauucuaaugauaccguucacgaaagaacgccguaucggacacugcugaugaacgagcucggggugcccuuucaucugggaaccaagcaggucuguaucgccuggagcuccagcucuugccacgacggcaaggcuuggcuucauguguguguuacaggccacgaugaaaaugccaccgcuuccuucauuuacgacgggcgccugguggauagcaucggaucuugguccaaaaacauucucagaacccaggagagcgagugcgucuguaucaauggcacaugcacgguggugaugaccgacgggucugccuccgaacgggcggauacaaaaauucuguuuaucgaggaaggaaagaucguccacauuagcccucuuuccggcucugcccaacauguugaggaaugcagcuguuauccccgcuacccuggggugagaugcgugugucgggacaacuggaaaggauccaaccgccccaucgucgauauuaaugugaaggacuacagcaucguuucuuccuaugugugcagcggccuggucggcgauaccccgagaaagaacgacucuagcuccucuagcuacugucggaauccuaacaaugagaaagggucccacggagugaagggcugggcuuucgacgaugggaacgacguuuggaugggacgcacaauuagcgaggaacucagaucuggcuaugagaccuuuaaagugaucgggggaugguccaagcccaauagcaaacugcagaucaaccggcaggucauuguggauagaggcaaucgcucuggcuacuccgggaucuucagcgucgaaggaaaguccugcauuaaccgguguuuuuauguggagcugaucagaggccgcaaacaggaaacggagguuugguggacaucuaauagcauuguggucuucugcgggaccuccggaaccuacggcacagggucuuggccugacggcgccgauaucaaccucaugcccauuuga

SEQ ID NO: 214005 - RNA, 1410 nt, Artificial Sequence
  derived and/or modified CDS sequence (opt5) from neuraminidase__InfluenzaA__AFG72308
augaaccccaaucagaagaucauuaccaucggcagcgugucccugacaauugccacgaucugcuuccucaugcaaauugcuauccuggucaccacaguuacccuucacuuuaaacaguacgaguguaacucuccuccgagcaaucaggugaugcugugcgaacccacaaucauugagagaaacaucaccgaaauuguguaucucacaaauaccacgaucgagaaggaaauuuguccuaaacuggccgaguaccggaacugguccaagccccagugcaaaaucaccggguucgcgccuuuuucuaaggacaauagcauucgccuuuccgcuggaggcgauaucugggucacaagagagcccuaugugucuugugacccugggaagugcuaccaauucgcccugggacagggcaccacacucaacaaucggcauagcaacgauaccguucacgaccgcacgccguauagaacacugcugaugaaugaacucggggugcccuuucaucugggaaccaaacaggucuguaucgccugguccucuagcuccugccacgauggcaaggcuuggcuucauguguguguuacaggccacgacgagaacgccaccgcuagcuucauuuacgaugggcggcugguggacucuaucggauccuggagcaaaaauauucuccgcacccaggaaucugagugcgucuguaucaacggcacaugcacgguggugaugaccgauggguccgccagcgagagagcggacacaaagauucuguuuaucgaagagggaaaaaucguccacauuuccccucuuucuggcagcgcccaacauguugaagagugcuccuguuauccccgguacccuggggugcgcugcguguguagagauaauuggaagggaagcaaccggcccaucgucgacauuaacgugaaggauuacucuaucguuuccagcuaugugugcucuggccuggucggcgacaccccgcgcaaaaaugacagcuccucuagcuccuacuguagaaacccuaauaacgaaaaggggagccacggagugaaaggcugggcuuucgaugacgggaaugauguuuggaugggacggacaauuucugaggagcuccgcuccggcuaugaaaccuuuagagugaucgggggauggagcaagcccaacucuaaacugcagaucaaucggcaggucauuguggacagaggcaaccgcuccggcuacagcgggaucuucuccgucgagggaaagucuugcauuaaucgguguuuuuauguggaacugaucagaggccgcaaacaggagacggaaguuugguggacaagcaacuccauuguggucuucugcgggaccucuggaaccuacggcacagggagcuggccugauggcgccgacaucaaucucaugcccauuuga

SEQ ID NO: 214006 - RNA, 1410 nt, Artificial Sequence; identical to SEQ ID NO: 207257
  derived and/or modified CDS sequence (opt5) from neuraminidase__InfluenzaA__AFG72320

SEQ ID NO: 214007 - RNA, 1410 nt, Artificial Sequence
  derived and/or modified CDS sequence (opt5) from neuraminidase__InfluenzaA__AFG72331
augaaccccaaucagaagaucauuaccaucggcagcgugucccugacagucgccacgauuugcuuccucaugcaaaucgcuauucugguuaccacagugacccuucacuuuaaacaguacgaguguaacucuccuccgaauaaccaggugaugcugugcgaacccacaaucaucgagagaaauauuaccgaaaucgucuaucucacaaacaccacgauugagaaggaaaucuguccuaaacuggccgaguaccggaauuggagcaagccccagugcaaaauuaccggguucgcgccuuuuuccaaggacaacucuauccgccuuagcgcuggaggcgauauuugggugacaagagagcccuauguuuccugugacccugggaagugcuaccaauucgcccugggacagggcaccacacucaauaaccggcauucuaaugauaccgugcacgaccgcacgccguauagaacacugcugaugaacgaacucgggguccccuuucaucugggaaccaaacagguguguaucgccuggagcuccagcucuugccacgauggcaaggcuuggcuucauguuugugugacaggccacgacgagaaugccaccgcuuccuucaucuacgaugggcggcuggucgacagcauuggaucuugguccaaaaacauccuccgcacccaggaaagcgagugcguguguauuaauggcacaugcacgguggucaugaccgaugggucugccuccgagagagcggacacaaagauccuguuuauugaagagggaaaaaucguucacaucagcccucuuuccggcucugcccaacauguggaagagugcagcuguuauccccgguacccuggggugcgcugcgucuguagagauaacuggaagggauccaaccggcccauuguggacaucaauguuaaggauuacagcauugugucuuccuaugucugcagcggccuggugggcgacaccccgcgcaaaaacgacucuagcuccucuagcuacuguagaaauccuaacaaugaaaaggggucccacggaguuaaaggcugggcuuucgaugacgggaacgauguguggaugggacggacaaucagcgaggagcuccgcucuggcuaugaaaccuuuaaggucauugggggaugguccaaacccaauagcaagcugcagaucaacagacaggugaucgucgaccggggcaauagaucuggcuacuccgggauuuucagcguggagggaaaauccugcaucaaccgcuguuuuuauguugaacugauucggggcagaaagcaggagacggaagugugguggacaucuaauagcaucgucguguucugcgggaccuccggaaccuacggcacagggucuuggccugauggcgccgacauuaaccucaugcccaucuga

SEQ ID NO: 214008 - RNA, 1410 nt, Artificial Sequence
  derived and/or modified CDS sequence (opt5) from neuraminidase__InfluenzaA__AFG72353
augaaccccaaucagaagaucauuaccaucggcagcgugucccugacaauugccacgaucugcuuccucaugcaaauugcuauccuggucaccacaguuacccuucacuuuaaacaguacgaguguaacucuccuccgaauaaccaggugaugcugugcgaacccacaaucauugagagaaauaucaccgaaauuguguaucucacaaacaccacgaucgagaaggaaauuuguccuaaacuggccgaguaccggaauuggagcaagccccagugcaaaaucaccggguucgcgccuuuuuccaaggacaacucuauucgccuuagcgcuggaggcgauaucugggucacaagagagcccuauguguccugugacucugggaagugcuaccaauucgcccugggacagggcaccacacucaauaaccggcauagcaaugauaccguucacgaccgcacgccuuauagaacacugcugaugaacgaacucggggugccguuucaucugggaaccaaacaggucuguaucgccugguccuccucuuccugccacgauggcaaggcuuggcuucauguguguguuacaggccacgacgagaaugccaccgcuagcuucauuuacgaugggcggcugguggacucuaucggauccuggagcaaaaacauucuccgcacccaggaaucugagugcgucuguaucaauggcacaugcacgguggugaugaccgauggguccgccagcgagagagcggacacaaagauucuguuuaucgaagagggaaaaaucguccacauuagcccccuuucuggcagcgcccaacauguugaagagugcuccuguuauccucgguaccccggggugcgcugcguguguagagauaacuggaagggaagcaaccggccuaucgucgacauuaaugugaaggauuacucuaucguuuccagcuaugugugcucuggccuggucggcgacacaccccgcaaaaacgacagcuccucuagcuccuacuguagaaauccgaacaaugaaaaggggagccacggagugaaaggcugggcuuucgaugacgggaacgauguuuggaugggacggaccauuucugaggagcuccgcuccggcuaugaaaccuuuaaggugaucgggggauggagcaaaccuaauucuaagcugcagaucaacagacaggucauuguggaccggggcaauagauccggcuacagcgggaucuucuccgucgagggaaaaucuugcauuaaccgcuguuuuuauguggaacugauccggggcagaaagcaggagacggaaguuugguggacaagcaauuccauuguggucuucugcgggaccucuggaaccuacggcacagggagcuggcccgauggcgccgacaucaaccucaugccuauuuga

SEQ ID NO: 214009 - RNA, 1410 nt, Artificial Sequence; identical to SEQ ID NO: 207257
  derived and/or modified CDS sequence (opt5) from neuraminidase__InfluenzaA__AFG72364

SEQ ID NO: 214010 - RNA, 1410 nt, Artificial Sequence
  derived and/or modified CDS sequence (opt5) from neuraminidase__InfluenzaA__AFG72430
augaaccccaaucagaagaucauuaccaucggcagcgugucccugacaauuacgaccaucugcuuccucaugcaaauugccauccuggucaucacaguuacccuucacuuuaaacagugugagugcaacucuccuccgaauaaccaggugaugcugugugaacccacaauuaucgagagaaauauuaccgaaaucguguaccucacaaacaccacgauugagaaggaaaucugcccuaaacuggcugaguaucggaauuggagcaagccccaguguaaaauuaccggguucgccccuuuuuccaaggacaacucuauccgccuuagcgcgggaggcgauaucugggucacaagagagcccuacguguccugcgacccugggaaguguuaucaauucgcucugggacagggcaccacacucaauaaccggcauucuaaugauaccguucacgaccgcacgccguacagaacacugcugaugaacgaacucggggugcccuuucaucugggaaccaaacaggucugcauugccuggagcuccagcucuugucacgauggcaaggccuggcuucaugugugcguuacaggccacaaugagaacgcuaccgccuccuucaucuaugacgggcggcugguggauagcauuggaucuugguccaaaaauauccuccgcacccaggaaagcgagugugucugcauuaacggcacaugcacgguggugaugaccgacgggucugcuuccggcagagccgauacaaagauccuguuuaucgaggaaggaaaaauuguccacaucagccaacuuuccgggucugcgcagcauguugaggaauguagcugcuacccucgguaucccggagugcgcugugugugcagagacaacuggaagggcuccaaucggccuauugucgauaucaacgugaaggacuacagcauuguuucuuccuacguguguagcggccuggucggggauacaccccgcaaaaaugacucuagcuccucuagcaacugccucgacccgaauaacgaggaaggaggccacggggugaagggaugggccuucgaugacggcaaugauguuuggauggggagaaccaucuccgagaaacugcggagcggauaugagaccuuuaaggugaucggcggcuggucuaaaccuaacuccaagcugcagauuaaucgccaggucaucguggacagagggaaccggagcggauacucuggcauuuucuccgucgaagggaaaagcuguaucaauagaugcuuuuauguggagcucauucgcggacggaagcaagaaacggagguuugguggacauccaacucuaucguggucuucuguggcaccagcgggaccuacggcacaggauccuggcccgauggcgcugacauuaaucugaugccuaucuga

SEQ ID NO: 214011 - RNA, 1410 nt, Artificial Sequence; identical to SEQ ID NO: 207257
  derived and/or modified CDS sequence (opt5) from neuraminidase__InfluenzaA__AFG72452

SEQ ID NO: 214012 - RNA, 1410 nt, Artificial Sequence
  derived and/or modified CDS sequence (opt5) from neuraminidase__InfluenzaA__AFG72474
augaaccccaaucagaagaucauuaccaucggcagcgugucccugacaauugccacgaucugcuuccucaugcaaauugcuauccuggucaccacaguuacccuucacuuuaaacaguacgaguguaacucuccuccgaauaaccaggugaugcugugcgaacccacaaucauugagagaaauaucaccgaaauuguguaucucacaaacaccacgaucgagaaggaaauuuguccuaaacuggccgaguaccggaauuggagcaagccccagugcgagaucaccggguucgcgccuuuuuccaaagacaacucuauucgccuuagcgcuggaggcgauaucugggucacaagagaacccuauguguccugugacccugggaagugcuaccaauucgcccugggacagggcaccacacucaauaaccggcauucuaaugauaccguucacgaccgcacgccguauagaacacugcugaugaacgagcucggggugcccuuucaucugggaaccaagcaggucuguaucgccuggagcuccagcucuugccacgauggcaaggcuuggcuucauguguguguuacaggccacgacgaaaaugccaccgcuuccuucauuuacgaugggcggcugguggacagcaucggaucuugguccaaaaacauucuccgcacccaggagagcgagugcgucuguaucaauggcacaugcacgguggugaugaccgaugggucugccuccgaaagagcggacacaaaaauucuguuuaucgaggaaggaaagaucguccacauuagcccucuuuccggcucugcccaacauguugaggaaugcagcuguuauccccgguacccuggggugcgcugcguguguagagauaacuggaaaggauccaaccggcccaucgucgacauuaaugugaaggauuacagcaucguuucuuccuaugugugcagcggccuggucggcgacaccccgcgcaagaacgacucuagcuccucuagcuacuguagaaauccuaacaaugagaaagggucccacggagugaagggcugggcuuucgaugacgggaacgauguuuggaugggacggacaauuagcgaggaacuccgcucuggcuaugagaccuuuaaagugaucgggggaugguccaagcccaauagcaaacugcagaucaacagacaggucauuguggaccggggcaauagaucuggcuacuccgggaucuucagcgucgaaggaaaguccugcauuaaccgcuguuuuuauguggagcugauccggggcagaaaacaggaaacggagguuugguggacaucuaauagcauuguggucuucugcgggaccuccggaaccuacggcacagggucuuggccugauggcgccgacaucaaccucaugcccauuuga

SEQ ID NO: 214013 - RNA, 1410 nt, Artificial Sequence
  derived and/or modified CDS sequence (opt5) from neuraminidase__InfluenzaA__AFG72485
augaaccccaaucagaagaucauuaccaucggcagcgugucccugacaauugccacgaucugcuuccucaugcaaauugcuauccuggucaccacaguuacccuucacuuuaaacagcaugaguguaacucuccuccgaauaaccaggugaugcugugcgaacccacaaucauugagagaaauaucaccgaaauuguguaccucacaaacaccacgaucgagaaggaaauuuguccuaaacuggccgaguaucggaauuggagcaagccccagugcaaaaucaccggguucgcgccuuuuuccaaggacaacucuauucgccuuagcgcuggaggcgauaucugggucacaagagagcccuacguguccugugacccugggaagugcuaucaauucgcccugggacagggcaccacacucaauaaccggcacucuaaugauaccguucaugaccgcacgccguacagaacacugcugaugaacgaacucggggugcccuuucaccugggaaccaaacaggucuguaucgccuggagcuccagcucuugccaugauggcaaggcuuggcuucacguguguguuacaggccacgacgagaaugccaccgcuuccuucauuuaugaugggcggcugguggacagcaucggaucuugguccaaaaacauucuccgcacccaggaaagcgagugcgucuguaucaauggcacaugcacgguggugaugaccgaugggucugccuccgagagagcggacacaaagauucuguuuaucgaagagggaaaaaucguccauauuagcccucuuuccggcucugcccaacacguugaagagugcagcuguuacccccgguauccuggggugcgcugcguguguagagauaacuggaagggauccaaccggcccaucgucgacauuaaugugaaggauuacagcaucguuucuuccuacgugugcagcggccuggucggcgacaccccgcgcaaaaacgacucuagcuccucuagcuauuguagaaauccuaacaaugaaaaggggucccauggagugaaaggcugggcuuucgaugacgggaacgauguuuggaugggacggacaauuagcgaggagcuccgcucuggcuacgaaaccuuuaaggugaucgggggaugguccaaacccaauagcaagcugcagaucaacagacaggucauuguggaccggggcaauagaucuggcuauuccgggaucuucagcgucgagggaaaauccugcauuaaccgcuguuuuuacguggaacugauccggggcagaaagcaggagacggaaguuugguggacaucuaauagcauuguggucuucugcgggaccuccggaaccuauggcacagggucuuggccugauggcgccgacaucaaccucaugcccauuuga

SEQ ID NO: 214014 - RNA, 1410 nt, Artificial Sequence; identical to SEQ ID NO: 207173
  derived and/or modified CDS sequence (opt5) from neuraminidase__InfluenzaA__AFG72507

SEQ ID NO: 214015 - RNA, 1410 nt, Artificial Sequence
  derived and/or modified CDS sequence (opt5) from neuraminidase__InfluenzaA__AFG72529
augaaccccaaucagaagaucauuaccaucggcagcgugucccugacaauugccacgaucugcuuccucaugcaaauugcuauccuggucaccacaguuacccuucacuuuaaacaguacgaguguaacucuccuccgaauaaccaggugaugcugugcgaacccacaaucauugagagaaauaucaccgaaauuguguaucucacaaacaccacgaucgagaaggaaauuuguccuaaacuggccgaguaccggaauuggagcaagccccagugcaaaaucaccggguucgcgccuuuuuccaaggacaacucuauucgccuuagcgcuggaggcgauaucugggucacaagagagcccuauguguccugugacccugggaagugcuaccaauucgcccugggacagggcaccacacucaauaaccggcauucuaaugauaccguucacgaccgcacgccguauagaacacugcugaugaacgaacucggggugcccuuucaucugggaaccaaacaggucuguaucgccuggagcuccagcucuugccacgauggcaaggcuuggcuucauguguguguuacaggccacgacgagaaugccaccgcuuccuucauuuacgaugggcggcugguggacagcaucggaucuugguccaaaaagauucuccgcacccaggaaagcgagugcgucuguaucaacggcacaugcacgguggugaugaccgaugggucugccuccgagagagcggacacaaaaauucuguuuaucgaagagggaaagaucguccacauuagcccucuuuccggcucugcccaacauguugaagagugcagcuguuauccccgguacccuggggugcgcugcguguguagagauaauuggaagggauccaaccggcccaucgucgacauuaacgugaaagauuacagcaucguuucuuccuaugugugcagcggccuggucggcgacaccccgcgcaagaaugacucuagcuccucuagcuacugucagaacccuaauaacgaaaaugggucccacggagugaaaggcugggcuuucgaugacgggaacgauguuuggaugggaagaacaauuagcgaggagcuccggucuggcuaugaaaccuuuaaggugaucgggggaugguccaaacccaauagcaagcugcagaucaaccgccaggucauuguggacagaggcaaucggucuggcuacuccgggaucuucagcgucgagggaaaauccugcauuaacagauguuuuuauguggaacugauccgcggccggaagcaagagacggaaguuugguggacaucuaauagcauuguggucuucugcgggaccuccggaaccuacggcacagggucuuggccugauggcgccgacaucaaccucaugcccauuuga

SEQ ID NO: 214016 - RNA, 1410 nt, Artificial Sequence
  derived and/or modified CDS sequence (opt5) from neuraminidase__InfluenzaA__AFG72540
augaaccccaaucagaagaucauuaccaucggcagcgugucccugacaauugccacgaucugcuuccucaugcaaauugcuauccuggucaccacaguuacccuucacuuuaaacaguacgaguguaacccuccgcccaauaaccaggugaugcugugcgaaccuacaaucauugagagaaauaucaccgaaauuguguaucucacaaacaccacgaucaagaaagagauuugucccaagcuggccgaauaccggaauuggucuaaaccucagugcaagaucaccggguucgcgcccuuuagcaaggacaacuccauucgccuuucugcuggaggcgauaucugggucacaagagagccuuaugugagcugugacccggggaaaugcuaccaauucgcccugggacagggcaccacacucaauaaccggcauuccaaugauaccguucacgaccgcacgcccuauagaacacugcugaugaacgagcucggggugccuuuucaucugggaaccaagcaggucuguaucgccuggucuagcuccagcugccacgauggcaaggcuuggcuucauguguguguuacaggccacgacgaaaaugccaccgcuucuuucauuuacgaugggcggcugguggacuccaucggaagcuggucuaaaaacauucuccgcacccaggaguccgaaugcgucuguaucaauggcacaugcacgguggugaugaccgaugggagcgccucugagagagcggacacaaaaauucuguuuaucgaggaaggaaagaucguccacauuagcccccuuuccggcuccgcccaacauguugaggaaugcucuuguuauccucgguaccccggggugcgcugcguguguagagauaacuggaagggaagcaaccggccgaucgucgacauuaaugugaaagauuacuccaucguuagcucuuaugugugcuccggccuggucggcgacaccccucgcaagaacgacagcucuagcuccucuuacuguuggaaucccaacaaugagaaagggggacacggcgugaaggggugggcuuucgaugacggaaacgauguuuggaugggcagaacaauuagcgaggaacuccgguccggguaugagaccuuuaaagugaucggaggcuggagcaagccuaauucuaaacugcagaucaaccgccaggucauuguggacagaggcaaucgguccggguacagcggaaucuucucugucgaaggcaaguccugcauuaacagauguuuuuauguggagcugauccgcgggcggaagcaggaaacggagguuugguggacaagcaauuccauuguggucuucugcggaaccucuggcaccuacgggacaggcagcuggcccgauggagccgacaucaaccucaugcccauuuga

SEQ ID NO: 214017 - RNA, 1410 nt, Artificial Sequence
  derived and/or modified CDS sequence (opt5) from neuraminidase__InfluenzaA__AFG72562
augaaccccaaucagaagaucauuaccaucggcagcgugucccugacaauugccacgaucugcuuccucaugcaaauugcuauccuggucaccacaguuacccuucacuuuaaacaguacgaguguaacucuccuccgaauaaccaggugaugcugugcgaacccacaaucauugagagaaauaucaccgaaauuguguaucucacaaacaccacgaucgagaaggaaauuuguccuaaacuggccgaguaccggaauuggagcaagccccagugcaaaaucaccggguucgcgccuuuuuccaaggacaacucuauucgccuuagcgcuggaggcgauaucugggucacaagagagcccuauguguccugugacccugggaagugcuaccaauucgcccugggacagggcaccacacucaauaaccggcauucuaaugauaccguucacgaccgcacgccguauagaacacugcugaugaacgaacucggggugcccuuucaucugggaaccaaacaggucuguaucgccuggagcuccagcucuugccacgauggcaaggcuuggcuucauguguguguuacaggccacgacgagaaugccaccgcuuccuucauuuacgaugggcggcugguggacagcaucggaucuugguccaaaaacauucuccgcacccaggaaagcgagugcgucuguaucaauggcacaugcacgguggugaugaccgaugggucugccuccgagagagcggacacaaagauucuguuuaucgaagagggaaaaaucguccacauuagcccucuuuccggcucugcccaacauguugaagagugcagcuguuauccccgguacccuggggugcgcugcguguguagagauaacuggaagggauccaaccggcccaucgucgacauuaaugugaaggauuacagcaucguuucuuccuaugugugcagcggccuggucggcgacaccccgcgcaaaaacgacucuagcuccucuagcuacuguuggaauccuaacaaugaaaaagggggacacggcgugaaggggugggcuuucgaugacggaaacgauguuuggaugggcagaacaauuuccgaggagcuccggagcggguaugaaaccuuuaaggugaucggaggcuggucuaaacccaauuccaagcugcagaucaaccgccaggucauuguggacagaggcaaucggagcggguacucuggaaucuucuccgucgagggcaaaagcugcauuaacagauguuuuuauguggaacugauccgcgggcggaagcaggagacggaaguuugguggacauccaauucuauuguggucuucugcggaaccagcggcaccuacgggacaggcuccuggccugauggagccgacaucaaccucaugcccauuuga

SEQ ID NO: 214018 - RNA, 1410 nt, Artificial Sequence
  derived and/or modified CDS sequence (opt5) from neuraminidase__InfluenzaA__AFG72584
augaaccccaaucagaagaucauuaccaucggcagcgugucccugacaauugccacgaucugcuuccucaugcaaauugcuauccuggucaccacaguuacccuucacuuuaaacaguacgaguguaacucuccuccgaauaaccaggugaugcugugcgaacccacaaucauugagagaaauaucaccgaaauuguguaucucacaaacaccacgaucgagaaggaagucuguccuaaacuggccgaguaccggaauuggagcaagccccagugcaaaauuaccggguucgcgccuuuuuccaaggacaacucuauccgccuuagcgcuggaggcgauauuugggugacaagagagcccuauguuuccugugacccugggaagugcuaccaauucgcccugggacagggcaccacacucaauaacaaacauucuaaugauaccgugcacgaccggacgccguaucgcacacugcugaugaacgaacucgggguccccuuucaucugggaaccaaacagguguguaucgccuggagcuccagcucuugccacgauggcaaggcuuggcuucauguuugugugacaggccacgacgagaaugccaccgcuuccuucaucuacgaugggagacuggucgacagcauuggaucuugguccaagaacauccuccggacccaggaaagcgagugcguguguauuaauggcacaugcacgguggucaugaccgaugggucugccuccgagaaagcggacacaaagauccuguuuauugaagagggaaagaucguucacaucagcccucuuuccggcucugcccaacauguggaagagugcagcuguuauccccgcuacccuggggugagaugcgucugucgggauaacuggaaaggauccaaccgccccauuguggacaucaauguuaaggauuacagcauugugucuuccuaugucugcagcggccuggugggcgacaccccgagaaagaacgacucuagcuccucuagcuacuguuggaauccuaacaaugaaaaagggggacacggcguuaaagggugggcuuucgaugacggaaacgauguguggaugggccggacaaucuccgaggagcuccgcagcggguaugaaaccuuuaaggucauuggaggcuggucuaaacccaauuccaagcugcagaucaacagacaggugaucgucgaccggggcaaucgcagcggguacucuggaauuuucuccguggagggcaagagcugcaucaacagauguuuuuauguugaacugauucgggggagaaaacaggagacggaagugugguggacauccaauucuaucgucguguucugcggaaccagcggcaccuacgggacaggcuccuggccugauggagccgacauuaaccucaugcccaucuga

SEQ ID NO: 214019 - RNA, 1410 nt, Artificial Sequence
  derived and/or modified CDS sequence (opt5) from neuraminidase__InfluenzaA__AFG72606
augaaccccaaucagaagaucauuaccaucggcagcgugucccugacaauugccacgaucugcuuccucaugcaaauugcuauccuggucaccacaguuacccuucacuuuaaacaguacgaguguaacucuccuccgaauaaccaggugaugcugugcgaacccacaaucauugagagaaauaucaccgaaauuguguaucucacaaacaccacgaucgagaaggaaauuuguccuaaacuggccgaguaccggaauuggagcaagccccagugcaaaaucaccggguucgcgccuuuuuccaaggacaacucuauucgccuuagcgcuggaggcgauaucugggucacaagagagcccuauguguccugugacccugggaagugcuaccaauucgcccugggacagggcaccacacucaauaaccggcauucuaaugauaccguucacgaccgcacgccguauagaacacugcugaugaacgaacucggggugcccuuucaucugggaaccaaacaggucuguaucgccuggagcuccagcucuugccacgauggcaaggcuuggcuucauguguguguuacaggccacgacgagaaugccaccgcuuccuucauuuacgaugggcggcugguggacagcaucggaucuugguccaaaaacauucuccgcacccaggaaagcgagugcgucuguaucaauggcacaugcacgguggugaugaccgaugggucugccuccgagagagcggacacaaagauucuguuuaucgaagagggaaaaaucguccacauuagcccucuuuccggcucugcccaacauguugaagagugcagcuguuauccccgguacccuggggugcgcugcguguguagagauaacuggaagggauccaaccggcccaucgucgacauuaaugugaaggaucacagcaucguuucuuccuacgugugcagcggccuggucggcgacaccccgcgcaaaaacgacucuagcuccucuagcuauugucucaauccuaacaaugaagaagggggacauggcgugaaggggugggcuuucgaugacggaaacgauguuuggaugggcagaacaauuuccgagaaacugcggagcggguacgagaccuuuaaggugaucggaggcuggucuaaacccaauuccaagcugcagaucaaccgccaggucauuguggacagaggcaaucggagcggguauucuggaaucuucuccgucgagggcaaaagcugcgugaacagauguuuuuacguugaacucauucgcgggcggaagcaggagacggaagugugguggacauccaauucuaucgucguguucugcggaaccagcggcaccuaugggacaggcuccuggccugauggagccgacauuaaccugaugcccaucuga

SEQ ID NO: 214020 - RNA, 1410 nt, Artificial Sequence
  derived and/or modified CDS sequence (opt5) from neuraminidase__InfluenzaA__AFG72617
augaaccccaaucagaagaucauuaccaucggcagcgugucccugacaauuacgaccaucugcuuccucaugcaaauugccauccuggucaucacaguuacccuucacuuuaaacagugugagugcaacucuccuccgaauaaccaggugaugcugugugaacccacaauuaucgagagaaauauuaccgaaaucguguaccucacaaacaccacgauugagaaggaaaucugcccuaaacuggcugaguaucggaauuggagcaagccccaguguaaaauuaccggguucgccccuuuuuccaaggacaacucuauccgccuuagcgcgggaggcgauaucugggucacaagagagcccuacguguccugcgacccugggaaguguuaucaauucgcucugggacagggcaccacacucaauaaccggcauucuaaugauaccguucacgaccgcacgccguacagaacacugcugaugaacgaacucggggugcccuuucaucugggaaccaaacaggucugcauugccuggagcuccagcucuugucacgauggcaaggccuggcuucaugugugcguuacaggccacaaugagaacgcuaccgccuccuucaucuaugacgggcggcugguggauagcauuggaucuugguccaaaaauauccuccgcacccaggaaagcgagugugucugcauuaacggcacaugcacgguggugaugaccgacgggucugcuuccggcagagccgauacaaagauccuguuuaucgaggaaggaaaaauuguccacaucagcccucuuuccgggucugcgcaacauguugaggaauguagcugcuacccccgguauccuggagugcgcugugugugcagagacaacuggaagggcuccaaucggcccauugucgauaucaacgugaaggacuacagcauuguuucuuccuacguguguagcggccuggucggggauaccccgcgcaaaaaugacucuagcuccucuagcuauugccucaacccuaauaacgaggaaggaggccacggggugaagggaugggccuucgacgauggcaaugacguuuggauggggagaacaaucuccgagaaacugcggagcggauacgagaccuuuaaggugaucggcggcuggucuaaacccaacuccaagcugcagauuaaucgccaggucaucguggauagagggaaccggagcggauauucuggcauuuucuccgucgaagggaaaagcuguaucaauagaugcuuuuacguggagcucauucgcggacggaagcaggaaacggagguuugguggacauccaacucuaucguggucuucuguggcaccagcgggaccuauggcacaggauccuggccugacggcgcugauauuaaucugaugcccaucuga

SEQ ID NO: 214021 - RNA, 1410 nt, Artificial Sequence
  derived and/or modified CDS sequence (opt5) from neuraminidase__InfluenzaA__AFG72628
augaaccccaaucagaagaucauuaccaucggcagcgugucccugacaauugccacgaucugcuuccucaugcaaauugcuauccuggucaccacaguuacccuucacuuuaaacaguacgaguguaacucuccuccgaauaaccaggugaugcugugcgaacccacaaucauugagagaaauaucaccgaaauuguguaucucacaaacaccacgaucgagaaggaaauuuguccuaaacuggccgaguaccggaauuggagcaagccccagugcaaaaucaccggguucgcgccuuuuuccaaggacaacucuauucgccuuagcgcuggaggcgauaucugggucacaagagagcccuauguguccugugacccugauaagugcuaccaauucgcccuggggcagggaaccacacucaauaaccggcauucuaaugacaccguucacgaucgcacgccguauagaacacugcugaugaacgaacucggcgugcccuuucaucuggggaccaaacaggucuguaucgccuggagcuccagcucuugccacgacggaaaggcuuggcuucauguguguguuacaggccacgaugagaaugccaccgcuuccuucauuuacgacggccggcugguggauagcaucgggucuugguccaaaaagauucuccgcacccaggaaagcgagugcgucuguaucaacggaacaugcacgguggugaugaccgacggcucugccuccgggagagcggauacaaaaauucuguuuaucgaggaaggaaagaucguccacauuagcccucuuuccggcucugcccaacauguugaggaaugcagcuguuauccccgguacuccggggugcgcugcguguguagagacaauuggaagggaagcaaccggccuaucgucgauauuaacgugaaagacuacucuaucguuuccagcuaugugugcucuggccuggucggcgacacaccccgcaagaaugauagcuccucuagcucccacugucucaacccgaauaacgaggaagggggacauggcgugaaagggugggcuuucgacgauggaaaugacguuuggaugggcagaaccauuagcgagaagcugcggucuggguacgagaccuuuaaagugaucggaggcugguccaagccuaacagcaaacugcagaucaaucgccaggucauuguggauagaggcaaccggucuggguauuccggaaucuucagcgucgaaggcaaguccugcauuaauagauguuuuuacguggagcucauccgcgggcggaagcaggaaacggagguuugguggacaucuaacagcauuguggucuucugcggaaccuccggcaccuaugggacaggcucuuggcccgacggagccgauaucaaucugaugccuauuuga

SEQ ID NO: 214022 - RNA, 1410 nt, Artificial Sequence; identical to SEQ ID NO: 207052
  derived and/or modified CDS sequence (opt5) from neuraminidase__InfluenzaA__AFG72639

SEQ ID NO: 214023 - RNA, 1410 nt, Artificial Sequence
  derived and/or modified CDS sequence (opt5) from neuraminidase__InfluenzaA__AFG72650
augaaccccaaucagaagaucauuaccaucggcagcgugucccugacaauugccacgaucugcuuccucaugcaaauugcuauccuggucaccacaguuacccuucacuuuaaacaguacgaguguaacucuccuccgaauaaccaggugaugcugugcgaacccacaaucauugagagaaauaucaccgaaauuguguaucucacaaacaccacgaucgagaaggaaauuuguccuaaacuggccgaguaccggaauuggagcaagccccagugcaaaaucaccggguucgcgccuuuuuccaaggacaacucuauucgccuuagcgcuggaggcgauaucugggucacaagagagcccuauguguccugugacccugggaagugcuaccaauucgcccugggacagggcaccacacucaauaaccggcauucuaaugauaccguucacgaccgcacgccguauagaacacugcugaugaacgaacucggggugcccuuucaucugggaaccaaacaggucuguaucgccuggagcuccagcucuugccacgauggcaaggcuuggcuucauguguguguuacaggccacgacgagaaugccaccgcuuccuucauuuacgaugggcggcugguggacagcaucggaucuugguccaaaaacauucuccgcacccaggaaagcgagugcgucuguaucaauggcacaugcacgguggugaugaccgaugggucugccuccgagagagcggacacaaagauucuguuuaucgaagagggaaaaaucguccacauuagcccucuuuccggcucugcccaacauguugaagagugcagcuguuauccccgguacccuggggugcgcugcguguguagagauaacuggaagggauccaaccggcccaucgucgacauuaaugugaaggauuacagcaucguuucuuccuaugugugcagcggccuggucggcgacaccccgcgcaaaaacgacucuagcuccucuagcuacugucucaauccuaacaaugaagaagggggacacggcgugaaggggugggcuuucgaugacggaaacgauguuuggaugggcagaacaauuuccgagaaacugcggagcggguaugagaccuuuaaggugaucggaggcuggucuaaacccaauuccaagcugcagaucaaccgccaggucauuguggacagaggcaaucggagcggguacucuggaaucuucuccgucgagggcaaaagcugcgugaacagauguuuuuauguugaacucauucgcgggcggaagcaggagacggaagugugguggacauccaauucuaucgucguguucugcggaaccagcggcaccuacgggacaggcuccuggccugauggagccgacauuaaccugaugcccaucuga

SEQ ID NO: 214024 - RNA, 1410 nt, Artificial Sequence; identical to SEQ ID NO: 214021
  derived and/or modified CDS sequence (opt5) from neuraminidase__InfluenzaA__AFG72672

SEQ ID NO: 214025 - RNA, 1407 nt, Artificial Sequence
  derived and/or modified CDS sequence (opt5) from neuraminidase__InfluenzaA__AFG72683
augaaccccaaucagaagaucauuaccaucggcagcgugucccugacaauugccacgaucugcuuccucaugcaaauugcuauccuggucaucaccguuacacuucacuuuaaacaguacgaguguaacucuccuccgaauaaccaggugaugcugugcgaacccaccauuaucgagagaaauauuacagaaaucguguaucucaccaacacaaccauugagaaggaaaucuguccuaaacuggccgaguaccggaauuggagcaagccccagugcaaaauuacgggguucgcgccuuuuuccaaggacaacucuauccgccuuagcgcuggaggcgauaucugggucaccagagagcccuauguguccugugacccugggaagugcuaccaauucgcccugggacagggcacaacccucaauaaccggcauucuaaugaaguucacgaucgcacaccguauagaacccugcugaugaacgagcucggggugcccuuucaucugggaacgaaacaggucuguauugccuggagcuccagcucuugccacgacggcaaggcuuggcuucauguguguguuacaggccacaaugaaaacgccaccgcuuccuucaucuacgaugggcggcugguggacagcauuggaucuugguccaaaaauauccuccgcacacaggagagcgagugcgucuguauuaacggaaccugcaccguggugaugacagaugggucugccuccggcagagcggacacgaagauccuguuuaucgaagagggcaaaauuguccacaucagcccucuuuccgggucugcccaacauguugaagagugcagcuguuauccccgguacccuggagugcgcugcguguguagagauaacuggaagggcuccaaucggcccauugucgacaucaacgugaaggauuacagcauuguuucuuccuaugugugcagcggccuggucggggacaccccgcgcaaaaaugauucuagcuccucuagccacugucucaacccuaauaacgaagagggaggccauggggugaagggaugggcuuucgacgacggcaaugauguuuggauggggagaacaaucuccgagaaacugcggagcggauacgaaaccuuuaaggugaucggcggcuggucuaaacccaacuccaagcugcagauuaaucgccaggucaucguggacagagggaaccggagcggauauucuggcauuuucuccgucgaggggaaaagcugcaucaauagauguuuuuacguggaacucauucgcggacggaagcaggagacagaaguuugguggaccuccaacucuaucguggucuucugcggcacgagcgggacauauggcaccggauccuggccugauggcgccgacauuaaucugaugcccaucuga

SEQ ID NO: 214026 - RNA, 1410 nt, Artificial Sequence
  derived and/or modified CDS sequence (opt5) from neuraminidase__InfluenzaA__AFG72705
augaaccccaaucagaagaucauuaccaucggcagcgugucccugacaauugccacgaucugcuuccucaugcaaauugcuauccuggucaccacaguuacccuucacuuuaaacaguacgaguguaacucuccuccgaauaaccaggugaugcugugcgaacccacaaucauugagagaaauaucaccgaaauuguguaucucacaaacaccacgaucgagaaggaaauuuguccuaaacuggccgaguaccggaauuggagcaagccccagugcaaaaucaccggguucgcgccuuuuuccaaggacaacucuauucgccuuagcgcuggaggcgauaucugggucacaagagagcccuauguguccugugacccugauaagugcuaccaauucgcccuggggcagggaaccacacucaauaaccggcauucuaaugacaccguucacgaucgcacgccguauagaacacugcugaugaacgaacucggcgugcccuuucaucuggggaccaaacaggucuguaucgccuggagcuccagcucuugccacgacggaaaggcuuggcuucauguguguguuacaggccacgaugagaaugccaccgcuuccuucauuuacgacggccggcugguggauagcaucgggucuugguccaaaaagauucuccgcacccaggaaagcgagugcgucuguaucaacggaacaugcacgguggugaugaccgacggcucugccuccgggagagcggauacaaaaauucuguuuaucgaggaaggaaagaucguccacauuagccaacuuuccggcucugcccagcauguugaggaaugcagcuguuauccucgguaccccggggugcgcugcguguguagagacaauuggaagggauccaaccggccuaucgucgauauuaacgugaaagaccacagcaucguuucuuccuacgugugcagcggccuggucggcgacacaccccgcaagaaugauucuagcuccucuagccauugucucaacccgaauaacgaggaagggggacacggcgugaaagggugggcuuucgacgauggaaaugacguuuggaugggcagaaccauuuccgagaagcugcggagcggguaugagaccuuuaaagugaucgaaggauggucuaagccuaacuccaaacugcagaucaaucgccaggucauuguggauagaggcaaccggagcggcuacucugggaucuucuccgucgagggaaagagcugcauuaauagauguuuuuauguggaacucauccgcggccggaagcaagagacggaaguuugguggacauccaacucuauuguggucuucugcgggaccagcggaaccuacggcacaggguccuggcccgacggcgccgauaucaaucugaugccuauuuga

SEQ ID NO: 214027 - RNA, 1410 nt, Artificial Sequence
  derived and/or modified CDS sequence (opt5) from neuraminidase__InfluenzaA__AFG72716
augaaccccaaucagaagaucauuaccaucggcagcgugucccugacaauuacgaccaucugcuuccucaugcaaauugccauccuggucaucacaguuacccuucacuuuaaacagugugagugcaacucuccuccgaauaaccaggugaugcugugugaacccacaauuaucgagagaaauauuaccgaaaucguguaccucacaaacaccacgauugagaaggaaaucugcccuaaacuggcugaguaucggaauuggagcaagccccaguguaaaauuaccggguucgccccuuuuuccaaggacaacucuauccgccuuagcgcgggaggcgauaucugggucacaagagagcccuacguguccugcgacccugggaaguguuaucaauucgcucugggacagggcaccacacucaauaaccggcauucuaaugauaccguucacgaccgcacgccguacagaacacugcugaugaacgaacucggggugcccuuucaucugggaaccaaacaggucugcauugccuggagcuccagcucuugucacgauggcaaggccuggcuucaugugugcguuacaggccacaaugagaacgcuaccgccuccuucaucuaugacgggcggcugguggauagcauuggaucuugguccaaaaauauccuccgcacccaggaaagcgagugugucugcauuaacggcacaugcacgguggugaugaccgacgggucugcuuccggcagagccgauacaaagauccuguuuaucgaggaaggaaaaauuguccacaucagcccucuuuccgggucugcgcaacauguugaggaauguagcugcuacccccgguauccuggagugcgcugugugugcagagacaacuggaagggcuccaaucggcccauugucgauaucaacgugaaggacuacagcauuguuucuuccuacguguguagcggccuggucggggauaccccgcgcaaaaaugacucuagcuccucuagcuauugccucgacccuaacaaugaggaaggaggccacggggugaagggaugggccuucgaugacggcaacgauguuuggauggggagaacaaucuccgagaaaagccggucuggauacgagaccuuuaaggugaucggcggcugguccaaacccaauagcaagcugcagauuaaccgccaggucaucguggacagagggaaucggucuggauauuccggcauuuucagcgucgaagggaaauccuguaucaacagaugcuuuuacguggagcugauucgcggacggagacaggaaacggagguuugguggacaucuaauagcaucguggucuucuguggcaccuccgggaccuauggcacaggaucuuggccugauggcgcugacauuaaccucaugcccaucuga

SEQ ID NO: 214028 - RNA, 1410 nt, Artificial Sequence
  derived and/or modified CDS sequence (opt5) from neuraminidase__InfluenzaA__AFG72738
augaaccccaaucagaagaucauuaccaucggcagcgugucccugacaauuacgaccaucugcuuccucaugcaaauugccauccuggucaucacaguuacccuucacuuuaaacagugugagugcaacucuccuccgaauaaccaggugaugcugugugaacccacaauuaucgagagaaauauuaccgaaaucguguaccucacaaacaccacgauugagaaggaaaucugcccuaaacuggcugaguaucggaauuggagcaagccccaguguaaaauuaccggguucgccccuuuuuccaaggacaacucuauccgccuuagcgcgggaggcgauaucugggucacaagagagcccuacguguccugcgacccugggaaguguuaucaauucgcucugggacagggcaccacacucaauaaccggcauucuaaugauaccguucacgaccgcacgccguacagaacacugcugaugaacgaacucggggugcccuuucaucugggaaccaaacaggucugcauugccuggagcuccagcucuugucacgauggcaaggccuggcuucaugugugcguuacaggccacaaugagaacgcuaccgccuccuucaucuaugacgggcggcugguggauagcauuggaucuugguccaaaaauauccuccgcacccaggaaagcgagugugucugcauuaacggcacaugcacgguggugaugaccgacgggucugcuuccggcagagccgauacaaagauccuguuuaucgaggaaggaaaaauuguccacaucagccaacuuuccgggucugcgcagcauguugaggaauguagcugcuacccucgguaucccggagugcgcugugugugcagagacaacuggaagggcuccaaucggccuauugucgauaucaacgugaaggacuacagcauuguuucuuccuacguguguagcggccuggucggggauacaccccgcaaaaaugacucuagcuccucuagcuauugccucgacccgaacaaugaggaaggaggccacggggugaagggaugggccuucgaugacggcaacgauguuuggauggggagaaccaucuccgagaaacugcggagcggauacgagaccuuuaaggugaucggcggcuggucuaaaccuaauuccaagcugcagauuaaccgccaggucaucguggacagagggaaucggagcggauauucuggcauuuucuccgucgaagggaaaagcuguaucaacagaugcuuuuacguggagcucauucgcggacggaagcaagaaacggagguuugguggacauccaauucuaucguggucuucuguggcaccagcgggaccuauggcacaggauccuggcccgauggcgcugacauuaaccugaugccuaucuga

SEQ ID NO: 214029 - RNA, 1410 nt, Artificial Sequence; identical to SEQ ID NO: 207257
  derived and/or modified CDS sequence (opt5) from neuraminidase__InfluenzaA__AFG72749

SEQ ID NO: 214030 - RNA, 1410 nt, Artificial Sequence; identical to SEQ ID NO: 206645
  derived and/or modified CDS sequence (opt5) from neuraminidase__InfluenzaA__AFG72760

SEQ ID NO: 214031 - RNA, 1410 nt, Artificial Sequence; identical to SEQ ID NO: 206112
  derived and/or modified CDS sequence (opt5) from neuraminidase__InfluenzaA__AFG72771

SEQ ID NO: 214032 - RNA, 1410 nt, Artificial Sequence
  derived and/or modified CDS sequence (opt5) from neuraminidase__InfluenzaA__AFG72782
augaaccccaaucagaagaucauuaccaucggcagcgugucccugacaauugccacgaucugcuuccucaugcaaauugcuauccuggucaccacaguuacccuucacuuuaaacaguacgaguguaacucucugccuaauaaccaggugaugcucugcgaaccgacaaucauugagagaaauaucaccgaaauuguguaucugacaaacaccacgaucgagaaggaaauuugucccaaacuugccgaguaccggaauuggagcaagccucagugcaaaaucaccggguucgcgcccuuuuccaaggacaacucuauucgccugagcgcuggaggcgauaucugggucacaagagagccuuauguguccugugaccccgauaagugcuaccaauucgcccucgggcagggaaccacacugaauaaccggcauucuaaugacaccguucacgaucgcacgccuuauagaacacugcucaugaacgaacugggcgugccguuucaucuugggaccaaacaggucuguaucgccuggagcuccagcucuugccacgacggaaaggcuuggcugcauguguguguuacaggccacgaugagaaugccaccgcuuccuucauuuacgacggccggcucguggauagcaucgggucuugguccaaaaagauucugcgcacccaggaaagcgagugcgucuguaucaacggaacaugcacgguggugaugaccgacggcucugccuccgggagagcggauacaaaaauucuuuuuaucgaggaaggaaagaucauucacaccagccaacuguccggcucugcccagcaugucgaggaaugcagcuguuauccccgguacccugggguucgcugcguguguagagacaauuggaagggauccaaccggcccaucguggauauuaacgucaaagacuacagcaucgugucuuccuauguuugcagcggccucgugggcgacacaccucgcaagaaugauucuagcuccucuagccacugucugaaccccaauaacgaggaagggggacauggcgucaaagggugggcuuucgacgauggaaaugacguguggaugggcagaaccauuuccgagaaguuucggagcggguacgagacguucaaaguuaucgaaggauggucuaagccgaacuccaaacugcagaucaaucgccaggugauugucgauagagacaaccggagcggcuauucuggcaucuuuuccguggagggaaagagcugcauuaauagauguuucuacgucgaacucauccgcgggcggaagcaagagacagaagugugguggaccuccaacucuauuguuguguuuugcggcaccagcgggacauauggaaccggcuccuggccugauggggccgacaucaaucugaugcccauuuga

SEQ ID NO: 214033 - RNA, 1410 nt, Artificial Sequence; identical to SEQ ID NO: 207821
  derived and/or modified CDS sequence (opt5) from neuraminidase__InfluenzaA__AFG72793

SEQ ID NO: 214034 - RNA, 1410 nt, Artificial Sequence; identical to SEQ ID NO: 206356
  derived and/or modified CDS sequence (opt5) from neuraminidase__InfluenzaA__AFG72804

SEQ ID NO: 214035 - RNA, 1410 nt, Artificial Sequence; identical to SEQ ID NO: 208001
  derived and/or modified CDS sequence (opt5) from neuraminidase__InfluenzaA__AFG72826

SEQ ID NO: 214036 - RNA, 1410 nt, Artificial Sequence
  derived and/or modified CDS sequence (opt5) from neuraminidase__InfluenzaA__AFG72837
augaaccccaaucagaagaucauuaccaucggcagcgugucccugacaauugccacgaucugcuuccucaugcaaauugcuauccuggucaccacaguuacccuucacuuuaaacaguacgaguguaacucuccuccgaauaaccaggugaugcugugcgaacccacaaucauugagagaaauaucaccgaaauuguguaucucacaaacaccacgaucgagaaggaaauuuguccuaaacuggccgaguaccggaauuggagcaagccccagugcaacaucaccggguucgcgccuuuuuccaaagacaauucuauucgccuuagcgcuggaggcgauaucugggucacaagagagcccuauguguccugugacccugauaagugcuaccaauucgcccuggggcagggaaccacacucaacaauggccauucuaacgacaccguucacgaacggacgccguaucgcacacugcugaugaaugagcucggggugcccuuucaucugggaaccaagcaggucuguaucgccuggagcuccagcucuugccacgauggcaaagccuggcuucauguguguguuacaggcgacgaugaaaacgcuaccgcuuccuucauuuacaaugggagacugguggacagcaucggaucuugguccaagaaaauucuccggacccaggagagcgagugcgucuguaucaacggcacaugcacgguggugaugaccgaugggucugccuccggaaaggcggacacaaaaauucuguuuaucgaagagggcaagaucguccacauuagcacccuuuccgggucugcccaacacguugaagagugcagcuguuauccucgcuaccccggagugagaugcgugugucgggauaacuggaagggcuccaaucgcccuaucgucgacauuaacgugaaagauuacagcaucguuucuuccuaugugugcagcggccuggucggggacacacccagaaagaaugacucuuucagcuccucucauugucucgauccgaacaaugaagagggaggccacggggugaaaggaugggcuuuugacgauggcaacgacguuuggauggggcggaccauuagcgagaagcugcgcuccggauacgaaacguucaaagugaucgagggcuggagcaagccuaauucuaaacugcagaucaacagacaggucauuguggaacggggcaaucgcuccggguauagcggaaucuuuucugucgagggcaaguccugcauuaacagauguuucuacguggaacucauccgggggagaaaggaggagacagaaguuugguggaccagcaauuccauuguggucuuuugcggaaccucuggcacauaugggaccggcagcuggcccgauggagccgacaucaaccugaugccuauuuga

SEQ ID NO: 214037 - RNA, 1413 nt, Artificial Sequence
  derived and/or modified CDS sequence (opt5) from neuraminidase__InfluenzaA__AFG72848
augaaccccaaucagaagaucauuaccaucggcagcgugucccugacaauugccacgaucugcuuccucaugcaaauugcuauccuggucaccacaguuacccuucacuuuaaacaguacgaguguaacucuccuccgaauaaccaggugaugcugugcgaacccacaaucauugagagaaauaucaccgaaauuguguaucucacaaacaccacgaucgagaaggaaauuuguccuaaaagcgccgaguaccggaauugguccaagccccagugcaacaucaccggguucgcgccuuuuucuaaagacaauagcauucgccuguccgcuggaggcgauaucugggucacaagagagcccuaugugucuugugacccugauaagugcuaccaauucgcccuugggcagggaaccacacugaacaauggccauagcaacgacaccguucacgaucggacgccguaucgcacacuccugaugaaugaacugggggugcccuuucaucucggaaccagacaggucuguaucgccugguccucuagcuccugccacgacggcaaggcuuggcugcauguguguguuacaggcgaugacaaaaacgccaccgcuagcuucauuuacaaugggcggcuuguggauucuaucggauccuggagcaagaaauauauucugcgcacccaggagucugaaugcgucuguaucaacggcacaugcacgguggugaugaccgacggguccgccagcggaaaggcggauacaaaaauucucuuuaucgaggagggcaagaucauucacaucuccacccugucugggagcgcccaacacgucgaagagugcuccuguuacccuagauaccccggaguucggugcgugugucgcgacaacuggaagggcagcaauagaccuauuguggauaucaacgucaaagacuauucuauuguguccagcuacguuugcucuggccuugugggggacacaccccggaagaaugauagcuccucuagcucccauugucuggacccgaacaaugaagagggaggccacggggucaaaggaugggcuuucgaugacggcaacgauguguggauggggcgcaccaucagcgaaaagcucagaucuggauaugagacguuuaaaguuaucgagggcugguccaagccuaauagcaaacugcagauuaaccgccaggugaucgucgaacggggcaauagaucuggguacuccggaauuuucagcguggagggcaaguccugcaucaaccgguguuuuuaugucgaacugauuagagggcgcaaggaggaaacagaggugugguggaccucuaauagcaucguuguguucugcggaaccuccggcacauacgggaccggcucuuggcccgacggagccgauauuaaccucaugccuaucuga

SEQ ID NO: 214038 - RNA, 1410 nt, Artificial Sequence
  derived and/or modified CDS sequence (opt5) from neuraminidase__InfluenzaA__AFG72859
augaaccccaaucagaagaucauuaccaucggcagcgugucccugacaauuucuacgaucugcuucuuuaugcaaauugccauccucaucaccacagucacccugcacuucaaacaguacgaguuuaacagcccuccgaauaaccagguuaugcuuugugaacccacaauuaucgagagaaauauuaccgaaaucguguaucugacaaacaccacgauugagaaggaaaucugcccuaaacucgcugaguaccggaauugguccaagccccaguguaacauuaccggguucgccccuuuuucuaaagacaauagcauccgccuguccgcgggaggcgauaucugggugacaagagagcccuaugucucuugcgacccugauaaguguuaccaauucgcucuugggcagggaaccacacugaacaaugugcauagcaacgacauuguucacgaucggaccccguaucgcacgcuccugaugaaugaacugggcgugcccuuucaucucgggacaaagcaggucugcaucgccugguccucuagcuccugucacgacggaaaagccuggcugcaugugugcguuaccggcgaugacgagaacgcuacagccagcuucauuuacaauggcagacuuguggauucuaucgucuccuggagcaagaaaauucugcggacccaggaaucugagugugugugcaucaacgggaccuguacaguggucaugacggacggauccgcuagcggcaaggccgauaccaaaauccucuuuauugaggaagggaagaucguucacacauccacccugucuggaagcgcgcaacacguggaggaaugcuccugcuauccucgcuaccccggcgugagaugugucugccgggacaacuggaaggggagcaaucgcccuauuguggauaucaacauuaaagacuacucuaucguuuccagcuauguguguucuggacuugucggcgacacacccagaaagaaugauagcuccucuagcucccauugccuggacccgaacaaugaggaaggcgggcacggagugaaaggcugggccuucgaugacgggaacgauguuuggaugggacggaccaucagcgagaagcuccgcucuggcuacgagacguuuaaagugauugaagggugguccaauccuaacagcaagcugcagaucaauagacaggucauuguggaccggggaaaccgcucuggcuauuccggcaucuucagcgucgaggggaaauccuguauuaauagaugcuuuuacguggaacugauccggggaagaaagcaggagacagaaguucucuggaccucuaacagcauuguggucuucuguggcaccuccgggacauauggaaccggcucuuggcccgauggggcugacaucaaucugaugccuaucuga

SEQ ID NO: 214039 - RNA, 1410 nt, Artificial Sequence
  derived and/or modified CDS sequence (opt5) from neuraminidase__InfluenzaA__AFG72870
augaaccccaaucagaagaucauuaccaucggcagcgugucccugacaauugccacgaucugcuuccucaugcaaauugcuauccuggucaccacaguuacccuucacuuuaaacaguacgaguguaacucuccuccgaauaaccaggugaugcugugcgaacccacaaucauugagagaaauaucaccgaaauuguguaucucacaaacaccacgaucgagaaggaaauuuguccuaaacuggccgaguaccggaauuggagcaagccccagugcaacaucaccggguucgcgccuuuuuccaaagacaauucuauucgccuuagcgcuggaggcgauaucugggucacaagagagcccuauguguccugugacccugauaagugcuaccaauucgcccuggggcagggaaccacacucaacaauggccauucuaacgacaccguucacgaucggacgccguaucgcacacugcugaugaaugaacucggggugcccuuucaucugggaaccaagcaggucuguaucgccuggagcuccagcucuugccacgacggcaaagccuggcuucauguguguguuacaggcgaugacgagaacgcuaccgcuuccuucauuuacaaugggagacugguggauagcaucggaucuugguccaagaaaauucuccggacccaggaaagcgagugcgucuguaucaacggcacaugcacgguggugaugaccgacgggucuacauccggaaaggccgauaccaaaauucuguuuaucgaggaaggcaagaucguccacauuagcacacuuuccgggucugcgcaacacguugaggaaugcagcuguuauccucgcuaccccggagugagaugcgugugucgggacaacuggaagggcuccaaucgcccuaucgucgauauuaacgugaaagacuacagcaucguuucuuccuaugugugcagcggccuggucggggacacccccagaaagaaugauucuuucagcuccucucauugucucgacccgaacaaugaggaaggaggccacggggugaaaggaugggccuuugaugacggcaacgauguuuggauggggcggacgauuagcgagaagcugcgcuccggauacgagacauucaaagugaucgaaggcuggagcaagccuaauucuaaacugcagaucaacagacaggucauuguggagcggggcaaucgcuccggguauagcggaaucuuuucugucgaauccaagagcugcauuaacagauguuucuacguggagcucauccggggcagaaaggaagagaccgagguuugguggaccuccaauucuauuguggucuuuugcgggacaagcggaaccuauggcacaggguccuggcccgacggcgcugauaucaaccugaugccuauuuga

SEQ ID NO: 214040 - RNA, 1410 nt, Artificial Sequence
  derived and/or modified CDS sequence (opt5) from neuraminidase__InfluenzaA__AFG72892
augaaccccaaucagaagaucauuaccaucggcagcgugucccugacaauuucuacgaucugcuucuuuaugcaaauugccauccucaucaccacagucacccugcacuucaaacaguacgaguuuaacagcccuccgaauaaccagguuaugcuuugugaacccacaauuaucgagagaaauauuaccgaaaucguguaucugacaaacaccacgauugagaaggaaaucugcccuaaacucgcugaguaccggaauugguccaagccccagugugacauuaccggguucgccccuuuuucuaaagauaacagcauccgccuguccgcgggaggcgacaucugggugacaagagagcccuaugucucuugcgauccugacaaguguuaccaauucgcucuugggcagggaaccacacugaauaacgugcauagcaaugauaccguucacgaccggacgccguaucgcacacuccugaugaacgaacugggcgugcccuuucaucucgggaccaagcaggucugcauugccugguccucuagcuccugucacgauggaaaagccuggcugcaugugugcguuacaggcgacgauaagaaugcuaccgccagcuucaucuacaacggcagacuuguggacucuauugucuccuggagcaaagagauccugcggacccaggaaucugagugugugugcauuaaugggacauguacgguggucaugaccgauggauccgcuagcggcaaggccgacacaaaaauccucuuuaucgaggaagggaagauuguucacaccuccacacugucuggaagcgcgcaacacguggaggaaugcuccugcuauccucgcuaccccggcgugagaugugucugccgggauaacuggaaggggagcaaccgcccuaucguggacauuaauaucaaagacuacucuauuguuuccagcuauguguguucuggacuugucggcgauacccccagaaagaacgacagcuccucuagcucccauugccuggauccgaauaacgaggaaggcgggcacggagugaaaggcugggccuucgacgaugggaaugacguuuggaugggacggacgaucagcgagaagcuccgcucuggcuacgagacauuuaaagugaucgaagggugguccaacccuaauagcaagcugcagauuaacagacaggucaucguggaucggggaaaucgcucuggcuauuccggcauuuucagcgucgaggggaaauccuguaucaacagaugcuuuuacguggaacugauucggggaagaaaggagaagaccgaaguucucuggaccucuaauagcaucguggucuucuguggcacauccgggaccuauggaacaggcucuuggcccgacggggcugauauuaaccugaugccuaucuga

SEQ ID NO: 214041 - RNA, 1410 nt, Artificial Sequence
  derived and/or modified CDS sequence (opt5) from neuraminidase__InfluenzaA__AFG72903
augaaccccaaucagaagaucauuaccaucggcagcgugucccugacaauuucuacgaucugcuucuuuaugcaaauugccauccucaucaccacagucacccugcacuucaaacaguacgaguuuaacagcccuccgaauaaccagguuaugcuuugugaacccacaauuaucgagagaaauauuaccgaaaucguguaucugacaaacaccacgauugagaaggaaaucugcccuaaacucgcugaguaccggaauugguccaagccccaguguaacauuaccggguucgccccuuuuucuaaagacaauagcauccgccuguccgcgggaggcgauaucugggugacaagagagcccuaugucucuugcgacccugauaaguguuaccaauucgcucuugggcagggaaccacacugaacaaugugcauagcaacgacaccguucacgaucggacgccguaucgcacacuccugaugaaugaacugggcgugcccuuucaucucgggaccaagcaggucugcauugccugguccucuagcuccugucacgacggaaaagccuggcugcaugugugcguuacaggcgaugacaagaacgcuaccgccagcuucaucuacaauggcagacuuguggauucuauugucuccuggagcaaagagauccugcggacccaggaaucugagugugugugcauuaacgggacauguacgguggucaugaccgacggauccgcuagcggcaaggccgauacaaaaauccucuuuaucgaggaagggaagauuguucacaccuccacacugucuggaagcgcgcaacacguggaggaaugcuccugcuauccucgcuaccccggcgugagaugugucugccgggacaacuggaaggggagcaaucgcccuaucguggauauuaacaucaaagacuacucuauuguuuccagcuauguguguucuggacuugucggcgacacccccagaaagaaagauagcuccucuagcucccauugccuggacccgaauaacgaggaaggcgggcacggagugaagggcugggccuucgaugacgggaaugauguuuggaugggacggacgaucagcgagaaacuccgcucuggcuacgagacauuuaaggugaucgaagggugguccaacccuaauagcaaacugcagauuaacagacaggucaucguggaccggggagaucgcucuggcuauuccggcauuuucagcgucgaggggaaguccuguaucaauagaugcuuuuacguggaacugauucggggaagaaaggaggaaaccgagguucucuggaccucuaacagcaucguggucuucuguggcacauccgggaccuauggaacaggcucuuggcccgacggggcugauauuaaucugaugccuaucuga

SEQ ID NO: 214042 - RNA, 1410 nt, Artificial Sequence
  derived and/or modified CDS sequence (opt5) from neuraminidase__InfluenzaA__AFG72936
augaaccccaaucagaagaucauuaccaucggcagcgugucccugacaauuucuacgaucugcuucuuuauucaaaucgccauccucauuaccacagucacccugcacuucaaacaguacgaguuuaacagcccuccgaauaaccagguuaugcuuugugaacccacaaucauugagagaaauaucaccgaaauuguguaucugacaaacaccacgaucgagaaggaaauuugcccuaaacucgcugaguaccggaauugguccaagccccagugugacaucaccggguucgccccuuuuucuaaagauaacagcauccgccuguccgcgggaggcgacauuugggugacaagagagcccuaugucucuugcgauccugacaaguguuaccaauucgcucuugggcagggaaccacacugaauaacgugcauagcaauaacaucguucgggaucgcaccccguauagaacgcuccugaugaaugaacugggcgugcccuuucaccucgggacaaagcaggucugcauugccugguccucuagcuccugucaugacggaaaagccuggcugcacgugugcaucaccggcgaugacaagaacgcuacagccagcuucauuuacaauggccggcuuguugauucuguggucuccuggagcaaagagauccugcgcacccaggaaucugagugugugugcaucaacgggaccuguacaguggucaugacggacggauccgcuagcggcaaggccgauaccaaaauucucuuuaucgaggaagggaagauuguucauacauccacccugucuggaagcgcgcaacacguggaggaaugcuccugcuauccuagauaccccggcgugcggugugucugccgcgacaacuggaaggggagcaauagaccuaucguggauauuaacaucaaagaccacucuaucguuuccagcuacguguguucuggacuugucggcgacacaccccggaagaaugauagcuccucuagcucccauugccuggacccgaacaaugaggaaggcgggcacggagugaaaggcugggccuucgaugacgggaacgauguuuggaugggacgcaccauuagcgagaagucuagacucggcuaugagacguuuaaagugaucgaagggugguccaaucauaagagcaaacugcagauuaaccggcaggucaucguggaccgcggaaauagaucuggcuacuccggcauuuucagcgucgaggggaaguccuguaucaaccggugcuuuuauguggaacugauuagaggacgcaaggaggaaacagagguucucuggaccucuaauagcaucguggucuucuguggcaccuccgggacauacggaaccggcucuuggccugauggggcugaccugaaccuuaugcccaucuga

SEQ ID NO: 214043 - RNA, 1410 nt, Artificial Sequence
  derived and/or modified CDS sequence (opt5) from neuraminidase__InfluenzaA__AFG72958
augaaccccaaucagaagaucauuaccaucggcagcgugucccugacaauuucuacgaucugcuucuuuaugcaaauugccauccucaucaccacagucacccugcacuucaaacaguacgaguuuaacagcccuccgaauaaccagguuaugcuuugugaacccacaauuaucgagagaaauauuaccgaaaucguguaucugacaaacaccacgauugagaaggaaaucugcccuaaacucgcugaguaccggaauugguccaagccccagugugacauuaccggguucgccccuuuuucuaaagauaacagcauccgccuguccgcgggaggcgacaucugggugacaagagagcccuaugucucuugcgauccugacaaguguuaccaauucgcucuugggcagggaaccacacugaauaacgugcauagcaauaacauuguucgggaucgcaccccguauagaacgcuccugaugaaugaacugggcgugcccuuucaccucgggacaaagcaggucugcaucgccugguccucuagcuccugucaugacggaaaagccuggcugcacgugugcauuaccggcgaugacaagaacgcuacagccagcuucaucuacaauggccggcuuguugauucuguggucuccuggagcaaagagauucugcgcacccaggaaucugagugugugugcaucaacgggaccuguacaguggucaugacggacggauccgcuagcggcaaggccgauaccaaaauccucuuuauugaggaagggaagaucguucauacauccacccugucuggaagcgcgcaacacguggaggaaugcuccugcuauccuagauaccccggcgugcggugugucugccgcgacaacuggaaggggagcaauagaccuauuguggauaucaacauuaaagaccacucuaucguuuccagcuacguguguucuggacuugucggcgacacaccccggaagaaugauagcuccucuagcucccauugccuggacccgaacaaugaggaaggcgggcacggagugaaaggcugggccuucgaugacgggaacgauguuuggaugggacgcaccaucaaugagacgagcagacucggcuaugagacauuuaaggugauugaaggguggucuaacccuaaauccaagcugcagaucaaucggcaggucauuguggaccgcggaaacagaagcggcuacucuggcaucuucuccgucgaggggaaaagcuguauuaaucggugcuuuuauguggaacugaucagaggacgcaaggaggaaaccgagguucucuggaccuccaacucuauuguggucuucuguggcacaagcgggaccuacggaacaggcuccuggcccgauggggcugaccugaaucuuaugccuaucuga

SEQ ID NO: 214044 - RNA, 1410 nt, Artificial Sequence; identical to SEQ ID NO: 206175
  derived and/or modified CDS sequence (opt5) from neuraminidase__InfluenzaA__AFG98811

SEQ ID NO: 214045 - RNA, 1410 nt, Artificial Sequence
  derived and/or modified CDS sequence (opt5) from neuraminidase__InfluenzaA__AFG98822
augaaccccaaucagaagaucauuaccaucggcagcgugucccugauuaucgccacagucugcuuccucaugcaaauugcuauccugguuacgaccgugacacuucacuuuaaacagcaugagugugacucuccuagcuccaaccaggugaugcugugcgaaccgaucauuaucgagagaaauauuaccgaaaucgucuaccucaacaauacaaccauugagaaggaaacaugucccaaacugguggaguaucggaacuggucuaagccucagugcaaaaucaccggguucgcccccuuuagcaaggauaauuccauucgccuuucugcgggaggcgacaucuggguuacgagagagccuuacgugagcugugaucccgggaagugcuaucaauucgcucugggacagggcaccacacucgacaacaaacacuccaaugauaccauccaugaccggauuccucaccgcacacugcugaugaacgaacucggggucccguuucaucugggaaccagacagguguguaucgccuggucuagcuccagcugccacgauggcaaggccuggcuucacguuugugugacgggcgacgauaaaaaugcuacagccucuuucauuuacgacgggcggcuggucgauuccaucggaagcuggucucagaacauucuccgcacccaagaguccgaaugcguguguaucaauggcacaugcaccguggucaugaccgacgggagcgcuuccggcagagccgauacacggauccuguuuauugaggagggaaagaucguucauauuucuccccuuagcggguccgcgcagcacguggaagagugcagcuguuauccucgcuaccccgacgugagaugcaucugucgggacaacuggaaaggaucuaaucgcccuauugucgauaucaacaugaaggacuauuccaucgauagcucuuacgugugcagcggccugguuggcgacacgcccagaaacgaugaccgguccucuaagagcaauugucgcaacccgaauaacgaaagagggaaucauggagugaaaggcugggccuucgauaacgggaaugacgucuggaugggacggaccauuuccaaggaucucagaagcggcuacgagacauuuaaagugaucgggggauggucuaccccuaacuccaagagccagauuaaucgccagguuaucguggacucugauaaccgguccggcuauagcggcauuuucuccgucgaagggaaaucuugcaucaauagauguuuuuacguggagcugauucgcggacgggagcaagaaacaagagucugguggaccagcaacuccaucgugguuuucugcggcacgucugggacauauggaaccggcagcuggcccgacggggcuaauaucaacuuuaugccuauuuga

SEQ ID NO: 214046 - RNA, 1410 nt, Artificial Sequence; identical to SEQ ID NO: 212199
  derived and/or modified CDS sequence (opt5) from neuraminidase__InfluenzaA__AFG98833

SEQ ID NO: 214047 - RNA, 1410 nt, Artificial Sequence
  derived and/or modified CDS sequence (opt5) from neuraminidase__InfluenzaA__AFG98844
augaaccccaaucagaagaucauuaccaucggcagcgugucccugacaauugccacgaucugcuuccucaugcaaauugcuauccuggucaccacaguuacccuucacuuuaaacaguacgagugugacucuccugccaacaaucaggugaugccgugcgaacccaucauuaucgagagaaacauuacagaaaucguguaucugaccaauacaaccauugagaaggaaauguguccuaaacucgucgaguaccggaacuggagcaagccccagugcaaaaucacgggguucgcgccuuuuuccaaggauaauucuauucgccugagcgcuggaggcgacaucugggugaccagagagcccuauguuuccugugauccugggaagugcuaccaauucgcccuuggacagggcacaacccugaacaaucggcauucuaacgacacaauccacgaucgcauuccgcauagaacccuccugaugaaugaacugggggugcccuuucaccucggaacgcggcaggucuguaucgccuggagcuccagcucuugccaugacggcaaggcuuggcugcacguguguguuacaggcgaugacaaaaacgccaccgcuuccuucauuuaugaugggcgccuuguggacagcaucggaucuuggucccagaauauucugagaacacaagagagcgaaugcgucuguaucaaccggaccugcaccguggugaugacagauggcucugccuccgggaaagcggacacgcgcauccucuuuauugaggagggaaagaucguccacauuagcccucuguccggcucugcccagcauguugaagagugcagcuguuaccccagauauccuggggugcggugcaucugucgcgauaauuggaaaggauccaacagacccguggucgacauuaacgugaaggacuacagcaucgauucuuccuacguuugcagcggccuugugggcgacaccccgcggaauaacgaucgcucuagcuccucuuauuguagaaauccuaacaaugaacgggggaaccacggagucaagggcugggcuuucgacgaugagaaugacguguggauggggagaacaaucagcaaagauucccgcagcggauacgaaaccuuuaagguuauuggcggguggucuacacccaacuccaaaagccagaucaauagacaggugauugucgacucugauaaccgguccggauauagcggcaucuucuccguggagggcaagucuugcauuaaucgcuguuuuuacgucgagcugauccgggggagagaacaagagacccgcgugugguggacgagcaacuccauuguuguguucugcggaacaucuggcaccuaugggaccggaagcuggccugacggcgccgauaucaaucucaugcccaucuga

SEQ ID NO: 214048 - RNA, 1410 nt, Artificial Sequence; identical to SEQ ID NO: 206190
  derived and/or modified CDS sequence (opt5) from neuraminidase__InfluenzaA__AFG98855

SEQ ID NO: 214049 - RNA, 1410 nt, Artificial Sequence; identical to SEQ ID NO: 207044
  derived and/or modified CDS sequence (opt5) from neuraminidase__InfluenzaA__AFG98866

SEQ ID NO: 214050 - RNA, 1410 nt, Artificial Sequence
  derived and/or modified CDS sequence (opt5) from neuraminidase__InfluenzaA__AFG98877
augaaccccaaucagaagaucauuaccaucggcagcgugucccugacaauugccacgaucugcuuccucaugcaaauugcuauccuggucaccacaguuacccuucacuuuaaacaguacgagugugacucuccuccgaacaaucaggugaugcccugcgaaccuaucauuaucgagagaaacauuacagaaaucguguaucugaccaauacaaccauugagaaggaaaucugucccaaacucgucgaguaccggaacuggagcaagccucagugcaaaauuacgggguucgcccccuuuuccaaggauaauucuauccgccugagcgcgggaggcgacaucugggugaccagagagccuuauguuuccugugauccggggaagugcuaccaauucgcucuuggacagggcacaacccuggacaacaaacauucuaaugauacaauucacgaccggacgccccaucgcacccuccugaugaacgaacugggggugccuuuucaccucggaacaagacaggucuguaucgccuggagcuccagcucuugccaugauggcaaggccuggcugcacguguguguuaccggcuaugacaaaaaugcuacagccuccuucauuuacgaugggcggcuuguggacagcaucggaucuuggucccagaacauucugcgcacccaagagagcgaaugcgucuguaucaauggaaccugcacaguggugaugacggaugggucugcuuccggcagagccgacaccaagauccucuuuauugaggagggcaaaaucguccacauuagcccccuguccgggucugcgcagcauguugaagagugcagcuguuauccucgguaccccggagugcgcugcaucuguagagauaacuggaagggcuccaaucggccgguggucgacauuaacgugaaggacuacagcaucgauucuuccuauguuugcagcggccuugugggggacacaccucgcaacaaugauagaucuagcaacuccuacugucggaaucccaacaaugaaaaaggaaaccacggcgucaaggggugggccuucgacgauggaaaugacguguggaugggccgcaccaucucugaggauagcagauccggguaugaaacauuuaaaguuauuggaggcuggagcaccccuaacucuaagcugcagaucaauagacaggugauugucgacuccgauaaccggagcggcuacucugggaucuucuccguggagggaaaaagcugcauuaaucgcuguuuuuaugucgagcucauccggggcagagaacaagagacgcgcgugugguggacauccaacucuauuguuguguucugcgggaccagcggaaccuacggcacaggguccuggcccgacggcgcugauaucaaucugaugcccaucuga

SEQ ID NO: 214051 - RNA, 1410 nt, Artificial Sequence; identical to SEQ ID NO: 206190
  derived and/or modified CDS sequence (opt5) from neuraminidase__InfluenzaA__AFG98888

SEQ ID NO: 214052 - RNA, 1410 nt, Artificial Sequence
  derived and/or modified CDS sequence (opt5) from neuraminidase__InfluenzaA__AFG98899
augaaccccaaucagaagaucauuaccaucggcagcgugucccugauuaucgccacaauuugcuuccucaugcaaaucgcuauccuggucacgaccguuacacuucacuuuaaacaguacgagugugacucuccugccaacaaucaggugaugccgugcgaacccauuaucauugagagaaacaucaccgaaauuguguaucugacaaauaccacaaucgagaaggaaauuuguccuaaacucgucgaguaccggaacuggagcaagccccagugcaaaaucaccggguucgcgccuuuuuccaaggauaauucuauccgccugagcgcuggaggcgacauuugggugacgagagagcccuauguuuccugugauccugggaagugcuaccaauucgcccuuggacagggcaccacacuggacaacaaacauucuaaugauaccauccacgaccggacaccgcaucgcacccuccugaugaacgaacugggggugcccuuucaccucggaacgagacaggucuguauugccuggagcuccagcucuugccaugauggcaaggcuuggcugcacguguguguuacaggcuaugacaaaaaugccaccgcuuccuucaucuacgaugggcggcuuguggacagcauuggaucuuggucccagaacauccugcgcacacaagagagcgaaugcgucuguaucaauggaaccugcaccguggugaugacagaugggucugccuccggcagagcggacacgaagauucucuuuaucgaggagggcaaaauuguccacaucagcccucuguccgggucugcccagcauguugaagagugcagcuguuauccccgguacccuggagugcgcugcauuuguagagauaacuggaagggcuccaaucggcccguggucgacaucaacgugaaggacuacagcaucgauucuuccuauguuugcagcggccuugugggggacaccccgcgcaacaaugauagaucuagcaacuccuacugucggaauccuaacaaugaaaaaggaaaccacggcgucaaggggugggcuuucgacgauggaaaugacguguggaugggccgcacaauuucugaggauagcagauccggguaugaaaccuuuaaaguuaucggaggcuggagcacacccaacucuaagcugcagauuaauagacaggugaucgucgacuccgauaaccggagcggcuacucugggauuuucuccguggagggaaaaagcugcaucaaucgcuguuuuuaugucgagcucauucggggcagagaacaagagacccgcgugugguggacguccaacucuaucguuguguucugcgggacaagcggaaccuacggcaccggguccuggccugacggcgccgauaucaaucugaugcccauuuga

SEQ ID NO: 214053 - RNA, 1410 nt, Artificial Sequence; identical to SEQ ID NO: 206190
  derived and/or modified CDS sequence (opt5) from neuraminidase__InfluenzaA__AFG98910

SEQ ID NO: 214054 - RNA, 1410 nt, Artificial Sequence; identical to SEQ ID NO: 206190
  derived and/or modified CDS sequence (opt5) from neuraminidase__InfluenzaA__AFG98921

SEQ ID NO: 214055 - RNA, 1410 nt, Artificial Sequence
  derived and/or modified CDS sequence (opt5) from neuraminidase__InfluenzaA__AFG98932
augaaccccaaucagaagaucauuaccaucggcagcgugucccugacaauugccacgaucugcuuccucaugcaaauugcuauccuggucaccacaguuacccuucacuuuaaacaguacgagugugacucuccugccaacaaucaggugaugccgugcgaacccaucauuguggagagaaacaucacagaaauugucuaucugaccaauacaaccaucgagaaggaaauuuguccuaaacucguggaguaccggaaguggagcaaaccccagugcaagaucacgggguucgcgccuuuuuccaaggauaacucuauucgccugagcgcuggaggcgacaucuggguuaccagagagcccuauguguccugugauccugggaaaugcuaccaauucgcccuuggacagggcacaacccuggacaauaagcauucuaacgauacaauccacgaccggaccccgcaucgcacgcuccugaugaaugaacuggggguccccuuucaccucggaacaagacagguguguauugccuggagcuccagcucuugccaugauggcaaggcuuggcugcacguuugugugaccggcuaugacaaaaacgccacagcuuccuucaucuacgaugggcggcuugucgacagcauuggaucuuggucccagaauauccugcgcacccaagagagcgaaugcguguguauuaacggaaccugcacaguggucaugacggaugggucugccuccggcagagcggacaccaaaauccucuuuaucgaggagggcaagauuguucacaucagcccucuguccgggucugcccagcauguggaagagugcagcuguuauccccgguacccuggagugcgcugcauuuguagagauaauuggaagggcuccaaccggcccgucguggacaucaauguuaaagacuacagcauugauucuuccuaugugugcagcggccuugucggggacacaccgcgcaacaacgauagaucuagcaauuccuacugucggaacccuaauaacgaaaagggaaaucacggcgugaaagggugggcuuucgacgauggaaacgacguuuggaugggccgcaccaucucugaggauagcagauccggguaugaaacauuuaaggugaucggaggcuggagcacccccaauucuaaacugcagauuaaccggcaggucaucguggacuccgauaauagaagcggcuacucugggauuuucuccgucgagggaaagagcugcaucaaccgcuguuuuuauguggagcucauucggggcagagaacaagagacgcgcguuugguggacauccaauucuaucguggucuucugcgggaccagcggaaccuacggcacaggguccuggccugacggcgccgauauuaaccugaugcccaucuga

SEQ ID NO: 214056 - RNA, 1410 nt, Artificial Sequence
  derived and/or modified CDS sequence (opt5) from neuraminidase__InfluenzaA__AFG98943
augaaccccaaucagaagaucauuaccaucggcagcgugucccugacaauugccacgaucugcuuccucaugcaaauugcuauccuggucaccacaguuacccuucacuuuaaacaguacgagugugacucuccugccaacaaucaggugaugccgugcgaacccaucauuaucgagagaaacauuacagaaaucguguaucugaccaauacaaccauugagaaggaaaucuguccuaaacucgucgaguaccggaacuggagcaagccccagugcaaaauuacgggguucgcgccuuuuuccaaggauaauucuauccgccugagcgcuggaggcgacaucugggugaccagagagcccuauguuuccugugauccugggaagugcuaccaauucgcccuuggacagggcacaacccuggacaacaaacauucuaaugauacaauucacgaccggaccccgcaucgcacgcuccugaugaacgaacugggggugcccuuucaccucggaacaagacaggucuguaucgccuggagcuccagcucuugccaugauggcaaggcuuggcugcacguguguguuaccggcuaugacaaaaaugccacagcuuccuucauuuacgaugggcggcuuguggacagcaucggaucuuggucccagaacauucugcgcacccaagagagcgaaugcgucuguaucaauggaaccugcacaguggugaugacggaugggucugccuccggcagagcggacaccaagauccucuuuauugaggagggcaaaaucguccacauuagcccucuguccgggucugcccagcauguugaagagugcagcuguuauccccgguacccuggagugcgcugcaucuguagagauaacuggaagggcuccaaucggcccguggucgacauuaacgugaaggacuacagcaucgauucuuccuauguuugcagcggccuugugggggacacaccgcgcaaaaacgauagaucuagcaauuccuacugucggaacccuaauaacgaaaagggaaaucacggcgucaaagggugggcuuucgacgauggaaacgacguguggaugggccgcaccaucucugaggauagcagauccggguaugaaacauuuaagguuauuggaggcuggagcacccccaauucuaaacugcagaucaacagacaggugauugucgacuccgauaaucggagcggcuacucugggaucuucuccguggagggaaagagcugcauuaaccgcuguuuuuaugucgagcucauccggggcagagaacaagagacgcgcgugugguggacauccaauucuauuguuguguucugcgggaccagcggaaccuacggcacaggguccuggccugacggcgccgauaucgaccugaugcccaucuga

SEQ ID NO: 214057 - RNA, 1410 nt, Artificial Sequence
  derived and/or modified CDS sequence (opt5) from neuraminidase__InfluenzaA__AFG98965
augaaccccaaucagaagaucauuaccaucggcagcgugucccugacaauugccacgaucugcuuccucaugcaaauugcuauccuggucaccacaguuacccuucacuuuaaacaguacgagugugacucuccugccaacaaucaggugaugccgugcgaacccacaaucauugagagaaacaucaccgaaauuguguaucugacaaauaucaccauugagaaggaaaucuguccuaaacucgucgaguaccggaacuggagcaagccccagugcaaaauuacgggguucgcgccuuuuuccaaggauaauucuauccgccugagcgcuggaggcgacaucugggugaccagagagcccuauguuuccugugauccugggaagugcuaccaauucgcccuuggacagggcacaacccuggacaacaaacauucuaaugauacaauucacgaccggaccccgcaucgcacgcuccugaugaacgaacugggggugcccuuucaccucggaacaagacaggucuguaucgccuggagcuccagcucuugccaugauggcaaggcuuggcugcacguguguguuaccggcuaugacaaaaaugccacagcuuccuucauuuacgaugggcggcuuguggacagcaucggaucuuggucccagaacauucugcgcacccaagagagcgaaugcgucuguaucaauggaaccugcacaguggugaugacggaugggucugccuccggcagagcggacaccaagauccucuuuauugaggagggcaaaaucguccacauuagcccucuguccgggucugcccagcauguugaagagugcagcuguuauccccgguacccuggagugcgcugcaucuguagagauaacuggaagggcuccaaucggcccguggucgacauuaacgugaaggacuacagcaucgauucuuccuauguuugcagcggccuugugggggacacaccgcgcaacaaugauagaucuagcaacuccuacugucggaauccuaacaaugaaaaaggaaaccacggcgucaaggggugggcuuucgacgauggaaaugacguguggaugggccgcaccaucucugaggauagcagauccggguaugaaacauuuaaaguuauuggaggcuggagcacccccaacucuaagcugcagaucaauagacaggugauugucgacuccgauaaccggagcggcuacucugggaucuucuccguggagggaaaaagcugcauuaaucgcuguuuuuaugucgagcucauccggggcagagaacaagagacgcgcgugugguggacauccaacucuauuguuguguucugcgggaccagcggaaccuacggcgccggguccuggccugacggcgcugauaucaaucugaugcccaucuga

SEQ ID NO: 214058 - RNA, 1410 nt, Artificial Sequence
  derived and/or modified CDS sequence (opt5) from neuraminidase__InfluenzaA__AFG98976
augaaccccaaucagaagaucauuaccaucggcagcgugucccugacaauugccacgaucugcuuccucaugcaaauugcuauccuggucaccacaguuacccuucacuuuaaacaguacgagugugacucuccugccaacaaucaggugaugccgugcgaacccaucauuaucgagagaaacauuacagaaaucguguaucuggcgaauaccacaauugagaaggaaaucuguccuaaacucgucgaguaccggaacuggagcaagccccagugcaaaauuaccggguucgcuccuuuuuccaaggauaauucuauccgccugagcgccggaggcgacaucugggugacgagagagcccuauguuuccugugauccugggaagugcuaccaauucgcccuuggacagggcaccacacuggacaacaaacauucuaaugauaccauucacgaccggacaccgcaucgcacccuccugaugaacgaacugggggugcccuuucaccucggaacgagacaggucuguaucgcuuggagcuccagcucuugccaugauggcaaggccuggcugcacguguguguuacaggcuaugacaaaaaugcuaccgccuccuucauuuacgaugggcggcuuguggacagcaucggaucuugguccaagaacauucugcgcacacaggagagcgaaugcgucuguaucaauggaaccugcaccguggugaugacagaugggucugcguccggcagagccgacacgaaaauccucuuuauugaggagggcaagaucguccacauuagcccucuguccgggucugcucaacauguugaagagugcagcuguuauccccgguacccuggagugcgcugcaucuguagagauaacuggaagggcuccaaucggcccguggucgacauuaacgugaaagacuacagcaucgauucuuccuauguuugcagcggccuugugggggacaccccgcgcaacaaugauagaucuagcuccucuuacugucggaacccuaauaacgaaaagggaaaucacggcgucaaagggugggccuucgacgauggaaacgacguguggaugggccgcacaaucagcgaggauuccagaagcggguaugaaaccuuuaagguuauuggaggcuggucuacacccaauuccaaacugcagaucaacagacaggugauugucgacagcgauaaucggucuggcuacuccgggguguucagcgucgagggaaaguccugcaucaaccgcuguuuuuauguggagcucauucggggcagagaacuggagacccgcguuugguggacgucuaauagcaucguggucuucugcgggacauccggaaccuacggcaccgggucuuggccugacggcgcugauauuaaccugaugcccaucuga

SEQ ID NO: 214059 - RNA, 1410 nt, Artificial Sequence; identical to SEQ ID NO: 214058
  derived and/or modified CDS sequence (opt5) from neuraminidase__InfluenzaA__AFG98987

SEQ ID NO: 214060 - RNA, 1410 nt, Artificial Sequence
  derived and/or modified CDS sequence (opt5) from neuraminidase__InfluenzaA__AFG98998
augaaccccaaucagaagaucauuaccaucggcagcgugucccugacaauugccacgaucugcuuccucaugcaaauugcuauccuggucaccacaguuacccuucacuuuaaacaguacgagugugacucuccugccaacaaucaggugaugccgugcgaacccaucauuaucgagagaaacauuacagaaaucguguaucugaccaauacaaccauugagaaggaaaucuguccuaaacucgucgaguaccggaacuggagcaagccccagugcaaaauuacgggguucgcgccuuuuuccaaggauaauucuauccgccugagcgcuggaggcgacaucugggugaccagagagcccuauguuuccugugauccugggaagugcuaccaauucgcccuuggacagggcacaacccuggaaaacaaacauucuaaugacacaauucacgaucggaccccgcaucgcacgcuccugaugaacgagcugggggugcccuuucaccucggaacaagacaggucuguaucgccuggagcuccagcucuugccaugacggcaaggcuuggcugcacguguguguuaccggcuaugauaaaaaugccacagcuuccuucauuuacgacgggcggcuuguggauagcaucggaucuuggucccagaacauucugcgcacccaagaaagcgagugcgucuguaucaauggaaccugcacaguggugaugacggacgggucugccuccggcagagcggauaccaagauccucuuuauugaggaaggcaaaaucguccacauuagcccucuguccgggucugcccagcauguugaggaaugcagcuguuauccccgguacccuggagugcgcugcaucuguagagacaacuggaagggcuccaaucggcccguggucgauauuaacgugaaggacuacagcaucgacucuuccuauguuugcagcggccuugugggggauacaccgcgcaaaaacgacagaucuagcuccucuuacugucggaauccuaacaaugagaagggaaaccacggcgucaaagggugggcuuucgaugacggaaaugauguguggaugggccgcaccaucagcgaagacuccagaagcggguaugagacauuuaagguuauuggaggcuggucuacccccaacuccaaacugcagaucaauagacaggugauugucgauagcgccaaccggucuggcuacuccgggaucuucagcguggagggaaaguccugcauuaaucgcuguuuuuaugucgaacucauccggggcagagagcaagaaacgcgcgugugguggacaucuaacagcauuguuguguucugcgggaccuccggaaccuacggcacagggucuuggccugacggcgcugauaucaaucugaugcccaucuga

SEQ ID NO: 214061 - RNA, 1410 nt, Artificial Sequence; identical to SEQ ID NO: 214058
  derived and/or modified CDS sequence (opt5) from neuraminidase__InfluenzaA__AFG99009

SEQ ID NO: 214062 - RNA, 1410 nt, Artificial Sequence
  derived and/or modified CDS sequence (opt5) from neuraminidase__InfluenzaA__AFG99020
augaaccccaaucagaagaucauuaccaucggcagcgugucccugacaauugccacgaucugcuuccucaugcaaauugcuauccuggucaccacaguuacccuucacuuuaaacaguacgagugugacucuccugccaacaaucaggugaugccgugcgaacccaucauuaucgagagaaacauuacagaaaucguguaucugaccaauacaaccauugagaaggaaaucuguccuaaacucgucgaguaccggaacuggagcaagccccagugcaaaauuacgggguucgcgccuuuuuccaaggauaauucuauccgccugagcgcuggaggcgacaucugggugaccagagagcccuauguuuccugugauccugggaagugcuaccaauucgcccuuggacagggcacaacccuggacaacaaacauucuaaugauacaauucacgaccggaccccgcaucgcacgcuccugaugaacgaacugggggugcccuuucaccucggaacaagacaggucuguaucgccuggagcuccagcucuugccaugauggcaaggcuuggcugcacguguguguuaccggcuaugacaaaaaugccacagcuuccuucauuuacgaugggcggcuuguggacagcaucggaucuuggucccagaacauucugcgcacccaagagagcgaaugcgucuguaucaauggaaccugcacaguggugaugacggaugggucugccuccggcagagcggacaccaagauccucuuuauugaggagggcaaaaucguccacacaagcccucuguccgggucugcccagcauguugaagagugcagcuguuauccccgguacccuggagugcgcugcauuuguagagauaacuggaagggcuccaaucggcccguggucgacaucaacgugaaggacuacagcauugauucuuccuauguuugcagcggccuugugggggacaccccgcgcaacaaugauagaucuagcuccucuuacugucggaacccuaauaacgaaaaaggaacacacggcgucaaggggugggcuuucgacgauggaaaugacguguggaugggccgcaccaucagcgaggauuccagaagcggguaugaaacguuuaaaguuaucggaggcuggucuacacccaacuccaagcugcagauuaauagacaggugaucgucgacagcgauaaccggucuggcuacuccgggauuuucagcguggagggaaaauccugcaucaaucgcuguuuuuaugucgagcucauucggggcagagaacaagagacccgcgugugguggaccucuaacagcaucguuguguucugcgggacauccggaaccuacggcacagggucuuggccugacggcgccgauauuaauaucaugcccaucuga

SEQ ID NO: 214063 - RNA, 1410 nt, Artificial Sequence
  derived and/or modified CDS sequence (opt5) from neuraminidase__InfluenzaA__AFG99031
augaaccccaaucagaagaucauuaccaucggcagcgugucccugacaauugccacgaucugcuuccucaugcaaauugcuauccuggucaccacaguuacccuucacuuuaaacaguacgagugugacucuccugccaacaaucaggugaugccgugcgaacccaucauuaucgagagaaacauuacagaaaucguguaucugaccaauacaaccauugagaaggaaaucuguccuaaacucgucgaguaccggaacuggagcaagccccagugcaaaauuacgggguucgcgccuuuuuccaaggauaauucuauccgccugagcgcuggaggcgacaucugggugaccagagagcccuauguuuccugugauccugggaagugcuaccaauucgcccuuggacagggcacaacccuggacaacaaacauucuaaugauacaauucacgaccggaccccgcaucgcacgcuccugaugaacgaacugggggugcccuuucaccucggaacaagacaggucuguaucgccuggagcuccagcucuugccaugauggcaaggcuuggcugcacguguguguuaccggcuaugacaaaaaugccacagcuuccuucauuuacgaugggcggcuuguggacagcaucggaucuuggucccagaacauucugcgcacccaagagagcgaaugcgucuguaucaauggaaccugcacaguggugaugacggaugggucugccuccggcagagcggacaccaagauccucuuuauugaggagggcaaaaucguccacacaagcccucuguccgggucugcccagcauguugaagagugcagcuguuauccccgguacccuggagugcgcugcauuuguagagauaacuggcggggcuccaaucgccccguggucgacaucaacgugaaggacuacagcauugauucuuccuauguuugcagcggccuugugggggacaccccgagaaacaaugaucggucuagcuccucuuacugucgcaacccuaauaacgaaaagggaacacacggcgucaaagggugggcuuucgacgauggaaaugacguguggaugggcagaaccaucagcgaggauucccggagcggguaugaaacguuuaagguuaucggaggcuggucuacacccaacuccaaacugcagauuaauagacaggugaucgucgacagcgauaaccgcucuggcuacuccgggauuuucagcguggagggaaaguccugcaucaaucgguguuuuuaugucgagcucgugagaggccgcgaacaagagacccggguuugguggaccucuaacagcauuguggucuucugcgggacauccggaaccuacggcacagggucuuggccugacggcgccgauaucaaucugaugcccauuuga

SEQ ID NO: 214064 - RNA, 1410 nt, Artificial Sequence; identical to SEQ ID NO: 206648
  derived and/or modified CDS sequence (opt5) from neuraminidase__InfluenzaA__AFG99042

SEQ ID NO: 214065 - RNA, 1410 nt, Artificial Sequence
  derived and/or modified CDS sequence (opt5) from neuraminidase__InfluenzaA__AFG99053
augaaccccaaucagaagaucauuaccaucggcagcgugucccugacaauugccacgaucugcuuccucaugcaaauugcuauccuggucaccacaguuacccuucacuuuaaacaguacgagugugacucuccugccaacaaucaggugaugccgugcgaacccaucauuaucgagagaaacauuacagaaaucguguaucugaccaauacaaccauugagaaggaaaucuguccuaaacucgucgaguaccggaacuggagcaagccccagugcaaaauuacgggguucgcgccuuuuuccaaggauaauucuauccgccugagcgcuggaggcgacaucugggugaccagagagcccuauguuuccugugauccugggaagugcuaccaauucgcccuuggacagggcacaacccuggacaacaaacauucuaaugauacaauucacgaccggaccccgcaucgcacgcuccugaugaacgaacugggggugcccuuucaccucggaacaagacaggucuguaucgccuggagcuccagcucuugccaugauggcaaggcuuggcugcacguguguguuaccggcuaugacaaaaaugccacagcuuccuucauuuacgaugggcggcuuguggacagcaucggaucuuggucccagaacauucugcgcacccaagagagcgaaugcgucuguaucaauggaaccugcacaguggugaugacggaugggucugccuccggcagagcggacaccaagauccucuuuauugaggagggcaaaaucguccacacaagcucccugucugggagcgcccagcauguugaagagugcuccuguuauccucgguaccccggagugcgcugcauuuguagagauaacuggaagggcagcaaucggccuguggucgacaucaacgugaaggacuacucuauugauuccagcuauguuugcucuggccuugugggggacacaccccgcaacaaugauagaagcuccucuagcuacugucggaacccgaauaacgaaaaaggaacccacggcgucaaggggugggcuuucgacgauggaaaugacguguggaugggccgcaccaucuccgaggauagcagaucuggguaugaaacguuuaaaguuaucggaggcugguccauuccuaacagcaagcugcagaucaauagacaggugauugucgacucugauaaccgguccggcuacagcgggaucuucuccguggagggaaaaucuugcauuaaucgcuguuuuuaugucgagcucauccggggcagagaacaagagacacgcgugugguggaccagcaacuccauuguuguguucugcgggaccucuggaacauacggcaccgggagcuggcccgacggcgccgauaucaaucugaugccuaucuga

SEQ ID NO: 214066 - RNA, 1410 nt, Artificial Sequence
  derived and/or modified CDS sequence (opt5) from neuraminidase__InfluenzaA__AFG99064
augaaccccaaucagaagaucauuaccaucggcagcgugucccugacaauugccacggucugcuuccucaugcaaaucgcuauucugguuaccacagugacccuucacuuuaaacaguacgagugugacucuccuccgaacaaucaggugaugcccugcgaaccuaucaucauugagagaaacgucacagaaaucguguaucugaccaauacaaccauugagaaggaaaucugucccaaacucguugaguaccggaacuggagcaagccucagugcaaaauuacgggguucgcccccuuuuccaaggauaauucuauccgccugagcgcgggaggcgacauuugggugaccagagagccuuaugucuccugugauccgucuaagugcuaccaauucgcucuugggcagggaacaacccuggacaacaaacauagcaaugauacaauccacgaccggacgccccaucgcacccuccugaugaacgaacugggcgugccuuuucaccucgggacaagacagguuuguaucgccugguccuccucuuccugccaugauggaaaggccuggcugcacguguguauuaccggcuaugacaaaaaugcuacagccagcuucaucuacgauggccggcuugucgacucuauuggguccuggagcaagaacauccugcgcacccaggagucugaaugcguguguauuaauggaaccugcacaguggucaugacggauggcuccgcuagcgagagagccgacaccaaaauccucuuuaucgaggaagggaagauuguucacaucagcccccugucuggaagcgcgcaacauguggaggaaugcuccuguuauccucgguaccccggcgugcgcugcauuuguagagauaacuggaaggggagcaaucggccggucguggacaucaacguuaaagacuacucuauuguguccagcuaugucugcucuggacuugugggcgauacaccucgcaagaacgacagaagcuccucuagcuacugucggaaucccaacaaugagaaaggcaaccacgggguuaagggaugggccuucgaugacggcaaugauguguggauggggcgcaccaucuccgaagagagcagaucuggauaugagacauuuaaagucaucggcgggugguccaccccuaacagcaagcugcagauuaauagacaggugaucgucgacucugauaaccgguccggauacagcggcauuuucuccguggaaggcaaaucuugcaucaaucgcuguuuuuauguugagcucauucgggggagagaacaggagacgcgcgugugguggacaagcaacuccaucgucguguucugcggaaccucuggcaccuacgggacaggaagcuggcccgacggcgcugauauuaaucugaugcccaucuga

SEQ ID NO: 214067 - RNA, 1410 nt, Artificial Sequence
  derived and/or modified CDS sequence (opt5) from neuraminidase__InfluenzaA__AFG99086
augaaccccaaucagaagaucauuaccaucggcagcgugucccugacaauugccacgaucugcuuccucaugcaaauugcuauccuggucaccacaguuacccuucacuuuaaacaguacgagugugacucuccugccaacaaucaggugaugccgugcgaacccaucauuaucgagagaaacgugacagaaauugucuaucugaccaauacaaccaucgagaaggaaauuuguccuaaacucguggaguaccggaacuggagcaagccccagugcaaaaucacgggguucgcgccuuuuuccaaggauaauucuauucgccugagcgcuggaggcgacaucuggguuaccagagagcccuauguguccugugauccugggaagugcuaccaauucgcccuuggacagggcacaacccuggacaacaaacauucuaaugauacaauccacgaccggaccccguaucgcacgcuccugaugaacgaacuggggguccccuuucaucucggaacaagacagguguguauugccuggagcuccagcucuugccacgauggcaaggcuuggcugcauguuugugugaccggcuacgacaaaaaugccacagcuuccuucaucuaugaugggcggcuugucgacagcauuggaucuugguccaagaacauccugcgcacccaggagagcgaaugcguguguauuaaugggaccugcacaguggucaugacggauggcucugccuccgagagagcggacaccaaaauccucuuuaucgaggaaggaaagauuguucacaucagcccucuguccggcucugcccaacacguggaggaaugcagcuguuacccccgguacccuggggugcgcugcauuuguagagauaacuggaagggauccaaucggcccgucguggacaucaacguuaaagacuauagcauugugucuuccuacgucugcagcggccuugugggcgauacaccgcgcaagaacgacagaucuagcuccucuuauugucggaauccuaacaaugagaaagggaaccauggaguuaagggcugggcuuucgaugacgggaaugauguguggaugggacgcaccaucagcgaagaguccagaagcggcuacgagacauuuaaagucaucgggggauggucuacccccaacuccaagcugcagauuaauagacaggugaucgucgacagcgauaaccggucuggcuauuccggcauuuucagcguggaagggaaauccugcaucaaucgcuguuuuuacguugagcucauucggggaagagaacaggagacgcgcgugugguggacaucuaacagcaucgucguguucugcggcaccuccgggaccuauggaacaggcucuuggccugacggggccgauauuaaucugaugcccaucuga

SEQ ID NO: 214068 - RNA, 1410 nt, Artificial Sequence
  derived and/or modified CDS sequence (opt5) from neuraminidase__InfluenzaA__AFG99097
augaaccccaaucagaagaucauuaccaucggcagcgugucccugacaauugccacgaucugcuuccucaugcaaauugcuauccuggucaccacaguuacccuucacuuuaaacaguacgagugugacucuccugccaacaaucaggugaugccgugcgaacccaucauuaucgagagaaacgugacagaaauugucuaucugaccaauacaaccaucgagaaggaaauuuguccuaaacucguggaguaccggaacuggagcaagccccagugcaaaaucacgggguucgcgccuuuuuccaaggauaauucuauucgccugagcgcuggaggcgacaucuggguuaccagagagcccuauguguccugugauccugggaagugcuaccaauucgcccuuggacagggcacaacccuggacaacaaacauucuaaugauacaauccacgaccggaccccguaucgcacgcuccugaugaacgaacuggggguccccuuucaucucggaacaagacagguguguauugccuggagcuccagcucuugccacgauggcaaggcuuggcugcauguuugugugaccggcuacgacaaaaaugccacagcuuccuucaucuaugaugggcggcuugucgacagcauuggaucuugguccaagaacauccugcgcacccaggagagcgaaugcguguguauuaaugggaccugcacaguggucaugacggauggcucugccuccgagagagcggacaccaaaauccucuuuaucgaggaaggaaagauuguucacaucagcccucuguccggcucugcccaacacguggaggaaugcagcuguuacccccgguacccuggggugcgcugcauuuguagagauaacuggaagggauccaaucggcccgucguggacaucaacguuaaagacuauagcauugugucuuccuacgucugcagcggccuugugggcgauacaccgcgcaagaacgacagaucuagcuccucuuauugucggaauccuaacaaugagaaagggaaccauggaguuaagggcugggcuuucgaugacgggaaugauguguggaugggacgcaccaucagcgaagaguccagacugggcuacgagacauuuaaagucaucgggggauggagcacccccaacucuaagcuccagauuaauagacaggugaucgucgacuccgauaaccggagcggcuauucuggcauuuucuccguggaagggaaaagcugcaucaaucgcuguuuuuacguugagcugauucggggaagagaacaggagacgcgcgugugguggacauccaacucuaucgucguguucugcggcaccagcgggaccuauggaacaggcuccuggccugacggggccgauauuaaucugaugcccaucuga

SEQ ID NO: 214069 - RNA, 1410 nt, Artificial Sequence
  derived and/or modified CDS sequence (opt5) from neuraminidase__InfluenzaA__AFG99119
augaaccccaaucagaagaucauuaccaucggcagcgugucccugacaauugccacgaucugcuuccucaugcaaauugcuauccuggucaccacaguuacccuucacuuuaaacaguacgaguguucuagcccuccgaacaaucaggugaugcccugcgaaccuaucauuaucgagagaaacauuacagaaaucguguaucugaccaauacaaccauugagaaggaaaucugucccaaacucgucgaguaccggaacugguccaagccucagugcaaaauuacgggguucgcccccuuuucuaaggacaauagcauccgccuguccgcgggaggcgauaucugggugaccagagagccuuauguuucuugugacccggggaagugcuaccaauucgcucuuggacagggcacaacccuggauaacaaacauagcaaugacacaauucacgaucggacccccuaucgcacgcuccugaugaacgaacugggggugccuuuucaucucggaacaagacaggucuguaucgccugguccuccucuuccugccacgacggcaaggccuggcugcauguguguguuaccggccacgauaaaaaugcuacagccagcuucauuuacgacgggcggcuuguggauucuaucggauccuggagcaagaacauucugcgcacccaggagucugaaugcgucuguaucaaugggaccugcacaguggugaugacggacggcuccgcuagcgagagagccgauaccaaaauccucuuuauugaggaaggaaagaucguccacauuagcccccugucuggcagcgcgcaacauguugaggaaugcuccuguuauccucgguaccccggggugcgcugcguguguagagacaacuggaagggaagcaaucggccgaucgucgauauuaacgugaaagacuacucuaucguuuccagcuaugugugcucuggccuugucggcgacacaccucgcaagaacgauagaagcuccucuagcuacugucggaaucccaacaaugagaaagggaaccacggagugaagggcugggccuucgacgaugggaaugacguuuggaugggacgcaccaucuccgaagagagcagaucuggcuaugagacauuuaaagugauugggggaugguccaccccuaacagcaagcugcagaucaaucggcaggucauuguggauucugacaacagauccggcuacagcggcaucuucuccgucgaagggaaaucuugcauuaaucgcuguuuuuauguggagcucauccggggaagagaacaggagacgcgcguuugguggacaagcaacuccauuguggucuucugcggcaccucugggaccuacggaacaggcagcuggcccgauggggcugacaucaaucugaugcccaucuga

SEQ ID NO: 214070 - RNA, 1410 nt, Artificial Sequence
  derived and/or modified CDS sequence (opt5) from neuraminidase__InfluenzaA__AFG99130
augaaccccaaucagaagaucauuaccaucggcagcgugucccugacaauugccacgaucugcuuccucaugcaaauugcuauccuggucaccacaguuacccuucacuuuaaacaguacgaguguucuagcccuccgaacaaucaggugaugcccugcgggccuaucauuaucgaaagaaacauuacagagaucguguaucugaccaauacaaccauugaaaaggagaucugucccaaacucgucgaauaccggaacugguccaagccucagugcaaaauuacgggauucgcccccuuuucuaaggacaauagcauccgccuguccgcgggcggggauaucugggugaccagagagccuuauguuucuugugacccgggaaagugcuaccaauucgcucuuggccaggggacaacccuggauaacaaacauagcaaugacacaauucacgaucggacccccuaucgcacgcuccugaugaacgagcugggagugccuuuucaucucggcacaagacaggucuguaucgccugguccuccucuuccugccacgacggcaaggccuggcugcauguguguguuaccgggcacgauaaaaaugcuacagccagcuucauuuacgacggacggcuuguggauucuaucggcuccuggagcaagaacauucugcgcacccaggaaucugagugcgucuguaucaaugggaccugcacaguggugaugacggacggauccgcuagcgaaagagccgauaccaaaauccucuuuauugaggagggcaagaucguccacauuagcccccugucugggagcgcgcaacauguugaagagugcuccuguuauccucgguaccccggagugcgcugcguguguagagacaacuggaagggcagcaaucggccggucguggauaucaacguuaaagacuacucuauuguguccagcuaugucugcucuggccuugugggggacacaccucgcaagaacgauagaagcuccucuagcuacugucggaaucccaacaaugaaaaaggaaaccacggcguuaaggggugggccuucgacgauggaaaugacguguggaugggccgcaccaucuccgaggaaagcagaucuggguaugagacauuuaaagucaucggaggcugguccaccccuaacagcaagcugcagacgaauagacaggugauugucgauucugacaaccgguccggcuacagcgggaucuucuccguggagggaaaaucuugcauuaaucgcuguuuuuauguugaacucauccggggcagagagcaggaaacacgcgugugguggaccagcaacuccauugucguguucugcgggaccucuggaacauacggcaccgggagcuggcccgauggcgcugacaucaaucugaugcccauuuga

SEQ ID NO: 214071 - RNA, 1410 nt, Artificial Sequence
  derived and/or modified CDS sequence (opt5) from neuraminidase__InfluenzaA__AFG99141
augaaccccaaucagaagaucauuaccaucggcagcgugucccugacaauugccacgaucugcuuccucaugcaaauugcuauccuggucaccacaguuacccuucacuuuaaacaguacgaguguucuagcccuccgaacaaucaggugaugcccugcgaaccuaucauuaucgagagaaacauuacagaaaucguguaucugaccaauacaaccauugagaaggaaaucugucccaaacucgucgaguaccggaacugguccaagccucagugcaaaauuacgggguucgcccccuuuucuaaggacaauagcauccgccuguccgcgggaggcgauaucugggugaccagagagccuuauguuucuugugacccggggaagugcuaccaauucgcucuuggacagggcacaacccuggauaacaaacauagcaaugacacaauucacgaucggacccccuaucgcacgcuccugaugaacgaacugggggugccuuuucaucucggaacaagacaggucuguaucgccugguccuccucuuccugccacgacggcaaggccuggcugcauguguguguuaccggccacgauaaaaaugcuacagccagcuucauuuacgacgggcggcuuguggauucuaucggauccuggagcaagaacauucugcgcacccaggagucugaaugcgucuguaucaaugggaccugcacaguggugaugacggacggcuccgcuagcgagagagccgagaccaaaauccucuuuauugaagagggaaagaucguccacauuagcccccugucuggcagcgcgcaacauguugaagagugcuccuguuauccucgguaccccggggugcgcugcguguguagagauaacuggaagggaagcaaucggccggucguggacaucaacguuaaagauuacucuauuguguccagcuaugucugcucuggccuugugggcgacacaccucgcaagaacgacagaagcuccucuagcuacugucggaaucccaacaaugaaaaagggaaccacggaguuaagggcugggccuucgaugacgggaaugauguguggaugggacgcaccaucuccgaggagagcagaucuggcuaugaaacauuuaaagucaucgggggaugguccaccccuaacagcaagcugcagauuaauagacaggugaucgucgacucugauaaccgguccggcuacagcggcauuuucuccguggaggggaaaucuugcaucaaucgcuguuuuuauguugaacucauucggggaagagagcaggaaacgcgcgugugguggacaagcaacuccaucgucguguucugcggcaccucugggaccuacggaacaggcagcuggcccgacggggcugauauuaaucugaugcccaucuga

SEQ ID NO: 214072 - RNA, 1410 nt, Artificial Sequence
  derived and/or modified CDS sequence (opt5) from neuraminidase__InfluenzaA__AFG99152
augaaccccaaucagaagaucaugaccauuggcagcgugucccugacaaucgccacgauuugcuuccucaugcaaaucgcuauucuggucaccacaguuacccuucacuuuaaacauuacgaguucucuagcccuccgaacaaucaggugaugcccugugaaccuaucaucauugagagaaacaucacagaaauuguguaucugaccaauacaaccaucgagaaggaagucugccccaaacucguggaguaccggaacugguccaagccucaguguaaaauuacgggguuugcccccuucucuaaggacaauagcauccgccuguccgcgggaggcgauauuuggguuaccagagagccuuaugugucuugcgacccggggaaguguuaccaguuugcucuuggacaaggcacaacccugaacaauaaacacagcaacgauacaauccaugaccggacccccuaucgcacgcuccugaugaaugaacugggggucccuuuccaccucggaacaagacaggugugcaucgccugguccuccucuuccugucaugauggcaaggccuggcugcacguuugcgugaccggccacgacaaaaacgcuacagccagcuuuauuuacgaugggcggcuugucgacucuaucggauccuggagcaagaauauucugcgcacccaggagucugaaugugugugcaucaacggcaccuguacaguggucaugacggauggguccgcuagcggacgggccgacaccaaaauucucuucaucgaggagggcaagaucguucauauuagcccccugucugggagcgcgcagcacguggaagagugcuccugcuauccucgguaccccggagugcgcugugucugcagagauaauuggaagggcagcaaccggccgaucguggacauuaacguuaaagauuacucuaucguguccagcuaugucuguucuggccuugugggggacacaccucgcaagaaugacagaagcuccucuagcuacugccggaaccccaauaacgaaaaaggaaaucauggcguuaaggggugggccuuugaugacggaaacgauguguggaugggccgcaccauuggggaggaacugagauccggauaugagacauucaaagucaucggcggcuggagcaccccuaauucuaagcuccaaaucaacagacaggugauugucgacuccgauaauagaagcggguacucuggaaucuuuuccguggagggcaaaagcuguauuaaccgcugcuucuauguugaacugauccgggggagagagcaggaaacgcgcgugcuguggacauccaauucuauugucguguuuuguggaaccagcggcaccuacgggacaggcuccuggcccgacggagcugauaucaaccucaugcccauuuga

SEQ ID NO: 214073 - RNA, 1410 nt, Artificial Sequence; identical to SEQ ID NO: 211067
  derived and/or modified CDS sequence (opt5) from neuraminidase__InfluenzaA__AFG99163

SEQ ID NO: 214074 - RNA, 1410 nt, Artificial Sequence
  derived and/or modified CDS sequence (opt5) from neuraminidase__InfluenzaA__AFG99174
augaaccccagccagaagaucauuaccaucggcuccgugucucugacaauugccacgaucugcuuccucaugcaaauugcuauccuggucaccacaguuacccuucacuuuaaacaguacgaguguagcuccccuccgaauaaccaggugaugcccugcgaaccuaucauuaucgagagaaauauuacagaaaucguguaucugaccaacacaaccauugagaaggaaaucugucccaaacucauggaguaccggaauuggucuaagccucagugcaaaauuacgggguucgcccccuuuagcaaggacaacuccauccgccugucugcgggaggcgauaucugggucaccagagagccuuaugugagcugugacccggggaagugcuaccaauucgcucuuggacagggcacaacccuggauaauaaacauuccaacgacacaauucacgaucggacccccuaucgcacgcuccugaugaaugaacuggggguuccuuuucaucucggaacaagacagguguguaucgccuggucuagcuccagcugccacgacggcaaggccuggcugcaugucugugugaccggccacgauaaaaacgcuacagccucuuucauuuacgacgggcggcuuguugauuccaucggaagcuggucuaagaauauucugcgcacccaggaguccgaaugcguguguaucaacgggaccugcacagucgugaugacggacggcagcgcuuccgagagagccgagaccaaaauccucuuuauugaagagggaaagaucgugcacauuucuccccugagcggcuccgcgcaacaugucgaagagugcagcuguuauccucgguaccccgggguucgcugcguguguagagauaauuggaagggaucuaaccggccgguggucgacaucaaugugaaagauuacuccauuguuagcucuuaugugugcagcggccuugucggcgacacaccucgcaagaacgacagauccucuagcuccuacugucggaaccccaauaacgaaaaagggaaucacggagugaagggcugggccuucgaugacgggaacgauguuuggaugggacgcaccaucagcgaggagucuagauccggcuaugaaacauuuaaagugaucgggggauggagcaccccuaauucuaagcugcagauuaaccggcaggucaucguggacuccgauaauagaagcggcuacuccggcauuuucucugucgaggggaaaagcugcaucaaccgcuguuuuuauguggaacucauucggggaagagagcaggaaacgcgcguuugguggacauccaauucuaucguggucuucugcggcaccagcgggaccuacggaacaggcuccuggcccgacggggcugauauuaaccugaugcccaucuga

SEQ ID NO: 214075 - RNA, 1410 nt, Artificial Sequence
  derived and/or modified CDS sequence (opt5) from neuraminidase__InfluenzaA__AFG99185
augaaccccaaucagaagaucauuaccaucggcagcgugucccugacaauugccacgaucugcuuccucaugcaaauugcuauccuggucaccacaguuacccuucacuuuaaacaguacgaguguucuagcccuccgaacaaucaggugaugcccugcgaaccuaucauuaucgagagaaacauuacagaaaucguguaucugaccaauacaaccauugagaaggaaaucugucccaaacucgucgaguaccggaacugguccaagccucagugcaaaauuacgggguucgcccccuuuucuaaggacaauagcauccgccuguccgcgggaggcgauaucugggugaccagagagccuuauguuucuugugacccggggaagugcuaccaauucgcucuuggacagggcacaacccugaacaauaaacauagcaacgauacaauucacgaccggacccccuaucgcacgcuccugaugaaugaacugggggugccuuuucaucucggaacaaagcaggucuguaucgccugguccuccucuuccugccacgauggcaaagccuggcugcauguguguguuaccggccacgacaagaacgcuacagccagcuucauuuacgaugggagacuuguggacucuaucggauccuggagcaaaaauauucugcggacccaggagucugaaugcgucuguaucaacgggaccugcacaguggugaugacggauggcuccgcuagcgagcgcgccgacaccaagauccucuuuauugaggaaggaaagaucguccacauuagcccccugucuggcagcgcgcaacauguugaggaaugcuccuguuauccuagauaccccggggugcggugcgugugucgcgauaauuggaaaggaagcaacagaccgaucgucgacauuaacgugaaggauuacucuaucguuuccagcuaugugugcucuggccuugucggcgacacaccucggaaaaaugaccgcagcuccucuagcuacuguagaaaccccaauaacgagaaggggaaucacggagugaaaggcugggccuucgaugacgggaacgauguuuggaugggacggaccaucggcgaggaacugcgcuccggguaugagacauuuaaggugauuggaggcuggagcaccccuaauucuaaacuccagaucaacagacaggucauuguggacuccaagaaucggagcggcuacucugggaucuucuccgucgaaggaaagagcugcauuaacagauguuuuuauguggagcugauccgcggccgggaacaggagacgagaguuugguggacauccaauucuauuguggucuucugcgggaccagcggaaccuacggcacaggguccuggcccgauggcgcugacaucaaccugaugcccaucuga

SEQ ID NO: 214076 - RNA, 1410 nt, Artificial Sequence
  derived and/or modified CDS sequence (opt5) from neuraminidase__InfluenzaA__AFG99196
augaaccccaaucagaagaucauuaccaucggcagcgugucccugacaauugccacgaucugcuuccucacccaaauugcuauccuggucacaaccguuacacuucacuuuaaacaguacgaguguucuagcuccccuaacaaucaggugaugccgugcgaacccaucauuaucgagagaaacauuaccgaaaucguguaucugacaaauaccacgauugagaaggaaaucuguccuaaacucgucgaguaccggaacuggucuaagccccagugcaaaauuaccggguucgccccuuuuagcaaggacaauuccauccgccugucugcgggaggcgauaucugggugacaagagagcccuauguuagcugugacccugggaagugcuaccaauucgcucuuggacagggcaccacacugaacaauaaacauuccaacgauaccauucacgaccggacgccguaucgcacacuccugaugaaugaacugggggugcccuuucaucucggaaccaagcaggucuguaucgccuggucuagcuccagcugccacgauggcaaagccuggcugcauguguguauuacaggccacgacaagaacgcuaccgccucuuucaucuacgaugggagacuuguugacuccauuggaagcuggucuaaaaauauccugcggacccaggaguccgaaugcguguguaucaacggcacaugcacggucgugaugaccgaugggagcgcuuccgagcgcgccgacacaaagauucucuuuaucgaggaaggaaagauugugcacaucucuccucugagcggcuccgcgcaacaugucgaggaaugcagcuguuaucccagauacccugggguucggugcgugugucgcgauaauuggaaaggaucuaacagacccauuguggacaucaacgucaaggauuacuccaucgugagcucuuauguuugcagcggccuugugggcgacaccccgcggaaaaaugaccgcuccucuagcuccuacuguagaaacccuaauaacgagaaggggaaucacggagucaaaggcugggccuucgaugacgggaacgauguguggaugggacggacaauuggcgaggaacugcgcagcggguaugagaccuuuaagguuaucggaggcuggucuacgcccaauuccaaacuccagauuaacagacaggugaucgucgacagcggcaaucggucuggguacuccggaauuuucagcguggaaggcaaguccugcaucaacagauguuuuuaugucgagcugauucgcgggcgggaacaggagacaagagugugguggaccucuaauagcaucguuguguucugcggaaccuccggcacauacgggaccggcucuuggccugauggagcugacaucaaccugaugcccauuuga

SEQ ID NO: 214077 - RNA, 1410 nt, Artificial Sequence
  derived and/or modified CDS sequence (opt5) from neuraminidase__InfluenzaA__AFG99207
augaaccccaaucagaagaucauuaccaucggcagcgugucccugacaauugccacgaucugcuuccucaugcaaauugcuauccuggucaccacaguuacccuucacuuuaaaccuuacgaguguucuagcccgcccaacaaucaggugaugccuugcgaacccaucauuaucgagagaaacauuacagaaaucguguaucugaccaauacaaccauugagaaggaaaucuguccuaaacucgucgaguaccggaacugguccaagccccagugcaaaauuacgggguucgccccuuuuucuaaggacaauagcauccgccuguccgcgggaggcgauaucugggugaccagagagccguauguuucuugugaccccgggaagugcuaccaguucgcucuuggacaaggcacaacccugaacaauaaacauagcaacgauacaauucacgaccggaccccuuaucgcacgcuccugaugaaugaacugggggugcccuuucaucucggaacaaagcaggucuguaucgccugguccucuagcuccugccacgauggcaaagccuggcugcauguguguguuaccggccacgacaagaacgcuacagccagcuucauuuacgaugggagacuuguggacucuaucggauccuggagcaaaaauauucugcggacccaggagucugaaugcgucuguaucaacgggaccugcacaguggugaugacggauggcuccgcuagcgagcgcgccgacaccaagauccucuuuauugaggaaggaaagaucguccacauuuccccucugucuggcagcgcgcagcauguugaggaaugcuccuguuaucccagauacccgggggugcggugcgugugucgcgauaauuggaaaggaagcaacagaccuaucgucgacauuaacgugaaggauuacucuaucguuuccagcuaugugugcucuggccuugucggcgacacaccccggaaaaaugaccgcagcuccucuagcuacuguagaaacccuaauaacgagaaggggaaucacggagugaaaggcugggccuucgaugacgggaacgauguuuggaugggacggaccaucggcgaggaacugcgcuccggguaugagacauuuaaggugauuggaggcuggagcacccccaauucuaaacuccaaaucaacagacaggucauuguggacuccaagagccggucuggcuacuccgggaucuucagcgucgaaggaaaguccugcauuaauagauguuuuuauguggagcugauccgcggccgggaacaggagacgagaguuugguggacaucuaacagcauuguggucuucugcgggaccuccggaaccuacggcacagggucuuggcccgauggcgcugacaucaaucugaugccuaucuga

SEQ ID NO: 214078 - RNA, 1410 nt, Artificial Sequence; identical to SEQ ID NO: 206886
  derived and/or modified CDS sequence (opt5) from neuraminidase__InfluenzaA__AFG99218

SEQ ID NO: 214079 - RNA, 1410 nt, Artificial Sequence
  derived and/or modified CDS sequence (opt5) from neuraminidase__InfluenzaA__AFG99229
augaaccccaaucagaagaucauuaccaucggcagcgugucccugacaauugccacgaucugcuuccucaugcaaauugcuauccuggucaccacaguuacccuucacuuuaaacaguacgaguguucuagcccuccgaacaaucaggugaugcccugcgaaccuaucauuaucgagagaaacauuacaaagaucguguaucugaccaauacaaccauugaaaaagagaucugucccaagcucgucgaauaccggaacugguccaaaccucagugcaagauuacgggguucgcccccuuuucuaaggacaauagcauccgccuguccgcgggaggcgauaucugggugaccagagagccuuauguuucuugugacccggggaaaugcuaccaauucgcucuuggacagggcacaacccugaacaauaagcauagcaacgauacaauucacgaccggacccccuaucgcacgcuccugaugaaugagcugggggugccuuuucaucucggaacaaaacaggucuguaucgccugguccuccucuuccugccacgauggcaaggccuggcugcauguguguguuaccggccacgacaaaaacgcuacagccagcuucauuuacgaugggagacuuguggacucuaucggauccuggagcaagaauauucugcggacccaggaaucugagugcgucuguaucaacgggaccugcacaguggugaugacggauggcuccgcuagcgaacgcgccgacaccaagauccucuuuauugaggagggaaaaaucguccacauuagcccccugucuggcagcgcgcaacauguugaagagugcuccuguuauccuagauaccccggggugcggugcgugugucgcgauaauuggaagggaagcaacagaccgaucgucgacauuaacgugaaagauuacucuaucguuuccagcuaugugugcucuggccuugucggcgacacaccucggaagaaugaccgcagcuccucuagcuacuguagaaaccccaauaacgaaaaagggaaucacggagugaagggcugggccuucgaugacgggaacgauguuuggaugggacggaccaucggcgaggaacugcgcuccggguaugagacauuuaaagugauuggaggcuggagcaccccuaauucuaagcuccagaucaacagacaggucauuguggacuccaagaaucggagcggcuacucugggaucuucuccgucgagggaaaaagcugcauuaacagauguuuuuauguggaacugauccgcggccgggagcaggaaacgagaguuugguggacauccaauucuauuguggucuucugcgggaccagcggaaccuacggcacaggguccuggcccgauggcgcugacaucaaccugaugcccaucuga

SEQ ID NO: 214080 - RNA, 1410 nt, Artificial Sequence
  derived and/or modified CDS sequence (opt5) from neuraminidase__InfluenzaA__AFG99240
augaaccccaaucagaagaucauuaccaucggcagcgugucccugacaauugccacgaucugcuuccucaugcaaauugcuauccuggucaccacaguuacccuucacuuuaaacaguacgaguguucuagcccuccguccaaccaggugaugcccugcgaaccuaucauuaucgagagaaauauuacagaaaucguguaucugaccaacacaaccauugagaaggaaaucugucccaaaccugucgaguaccggaauuggucuaagccccagugcaaaauuacgggguucgccccuuuuagcaaggacaacuccauccgccucucugcgggaggcgauaucugggugaccagagagccguauguuagcugugaccccgggaagugcuaccaauucgcucugggacagggcacaacccuuaauaacaaacauuccaaugauacaauucacgaccggaccccuuaucgcacgcugcucaugaacgaacugggggugcccuuucaucugggaacaaagcaggucuguaucgccuggucuagcuccagcugccacgauggcaaagccuggcuccauguguguguuaccggccacgacaagaaugcuacagccucuuucauuuacgaugggagacugguggacuccaucggaagcuggucuaaaaacauucuucggacccaggaguccgaaugcgucuguaucaaugggaccugcacaguggugaugacggauggcagcgcuuccgagcgcgccgacaccaagauccuguuuauugaggaaggaaagaucguccacauuucuccucucagcggcuccgcgcaacauguugaggaaugcagcuguuaucccagauacccgggggugcggugcgugugucgcgauaacuggaaaggaucuaauagaccuaucgucgacauuaacgugaaggauuacuccaucguuagcucuuaugugugcagcggccuggucggcgacacaccccggaaaaacgaccgcuucuccucuagcuacuguagaaauccuaacaaugagaaggggaaccacggagugaaaggcugggccuuugaugacgggaaugauguuuggaugggacggaccaucggcgaggaacuucgcuccggguaugagacauucaaggugauuggaggcuggagcacccccaacucuaaacugcagaucaauagacaggucauuguggacuccaagaaccggagcggcuacucugggaucuuuuccgucgaaggaaagagcugcauuaauagauguuucuauguggagcucauccgcggccgggaacaggagacgagaguuugguggacauccaacucuauuguggucuuuugcgggaccagcggaaccuacggcacaggguccuggcccgauggcgcugacaucaaucugaugccuaucuga

SEQ ID NO: 214081 - RNA, 1410 nt, Artificial Sequence; identical to SEQ ID NO: 206885
  derived and/or modified CDS sequence (opt5) from neuraminidase__InfluenzaA__AFG99251

SEQ ID NO: 214082 - RNA, 1410 nt, Artificial Sequence
  derived and/or modified CDS sequence (opt5) from neuraminidase__InfluenzaA__AFG99273
augaaccccaaucagaagaucauuaccaucggcagcgugucccugacaauugccacgaugugcuuccucaugcaaaucgcuauucuggucaccacaguuacccuucacuuuaaacaguacgaguguucuagcccuccgaacaaucaggugaugcccugcgaaccuacaaucaucgagagaaacauuaccgaaaucguguaucugacaaauaccacgauugagaaggaaaucugucccaaacucgucgaguaccggaacugguccaagccucagugcaaaauuaccggguucgcccccuuuucuaaggacaauagcauccgccuguccgcgggaggcgauauuugggugacaagagagccuuauguuucuugugacccggggaagugcuaccaauucgcucuuggacagggcaccacacugaacaaucggcauagcaacgauaccgugcacgaccgcacgcccuauagaacacuccugaugaaugaacugggggucccuuuucaucucggaaccaaacagguguguaucgccugguccuccucuuccugccacgauggcaaggccuggcugcauguuugugugacaggccacgacaaaaacgcuaccgccagcuucaucuacgaugggcggcuugucgacucuauuggauccuggagcaagaauauccugcgcacccaggagucugaaugcguguguauuaacggcacaugcacgguggucaugaccgauggguccgcuagcgagagagccgacacaaaaauccucuuuauugaggaaggaaagaucguucacaucagcccccugucuggcagcgcgcaacauguggaggaaugcuccuguuauccucgguaccccggggugcgcugcgucuguagagauaauuggaagggaagcaaccggccgauuguggacaucaacguuaaagauuacucuauuguguccagcuaugucugcucuggccuugugggcgacaccccucgcaagaaugacagaagcuccucuagcuacugucggaaccccaauaacgagaaagggucccacggaguuaagggcugggccuucgaugacgggaaugauguguggaugggacgcacaaucggcgaggaacugagaagcggguaugagaccuuuaaagucauuggaggcuggucuacgccuaacuccaagcuccagaucaauagacaggugaucgucgacagcggcaaccggucuggguacuccggaauuuucagcguggaaggcaaauccugcaucaaucgcuguuuuuauguugagcugauucgggggagagaacaggagacacgcgugugguggaccucuaacagcaucgucguguucugcggaaccuccggcacauacgggaccggcucuuggcccgauggagcugacauuaaucugaugcccaucuga

SEQ ID NO: 214083 - RNA, 1410 nt, Artificial Sequence
  derived and/or modified CDS sequence (opt5) from neuraminidase__InfluenzaA__AFG99284
augaaccccaaucagaagaucauuaccaucggcagcgugucccugacaauugccacgaucugcuuccucaugcaaauugcuauccuggucaccacaguuacccuucacuuuaaacaguacgaguguucuagcccuccguccaaccaggugaugcccugcgaaccuaucauuaucgagagaaauauuacaaagaucguguaucugaccaacacaaccauugaaaaagagaucugucccaagcucgucgaauaccggaauuggucuaaaccucagugcaagauuacgggguucgcccccuuuagcaaggacaacuccauccgccugucugcgggaggcgauaucugggugaccagagagccuuauguuagcugugacccguccaaaugcuaccaauucgcucuugggcagggaacaacccugaauaacaagcauagcaaugauacaauucacgaccggacccccuaucgcacgcuccugaugaacgagcugggcgugccuuuucaucucgggacaaaacaggucuguaucgccuggucuuccagcucuugccacgauggaaaggccuggcugcauguguguguuaccggccacgacgauaaugcuacagccuccuucauuuacgacggcagacuuguggauagcaucgggucuugguccaaaaacauucugcggacccaggaaagcgagugcgucuguaucaauggaaccugcacaguggugaugacggacggcuccgcuucugaacgcgccgauaccaagauccucuuuauugaggaggggaagaucguccacauuagcccccuguccggaagcgcgcaacauguugaagagugcucuuguuauccuagauaccccggcgugcggugcgugugucgcgacaacuggaaaggguccaauagaccgaucgucgauauuaacgugaaggacuacagcaucguuucuagcuaugugugcuccggacuugucggcgacacaccucggaaaaacgaucgcucuagcuccagcuacuguagaaaucccaacaaugaaaagggcucucacggggugaaaggaugggccuucgacgauggcaacgacguuuggauggggcggaccaucggagaggaacugcgcuccggcuaugagacauuuaaggugauugggggauggagcaccccuaauucuaaacuccagaucaacagacaggucauuguggauuccaagaaucggagcggcuacuccggcaucuucucugucgagggaaagagcugcauuaacagauguuuuuauguggaacugauccgcgggcgggagcaggaaacgagaguuugguggacauccaauucuauuguggucuucugcggcaccagcgggaccuacggaacaggcuccuggcccgacggggcugauaucaaccugaugcccaucuga

SEQ ID NO: 214084 - RNA, 1410 nt, Artificial Sequence
  derived and/or modified CDS sequence (opt5) from neuraminidase__InfluenzaA__AFG99295
augaaccccaaucagaagaucauuaccaucggcagcgugucccugacaauugccacgaucugcuuccucaugcaaauugcuauccuggucaccacaguuacccuucacuuuaaacaguacgaguguucuagcccuccgaacaaucaggugaugcccugcgaaccuacaaucauugagagaaacaucaccgaaauuguguaucugacaaauaccacgaucgagaaggaaauuugucccaaacucgucgaguaccggaacugguccaagccucagugcaaaaucaccggguucgcccccuuuucuaaggacaauagcauucgccuguccgcgggaggcgauaucugggugacaagagagccuuauguuucuugugacccggauaagugcuaccaauucgcucuugggcagggaaccacacugaacaaucggcauagcaacgacaccgugcacgaucgcacgcccuauagaacacuccugaugaaugaacugggcgucccuuuucaucucgggaccaaacagguguguaucgccugguccuccucuuccugccacgacggaaaggccuggcugcauguuugugugacaggccacgauaaaaacgcuaccgccagcuucauuuacaauggccggcuugucgacucuaucggguccuggagcaagaacauucugcgcacccaggagucugaaugcguguguaucaauggaacaugcacgguggucaugaccgauggcuccgcuagcgagagagccgacacaaaaauucucuuuaucgaggaagggaagaucguucacauuagcccccugucuggaagcgcgcaacauguggaggaaugcuccuguuauccucgguaccccggcgugcgcugcgucuguagagauaacuggaaggggagcaaccggccgaucguggacauuaauguuaaagauuacucuaucauuuccagcuaugugugcucuggacuugucggcgacaccccucgcaagaacgacagaagcuccucuagcuacugucagaaucccaacaaugagaaaggcucccacggggugaagggaugggccuucgaugacggcaacgauguuuggauggggcggacaaucggagaggaacugcgcagcggcuaugagaccuuuaaagugaucgggggauggucuacgccuaauuccaagcuccagauuaacagacaggucaucguggacagcggcaaucggucuggcuacuccgggauuuucagcgucgaaggaaaauccugcaucaacagauguuuuuauguggagcugauucgcggccggaagcaagaaacaagaguuugguggaccucuaauagcaucguggucuucugcgggaccuccggaacauacggcaccgggucuuggcccgauggcgcugacauuaaccugaugcccaucuga

SEQ ID NO: 214085 - RNA, 1410 nt, Artificial Sequence
  derived and/or modified CDS sequence (opt5) from neuraminidase__InfluenzaA__AFG99317
augaaccccaaucagaagaucauuaccaucggcagcgugucccugacaauugccacgaucugcuuccucaugcaaauugcuauccuggucaccacaguuacccuucacuuuaaacaguacgaguguucuagcccuccgaacaaucaggugaugcccugcgaaccuacaaucauugagagaaacaucaccgaaauuguguaucugacaaauaccacgaucgagaaggaaauuugucccaaacucgucgaguaccggaacugguccaagccucagugcaauaucaccggguucgcccccuuuucuaaagacaacagcauucgccuguccgcgggaggcgauaucugggugacaagagagccuuauguuucuugugacccggggaagugcuaccaauucgcucuuggacagggcaccacacugaauaaccggcauagcaaugauaccgugcacgaccgcacgcccuauagaacacuccugaugaacgaacugggggucccuuuucaucucggaaccaaacagguguguaucgccugguccuccucuuccugccacgauggcaaggccuggcugcauguuugugugacaggccacgacgagaaugcuaccgccagcuucauuuacgaugggcggcuugucgacucuaucggauccuggagcaagaacauucugcgcacccaggaaucugagugcguguguaucaauggcacaugcacgguggucaugaccgauggguccgcuagcgagagagccgacacaaaaauucucuuuaucgaagagggaaagaucguucacauuagcccccugucuggcagcgcgcaacauguggaagagugcuccuguuauccucgguaccccggggugcgcugcgucuguagagauaacuggaaaggaagcaaccggccgaucguggacauuaauguuaaggauuacucuaucguguccagcuaugucugcucuggccuugugggcgacaccccucgcaagaacgacagaagcuccucuagcuacugucggaaucccaacaaugaaaaagggucccacggaguuaagggcugggccuucgaugacgggaacgauguguggaugggacgcacaauugacgaggagcugagaagcggcuaugaaaccuuuaaagucaucgggggauggucuacgccuaauuccaagcuccagaucaacagacaggugauugucgauagcggcaaucggucuggcuacuccgggaucuucagcguggagggaaaauccugcauuaaccgcuguuuuuauguugaacugauccggggcagaaagcaggagacacgcgugugguggaccucuaauagcauugucguguucugcgggaccuccggaacauacggcaccgggucuuggcccgacggcgcugauaucaaccugaugcccauuuga

SEQ ID NO: 214086 - RNA, 1410 nt, Artificial Sequence
  derived and/or modified CDS sequence (opt5) from neuraminidase__InfluenzaA__AFG99328
augaaccccaaucagaagaucauuaccaucggcagcgugucccugacacucgccacgauuugcuuccugaugcaaaucgcuauucuugucaccacaguuacccugcacuuuaaacaguacgaguguucuagcccuccgaacaaucaggugaugcccugcgaaccuacaaucaucgagagaaacauuaccgaaaucguguaucucacaaauaccacgauugagaaggaaaucugucccaaacuggucgaguaccggaacugguccaagccucagugcaaaauuaccggguucgcccccuuuucuaaggacaauagcauccgccuuuccgcgggaggcgauauuugggugacaagagagccuuauguuucuugugacccgagcaagugcuaccaauucgcucuggggcagggaaccacacucaacaaucggcauuccaacgauaccgugcacgaccgcacgcccuauagaacacugcugaugaaugaacucggcgucccuuuucaucuggggacccgccagguguguauggccuggucuagcuccagcugccacgauggaaaagccuggcuucauguuugugugacaggccacgacgagaacgcuaccgccucuuucaucuacgauggccggcuggucgacuccaucgggagcuggucuaagaaugugcucagaacccaggaauccgagugcguguguauuaacggaacaugcacggucguuaugaccgauggcagcgcuuccgagcgggccgacacaaaaauccuguuuauugaagaggggaagaucgugcacauuucuccccuuagcggaaaugcgcaacauguggaagagugcuccuguuauccucgcuaccccggcgucagaugcgugugucgggauaacuggaaagggagcaaccgcccgaucguugacaucaaugugaaggauuacucuauugucuccagcuaugugugcucuggacugguuggcgacaccccuagaaagaacgaccggagcuccucuagcuacugucgcaaucccaacaaugaaaaaggcucccacggggugaagggaugggccuucgaugacggcaacgaugucuggauggggagaacaaucggagaggagcuccggagcggcuaugaaaccuuuaaagugauugggggauggucuacgccuaauuccaagcugcagaucaacagacaggucauuguggacagcggcaaucgcucuggcuacuccgggaucuucagcguugagggaaaauccugcaucaaccgguguuuuuauguggaacugauuagaggccgcaagcaggagacacgggucugguggaccucuaauagcaucgugguuuucugcgggaccuccggaacauacggcaccgggucuuggcccgauggcgcugacauuaaccucaugcccaucuga

SEQ ID NO: 214087 - RNA, 1410 nt, Artificial Sequence
  derived and/or modified CDS sequence (opt5) from neuraminidase__InfluenzaA__AFG99350
augaaccccaaucagaagaucauuaccaucggcagcgugucccugacacucgccacgauuugcuuccugaugcaaaucgcuauucuugucaccacaguuacccugcacuuuaaacaguacgaguguucuagcccuccgaacaaucaggugaugcccugcgaaccuacaaucaucgagagaaacauuaccgaaaucguguaucucacaaauaccacgauugagaaggaaaucugucccaaacuggucgaguaccggaacugguccaagccucagugcaaaauuaccggguucgcccccuuuucuaaggacaauagcauccgccuuuccgcgggaggcgauauuugggugacaagagagccuuauguuucuugugacccgagcaagugcuaccaauucgcucuggggcagggaaccacacucaacaaucggcauuccaacgauaccgugcacgaccgcacgcccuauagaacacugcugaugaaugaacucggcgucccuuuucaucuggggacccgccagguguguauggccuggucuagcuccagcugccacgauggaaaagccuggcuucauguuugugugacaggccacgacgagaacgcuaccgccucuuucaucuacgauggccggcuggucgacuccaucgggagcuggucuaagaauauucucagaacccaggaauccgagugcguguguaucaacggaacaugcacgguggucaugaccgauggcagcgcuuccgagcgggccgacacaaaaauucuguuuaucgaagaggggaagauuguucacaucucuccccuuagcggauccgcgcaacauguggaagagugcagcuguuauccucgcuaccccggcgugagaugcgucugucgggauaauuggaaagggucuaaccgcccgaucguggacauuaacguuaaggauuacuccaucgugagcucuuaugucugcagcggacuggugggcgacaccccuagaaagaaugaccgguccucuagcuccuacugucgcaaccccaauaacgaaaaaggcagccacgggguuaagggaugggccuucgaugacggcaaugauguguggauggggagaacaauuggagaggagcuccggucuggcuaugaaaccuuuaaagucaucgggggaugguccacgccuaacagcaagcugcagauuaauagacaggugaucgucgacucuggcaaccgcuccggcuacagcgggaucuucuccguggagggaaaaucuugcauuaaucgguguuuuuauguugaacugaucagaggccgcaagcaggagacacgggugugguggaccagcaacuccauugucguguucugcgggaccucuggaacauacggcaccgggagcuggcccgauggcgcugacaucaaucucaugcccauuuga

SEQ ID NO: 214088 - RNA, 1410 nt, Artificial Sequence
  derived and/or modified CDS sequence (opt5) from neuraminidase__InfluenzaA__AFG99361
augaaccccaaucagaagaucauuaccaucggcagcgugucccugacaauugccacgaucugcuuccucaugcaaauugcuauccuggucaccacaguuacccuucacuuuaaacaguacgaguguaacucuccuccgaauaaccaggugaugcugugcgaacccacaaucauugagagaaauaucaccgaaauuguguaucucacaaacaccacgaucgagaaggaaaaauguccuaagcuggccgaguaccggaauuggagcaaaccccagugcaagauuaccggguucgcgccuuuuuccaaggacaacucuauccgccuuagcgcuggaggcgauauuugggucacaagagagcccuauguguccugugacccugggaaaugcuaccaauucgcccugggacagggcaccacacucaauaaccggcauucuaaugauaccguucacgaccgcacgccguauagaacacugcugaugaacgaacucggggugcccuuucaucugggaaccaagcaggucuguaucgccuggagcuccagcucuugccacgauggcaaggcuuggcuucauguguguguuacaggccacgacgagaaugccaccgcuuccuucaucuacgaugggcggcugguggacagcauuggaucuugguccaaaaacauccuccgcacccaggaaagcgagugcgucuguauuaauggcacaugcacgguggugaugaccgaugggucugccuccgagagagcggacacaaaaauccuguuuauugaagagggaaagaucguccacaucagcccucuuuccggcucugcccaacauguugaagagugcagcuguuauccccgguacccuggggugcgcugcguguguagagauaacuggaagggauccaaccggcccauugucgacaucaaugugaaagauuacagcauuguuucuuccuaugugugcagcggccuggucggcgacaccccgcgcaagaacgacucuagcuccucuagcuacuguagaaauccuaacaaugaaaaagggucccacggagugaagggcugggcuuucgaugacgggaacgauguuuggaugggacggacaaucagcgaggagcuccgcucuggcuaugaaaccuuuaaagugauugggggaugguccaagcccaauagcaaacugcagaucaacagacaggucaucguggaccggggcaauagaucuggcuacuccgggauuuucagcgucgagggaaaguccugcaucaaccgcuguuuuuauguggaacugauucggggcagaaagcaggagacggaaguuugguggacaucuaauagcaucguggucuucugcgggaccuccggaaccuacggcacagggucuuggccugauggcgccgacauuaaccucaugcccaucuga

SEQ ID NO: 214089 - RNA, 1410 nt, Artificial Sequence
  derived and/or modified CDS sequence (opt5) from neuraminidase__InfluenzaA__AFG99383
augaaccccaaucagaagaucauuaccaucggcagcgugucccugacaauugccacgaucugcuuccucaugcaaauugcuauccuggucaccacaguuacccuucacuuuaaacaguacgaguguucuagcccuccgaacaaucaggugaugcccugcgaaccuacaaucauugagagaaacaucaccgaaauuguguaucugacaaauaccacgaucgagaaggaaauuugucccaaacucgucgaguaccggaacugguccaagccucagugcaaaaucaccggguucgcccccuuuucuaaggacaauagcauucgccuguccgcgggaggcgauaucugggugacaagagagccuuauguuucuugugacccggggaagugcuaccaauucgcucuuggacagggcaccacacugaacaaucggcauagcaacgauaccgugcacgaccgcacgcccuauagaacacuccugaugaaugaacugggggucccuuuucaucucggaaccaaacagguguguaucgccugguccuccucuuccugccacgauggcaaggccuggcugcauguuugugugacaggccacgacgagaacgcuaccgccagcuucauuuacgaugggcggcuugucgacucuaucggauccuggagcaaaaauauucugcgcacccaggaaucugagugcguguguaucaacggcacaugcacgguggucaugaccgauggguccgcuagcgagagagccgacacaaagauucucuuuaucgaagagggaaaaaucguucacauuagcccccugucuggcagcgcgcaacauguggaagagugcuccuguuauccucgguaccccggggugcgcugcgucuguagagauaauuggaagggaagcaaccggccgaucguggacauuaacguuaaggauuacucuaucguguccagcuaugucugcucuggccuugugggcgacaccccucgcaaaaaugacagcuccucuagcuccuacuguagaaaccccaauaacgaaaaggggagccacggaguuaaaggcugggccuucgaugacgggaaugauguguggaugggacggacaauuggcgaggagcugcgcucuggguaugaaaccuuuaaggucaucggaggcugguccacgccuaacagcaaacuccagaucaauagacaggugauugucgacucuggcaaccgguccggguacagcggaaucuucuccguggagggcaagucuugcauuaauagauguuuuuauguugaacugauccgcgggcggaaacaggagacaaaggugugguggaccagcaacuccauugucguguucugcggaaccucuggcacauacgggaccggcagcuggcccgauggagcugacaucaaucugaugcccauuuga

SEQ ID NO: 214090 - RNA, 1410 nt, Artificial Sequence; identical to SEQ ID NO: 214089
  derived and/or modified CDS sequence (opt5) from neuraminidase__InfluenzaA__AFG99394

SEQ ID NO: 214091 - RNA, 1410 nt, Artificial Sequence
  derived and/or modified CDS sequence (opt5) from neuraminidase__InfluenzaA__AFG99405
augaaccccaaucagaagaucauuaccaucggcagcgugucccugacaauugccacgaucugcuuccucaugcaaauugcuauccuggucaccacaguuacccuucacuuuaaacaguacgaguguucuagcccuccgaacaaucaggugaugcccugcgaaccuacaaucauugagagaaacaucaccgaaauuguguaucugacaaauaccacgaucgagaaggaaauuugucccaaacucgucgaguaccggaacugguccaagccucagugcaaaaucaccggguucgcccccuuuucuaaggacaauagcauucgccuguccgcgggaggcgauaucugggugacaagagagccuuauguuucuugugacccggggaagugcuaccaauucgcucuuggacagggcaccacacugaacaaucggcauagcaacgauaccgugcacgaccgcacgcccuauagaacacuccugaugaaugaacugggggucccuuuucaucucggaaccaaacagguguguaucgccugguccuccucuuccugccacgauggcaaggccuggcugcauguuugugugacaggccacgacaaaaacgcuaccgccagcuucauuuacgaugggcggcuugucgacucuaucggauccuggagcaagaauauucugcgcacccaggagucugaaugcguguguaucaacggcacaugcacgguggucaugaccgauggguccgcuagcgagagagccgacacaaaaauucucuuuaucgaggaaggaaagaucguucacauuagcccccugucuggcagcgcgcaacauguggaggaaugcuccuguuauccucgguaccccggggugcgcugcgucuguagagauaauuggaagggaagcaaccggccgaucguggacauuaacguuaaagauuacucuaucauuuccagcuaugugugcucuggccuugucggcgacaccccucgcaagaaugacagaagcuccucuagcuacugucggaaccccaauaacgagaaagggucccacggagugaagggcugggccuucgaugacgggaaugauguuuggaugggacgcacaaucggcgaggaacugagaagcggguaugagaccuuuaaagugaucggaggcuggucuacgccuaacuccaagcuccagauuaaucggcaggucaucguggacagcggcaacagaucuggguacuccggaauuuucagcgucgaaggcaaauccugcaucaaucgcuguuuuuauguggagcugauucgggggagagaacaggagacacgcguuugguggaccucuaacagcaucguggucuucugcggaaccuccggcacauacgggaccggcucuuggcccgauggagcugacauuaaucugaugcccaucuga

SEQ ID NO: 214092 - RNA, 1410 nt, Artificial Sequence
  derived and/or modified CDS sequence (opt5) from neuraminidase__InfluenzaA__AFG99416
augaaccccaaucagaagaucauuaccaucggcagcgugucccugacaauugccacgaucugcuuccucaugcaaauugcuauccuggucaccacaguuacccuucacuuuaaacaguacgaguguucuagcccuccgaacaaucaggugaugcccugcgaaccuacaaucauugagagaaacaucaccgaaauuguguaucugacaaauaccacgaucgagaaggaaauuugucccaaacucgucgaguaccggaacugguccaagccucagugcaaaaucaccggguucgcccccuuuucuaaggacaauagcauucgccuguccgcgggaggcgauaucugggugacaagagagccuuauguuucuugugacccggggaagugcuaccaauucgcucuuggacagggcaccacacugaacaaucggcauagcaacgauaccgugcacgaccgcacgcccuauagaacacuccugaugaaugaacugggggucccuuuucaucucggaaccaaacagguguguaucgccugguccuccucuuccugccacgauggcaaggccuggcugcauguuugugugacaggccacgacgagaacgcuaccgccagcuucauuuacgaugggcggcuugucgacucuaucggauccuggagcaaaaauauucugcgcacccaggaaucugagugcguguguaucaacggcacaugcacgguggucaugaccgauggguccgcuagcgagagagccgacacaaagauucucuuuaucgaagagggaaaaaucauucacaucagcccccugucuggcagcgcgcaacauguugaagagugcuccuguuauccucgguaccccggggugcgcugcguguguagagauaauuggaagggaagcaaccggccgauugucgacaucaacgugaaggauuacucuauuguuuccagcuaugugugcucuggccuugucggcgacaccccucgcaaaaaugacagcuccucuagcuccuacuguagaaaccccaauaacgaaaaggggagccacggagugaaaggcugggccuucgaugacgggaaugauguuuggaugggacggacaaucggcgaggagcugcgcucuggguaugaaaccuuuaaggugaucggaggcugguccacgccuaacagcaaacuccagauuaauagacaggucaucguggacggcgggaaccggucuggauacuccggcauuuucagcgucgaggggaaguccugcaucaauagauguuuuuauguggaacugauucgcggacggaaacaggagacaaagguuugguggaccucuaacagcaucguggucuucugcggcaccuccgggacauacggcaccggaucuuggcccgauggcgcugacauuaaucugaugcccaucuga

SEQ ID NO: 214093 - RNA, 1410 nt, Artificial Sequence
  derived and/or modified CDS sequence (opt5) from neuraminidase__InfluenzaA__AFG99427
augaaccccaaucagaagaucauuaccaucggcagcgugucccugacaauugccacgaucugcuuccucaugcaaauugcuauccuggucaccacaguuacccuucacuuuaaacaguacgaguguucuagcccuccgaacaaucaggugaugcccugcgaaccuacaaucauugagagaaacaucaccgaaauuguguaucugacaaauaccacgaucgagaaggaagucugucccaaacucguggaguaccggaacugguccaagccucagugcaaaauuaccggguucgcccccuuuucuaaggacaauagcauccgccuguccgcgggaggcgauauuuggguuacaagagagccuuaugugucuugugacccggggaagugcuaccaauucgcucuuggacagggcaccacacugaacaaucggcauagcaacgauaccguccacgaccgcacgcccuauagaacacuccugaugaaugaacugggggugccuuuucaucucggaaccaaacagguuuguaucgccugguccuccucuuccugccacgauggcaaggccuggcugcaugugugugucacaggccacgacgagaacgcuaccgccagcuucaucuacgaugggcggcuuguggacucuauuggauccuggagcaaaaauauccugcgcacccaggaaucugagugcguguguauuaacggcacaugcacggucguuaugaccgauggguccgcuagcgagagagccgacacaaagauccucuuuauugaagagggaaaaaucauccacauuagcccccugucuggcagcgcgcaacauguggaagagugcuccuguuauccucgguaccccggggugcgcugcgucuguagagauaauuggaagggaagcaaccggccgaucguggacauuaacguuaaggauuacucuaucguguccagcuaugucugcucuggccuugugggcgacaccccucgcaaaaaugacagcuccucuagcuccuacuguagaaaccccaauaacgaaaaggggagccacggaguuaaaggcugggccuucgaugacgggaaugauguguggaugggacggacaauuggcgaggagcugcgcucuggguaugaaaccuuuaaggucaucggaggcugguccacgccuaacagcaaacuccagaucaauagacaggugauugucgacucuggcaaccgguccggguacagcggaaucuucuccguggagggcaagucuugcauuaauagauguuuuuauguugaacugauccgcgggcggaaacaggagacaaaggugugguggaccagcaacuccauugucguguucugcggaaccucuggcacauacgggaccggcagcuggcccgauggagcugacaucaaucugaugcccauuuga

SEQ ID NO: 214094 - RNA, 1410 nt, Artificial Sequence
  derived and/or modified CDS sequence (opt5) from neuraminidase__InfluenzaA__AFG99438
augaaccccaaucagaagaucauuaccaucggcagcgugucccugacaauugccacgaucugcuuccucaugcaaauugcuauccuggucaccacaguuacccuucacuuuagacaguacgaguguucuagcccuccgaacaaucaggugaugcccugcgaaccuacaaucauugagcggaacaucaccgaaauuguguaucugacaaauaccacgaucgagaaagaaauuugucccaagcucgucgaguaccgcaacugguccaaaccucagugcaagaucaccggguucgcccccuuuucuaaagacaauagcauuagacuguccgcgggaggcgauaucugggugacacgggagccuuauguuucuugugacccggggaagugcuaccaauucgcucuuggacagggcaccacacugaacaaucgccauagcaacgauaccgugcacgacagaacgcccuaucggacacuccugaugaaugaacugggggucccuuuucaucucggaaccaaacagguguguauggccugguccuccucuuccugccacgauggcaaggccuggcugcauguuugugugacaggccacgacgagaacgcuaccgccagcuucaucuacgaugggcgccuugucgacucuauuggauccuggagcaagaauauccugagaacccaggaaucugagugcguguguauuaacggcacaugcacgguggucaugaccgauggguccgcuagcgagcgggccgacacaaaaauccucuuuauugaagagggaaagaucguucacaucagcccccugucuggcagcgcgcaacauguggaagagugcuccuguuauccucgcuaccccggggugagaugcgucugucgggauaauuggaaaggaagcaaccgcccgauuguggacaucaacguuaaggauuacucuauuguguccagcuaugucugcucuggccuugugggcgacaccccuagaaagaaugaccggagcuccucuagcuacugucgcaaccccaauaacgaaaaagggucccacggaguuaagggcugggccuucgaugacgggaaugauguguggaugggaagaacaaucggcgaggagcugcggagcggguaugaaaccuuuaaagucauuggaggcuggucuacgccuaacuccaagcuccagaucaauagacaggugaucgucgacagcggcaaccgcucuggguacuccggaauuuucagcguggagggcaaauccugcaucaaucgguguuuuuauguugaacugauuagagggcgcaagcaggagacacgggugugguggaccucuaacagcaucgucguguucugcggaaccuccggcacauacgggaccggcucuuggcccgauggagcugacauuaaucugaugcccaucuga

SEQ ID NO: 214095 - RNA, 1410 nt, Artificial Sequence
  derived and/or modified CDS sequence (opt5) from neuraminidase__InfluenzaA__AFG99449
augaaccccaaucagaagaucauuaccaucggcagcgugucccugacaauugccacgaucugcuuccucaugcaaauugcuauccuggucaccacaguuacccuucacuuuagacaguacgaguguucuagcccuccgaacaaucaggugaugcccugcgaaccuacaaucauugagcggaacaucaccgaaauuguguaucugacaaauaccacgaucgagaaagaaauuugucccaagcucgucgaguaccgcaacugguccaaaccucagugcaagaucaccggguucgcccccuuuucuaaagacaauagcauuagacuguccgcgggaggcgauaucugggugacacgggagccuuauguuucuugugacccggggaagugcuaccaauucgcucuuggacagggcaccacacugaacaaucgccauagcaacgauaccgugcacgacagaacgcccuaucggacacuccugaugaaugaacugggggucccuuuucaucucggaaccaaacagguguguauggccugguccuccucuuccugccacgauggcaaggccuggcugcauguuugugugacaggccacgacgagaacgcuaccgccagcuucaucuacgaugggcgccuugucgacucuauuggauccuggagcaagaauauccugagaacccaggaaucugagugcguguguauuaacggcacaugcacgguggucaugaccgauggguccgcuagcgagcgggccgacacaaaaauccucuuuauugaagagggaaagaucguucacaucagcccccugucuggcagcgcgcaacauguggaagagugcuccuguuauccucgcuaccccggggugagaugcgucugucgggauaauuggaaaggaagcaaccgcccgauuguggacaucaacguuaaggauuacucuauuguguccagcuaugucugcucuggccuugugggcgacaccccuagaaagaaugaccggagcuccucuagcuacugucgcaaccccaauaacgaaaaagggucccacggaguuaagggcugggccuucgaugacgggaaugauguguggaugggaagaacaaucggcgaggagcugcggagcggguaugaaaccuuuaaagucauuggaggcuggucuacgccuaacuccaagcuccagaucaauagacaggugaucgucgacagcggcaaccgcucuggguacuccggaauuuucagcguggagggcaaaaauugcaucaaccgguguuuuuauguugaacugauuagagggcgcaagcaggagacacgggugugguggaccuccaauucuaucgucguguucugcggaaccagcggcacauacgggaccggcuccuggcccgauggagcugacauuaaccugaugcccaucuga

SEQ ID NO: 214096 - RNA, 1410 nt, Artificial Sequence
  derived and/or modified CDS sequence (opt5) from neuraminidase__InfluenzaA__AFG99471
augaaccccaaucagaagaucauuaccaucggcagcgugucccugauucucgccacaaucugcuuccugaugcaaauugcuauccuugucacgaccguuacacugcacuuuaaacaguacgaguguucuagcccuccgaacaaucaggugaugcccugcgaaccuaccaucauugagagaaacaucacagaaauuguguaucucaccaauacaaccaucgagaaggaaauuugucccaaacuggucgaguaccggaacugguccaagccucagugcaaaaucacgggguucgcccccuuuucuaaggacaauagcauucgccuuuccgcgggaggcgauaucugggugaccagagagccuuauguuucuugugacccggggaagugcuaccaauucgcucugggacagggcacaacccucaacaaucggcauagcaacgauacagugcacgaccgcaaucccuauagaacccugcugaugaacgaacucggggucccuuuucaucugggaacgcgccagguguguauggccugguccuccucuuccugccacgauggcaaagccuggcuucauguuugugugacaggccacgacgagaaugcuaccgccagcuucaucuacgaugggcggcuggucgacucuauuggauccuggagcaagaacauccucagaacacaggaaucugagugcguguguauuaaugggaccugcaccguggucaugacagauggcuccgcuagcgagcgggccgacacgaaaauccuguuuauugaagagggaaagaucguucacaucagcccccuuucuggcagcgcgcaacauguggaagagugcuccuguuauccucgcuaccccggggugagaugcgucugucgggauaacuggaaaggaagcaaccgcccgauuguggacaucaauguuaaggauuacucuauuguguccagcuaugucugcucuggccuggugggcgacaccccuagaaagaacgaccggagcuccucuagcuacugucgcaaucccaacaaugaaaaagggucccacggaguuaagggcugggccuucgaugacgggaacgauguguggaugggaagaacaaucggcgaggagcuccggagcggguaugaaaccuuuaaagucauuggaggcuggucuacaccuaauuccaagcugcagaucaacagacaggugaucgucgacagcggcaaucgcucuggguacuccggaauuuucagcguggagggcaaauccugcaucaaccgguguuuuuauguugaacugauuagagggcgcaagcaggagacccgggugugguggacgucuaauagcaucgucguguucugcggaacauccggcaccuacgggaccggcucuuggcccgauggagcugacauuaaccucaugcccaucuga

SEQ ID NO: 214097 - RNA, 1410 nt, Artificial Sequence
  derived and/or modified CDS sequence (opt5) from neuraminidase__InfluenzaA__AFG99482
augaaccccaaucagaagaucauuaccaucggcagcgugucccugacaauugccacgaucugcuuccucaugcaaauugcuauccuggucaccacaguuacccuucacuuuaaacaguacgaguguaacucuccuccgaauaaccaggugaugcccugcgaaccuacaaucauugagagaaauaucaccgaaauuguguaucugacaaacaccacgaucgagaaggaaauuugucccaaacucgucgaguaccggaauuggagcaagccucagugcaaaaucaccggguucgcccccuuuuccaaggacaacucuauucgccugagcgcgggaggcgauaucugggugacaagagagccuuauguuuccugugacccggggaagugcuaccaauucgcucuuggacagggcaccacacugaauaaccggcauucuaaugauaccgugcacgaccgcacgcccuauagaacacuccugaugaacgaacugggggucccuuuucaucucggaaccaaacagguguguaucgccuggagcuccagcucuugccacgauggcaaggccuggcugcauguuugugugacaggccacgacgagaaugcuaccgccuccuucauuuacgaugggcggcuugucgacagcaucggaucuugguccaaaaacauucugcgcacccaggaaagcgagugcguguguaucaauggcacaugcacgguggucaugaccgaugggucugcuuccggcagagccgacacaaagauucucuuuaucgaggaaggaaaaaucguucacauuagcccccuguccgggucugcgcaacauguggaggaaugcagcuguuauccucgguaccccggagugcgcugcgucuguagagauaacuggaagggcuccaaccggccgaucguggacauuaauguuaaggauuacagcaucgugucuuccuaugucugcagcggccuugugggggacaccccucgcaaaaacgacucuagcuccucuagcuacuguagaaaucccaacaaugagaagggaucccacggcguuaaagggugggccuucgaugacggaaacgauguguggaugggccggacaauuggggaggaacugcgcagcggauaugagaccuuuaaggucaucggcggcuggucuacgccuaauuccaaacuccagaucaacagacaggugauugucgaccgggggaauagaagcggauacucuggcaucuucuccguggaagggaagaacugcauuaaucgcuguuuuuauguugagcugauccggggaagaaaacaggaaacaaaggugugguggaccagcaacuccauugucguguucugcggcaccucugggacauacggcaccggaagcuggcccgauggcgcugacaucaaucugauguccauuuga

SEQ ID NO: 214098 - RNA, 1410 nt, Artificial Sequence
  derived and/or modified CDS sequence (opt5) from neuraminidase__InfluenzaA__AFG99493
augaaccccaaucagaagaucauuaccaucggcagcgugucccugacaauugccacgaucugcuuccucaugcaaauugcuauccuggucaccacaguuacccuucacuuuaaacaguacgaguguaacucuccuccgaauaaccaggugaugcccugcgaaccuacaaucauugagagaaauaucaccgaaauuguguaucugacaaacaccacgaucgagaaggaaauuugucccaaacucgucgaguaccggaauuggagcaagccucagugcaaaaucaccggguucgcccccuuuuccaaggacaacucuauucgccugagcgcgggaggcgauaucugggugacaagagagccuuauguuuccugugacccggggaagugcuaccaauucgcucuuggacagggcaccacacugaauaaccggcauucuaaugauaccgugcacgaccgcacgcccuauagaacacuccugaugaacgaacugggggucccuuuucaucucggaaccaaacagguguguaucgccuggagcuccagcucuugccacgauggcaaggccuggcugcauguuugugugacaggccacgacgagaaugcuaccgccuccuucauuuacgaugggcggcuugucgacagcaucggaucuugguccaaaaacauucugcgcacccaggaaagcgagugcguguguaucaauggcacaugcacgguggucaugaccgaugggucugcuuccgggagagccgacacaaagauucucuuuaucgaggaaggcaaaaucguucacauuagcccccuguccgggucugcgcaacauguggaggaaugcagcuguuauccucgguaccccggagugcgcugcgucuguagagauaacuggaagggcuccaaccggccgaucguggacauuaauguuaaggauuacagcaucgugucuuccuaugucugcagcggccuugugggggacaccccucgcaaaaacgacucuagcuccucuagcuacuguagaaaucccaacaaugagaagggaucccacggcguuaaagggugggccuucgaugacggaaacgauguguggaugggccggacaauuggggaggaacugcgcagcggauaugagaccuuuaaggucaucggcggcuggucuacgccuaauuccaaacuccagaucaacagacaggugauugucgaccgggggaauagaagcggauacucuggcaucuucuccguggaaggaaagagcugcauuaaccgcuguuuuuauguugagcugauccggggaagaaaacaggaaacaaaggugugguggaccuccaauucuauugucguguucugcggcaccagcgggacauacggcaccggauccuggcccgauggcgcugacaucaaccugaugcccauuuga

SEQ ID NO: 214099 - RNA, 1410 nt, Artificial Sequence
  derived and/or modified CDS sequence (opt5) from neuraminidase__InfluenzaA__AFG99504
augaaccccaaucagaagaucauuaccaucggcagcgugucccugacaauugccacgaucugcuuccucaugcaaauugcuauccuggucaccacaguuacccuucacuuuaaacaguacgaguguucuagcccuccgaacaaucaggugaugcccugcgaaccuacaaucauugagagaaacaucaccgaaauuguguaucugacaaauaccacgaucgagaaggaaauuugucccaaacucgucgaguaccggaacugguccaagccucagugcaaaaucaccggguucgcccccuuuucuaaggacaauagcauucgccuguccgcgggaggcgauaucugggugacaagagagccuuauguuucuugugacccggggaagugcuaccaauucgcucuuggacagggcaccacacugaacaaucggcauagcaacgauaccgugcacgaccgcacgcccuauagaacacuccugaugaaugaacugggggucccuuuucaucucggaaccaaacagguguguaucgccugguccuccucuuccugccacgauggcaaggccuggcugcauguuugugugacaggccacgacgagaacgcuaccgccagcuucauuuacgaugggcggcuugucgacucuaucggauccuggagcaaaaauauucugcgcacccaggaaucugagugcguguguaucaacggcacaugcacgguggucaugaccgauggguccgcuagcgagagagccgacacaaagauucucuuuaucgaagagggaaaaaucguucacauuagcccccugucuggcagcgcgcaacauguggaagagugcuccuguuauccucgguaccccggggugcgcugcgucuguagagauaauuggaagggaagcaaccggccgaucguggacauuaacguuaaggauuacucuaucguguccagcuaugucugcucuggccuugugggcgacaccccucgcaaaaaugacagaagcuccucuagcuacugucggaaccccaauaacgaaaaggggucccacggaguuaaaggcugggccuucgaugacgggaaugauguguggaugggacgcacaauuggcgaggagcugagaagcggguaugaaaccuuuaaggucaucggaggcuggucuacgccuaacuccaaacuccagaucaauagacaggugauugucgacagcggcaaccggucuggguacuccggaaucuucagcguggagggcaaguccugcauuaaucgcuguuuuuauguugaacugauccgggggagaaaacaggagacacgcgugugguggaccucuaacagcauugucguguucugcggaaccuccggcacauacgggaccggcucuuggcccgauggagcugacaucaaucugaugcccauuuga

SEQ ID NO: 214100 - RNA, 1410 nt, Artificial Sequence
  derived and/or modified CDS sequence (opt5) from neuraminidase__InfluenzaA__AFG99515
augaaccccaaucagaagaucauuaccaucggcagcgugucccugacaauugccacgaucugcuuccucaugcaaauugcuauccuggucaccacaguuacccuucacuuuaaacaguacgaguguaacucuccuccgaauaaccaggugaugcugugcgaacccacaaucauugagagaaauaucaccgaaauuguguaucucacaaacaccacgaucgagaaggaaauuuguccuaaacuggccgaguaccggaauuggagcaagccccagugcaaaaucaccggguucgcgccuuuuuccaaggacaacucuauucgccuuagcgcuggaggcgauaucugggucacaagagagcccuauguguccugugacccugggaagugcuaccaauucgcccugggacagggcaccacacucaauaaccggcauucuaaugauaccguucacgaccgcacgccguauagaacacugcugaugaacgaacucggggugcccuuucaucugggaaccaaacaggucuguaucgccuggagcuccagcucuugccacgauggcaaggcuuggcuucauguguguguuacaggccacgacgagaaugccaccgcuuccuucauuuacgaugggcggcugguggacagcaucggaucuugguccaaaaacauucuccgcacccaggaaagcgagugcgucuguaucaauggcacaugcacgguggugaugaccgaugggucugccuccgagagagcggacacaaagauucuguuuaucgaagagggaaaaaucguccacauuagcccucuuuccggcucugcccaacauguugaagagugcagcuguuauccccgguacccuggggugcgcugcguguguagagauaacuggaagggauccaaccggcccaucgucgacauuaaugugaaggauuacagcaucguuucuuccuaugugugcagcggccuggucggcgacaccccgcgcaaaaacgacucuagcuccucuagcuacuguagaaauccuaacaaugaaaaggggucccacggagugaaaggcugggcuuucgaugacgggaacgauguuuggaugggacggacaauuggcgaggagcuccgcagcggguaugaaaccuuuaaggugaucggaggcuggucuacgcccaauuccaaacugcagaucaacagacaggucauuguggaccggggcaauagaagcggguacucuggaaucuucuccgucgagggcaagagcugcauuaaccgcuguuuuuauguggaacugauccgggggagaaaacaggagacagaaguuugguggaccuccaauucuauuguggucuucugcggaaccagcggcacauacgggaccggcuccuggccugauggagccgacaucaaccucaugcccauuuga

SEQ ID NO: 214101 - RNA, 1410 nt, Artificial Sequence
  derived and/or modified CDS sequence (opt5) from neuraminidase__InfluenzaA__AFG99526
augaaccccaaucagaagaucauuaccaucggcagcgugucccugacacucgccacgauuugcuuccugaugcaaaucgcuauucuugucaccacaguuacccugcacuuuaaacaguacgaguguucuagcccuccgaacaaucaggugaugcccugcgaaccuacaaucaucgagagaaacauuaccgaaaucguguaucucacaaauaccacgauugagaaggaagucugucccaaacugguggaguaccggaacugguccaagccucagugcaaaaucaccggguucgcccccuuuucuaaggacaauagcauucgccuuuccgcgggaggcgauaucuggguuacaagagagccuuaugugucuugugacccggggaagugcuaccaauucgcucugggacagggcaccacacucaacaaucggcauagcaacgauaccguccacgaccgcacgcccuauagaacacugcugaugaaugaacucggggugccuuuucaucugggaacccggcagguuuguauggccugguccuccucuuccugccacgauggcaaagccuggcuucaugugugugucacaggccacgacgagaacgcuaccgccagcuucauuuacgaugggcgccugguggacucuaucggauccuggagcaagaauauccucagaacccaggaaucugagugcguguguauuaacggcacaugcacggucguuaugaccgauggguccgcuagcggacgggccgacacaaaaauccuguuuauugaggaaggcaagaucgugcacauuagcccccuuucugggagcgcgcaacauguggaggaaugcuccuguuauccucgcuaccccggagucagaugcgugugucgggauaauuggaaaggcagcaaccgcccgaucguugacaucaacgugaaggauuacucuauugucuccagcuaugugugcucuggccugguuggggacaccccuagaaagaaugaccggagcuccucuagcuacugucgcaaccccaauaacgagaaaggaucccacggcgugaaggggugggccuucgaugacggaaaugaugucuggaugggcagaacaaucggggaggaacuccggagcggauaugagaccuuuaaagugauuggcggcuggucuacgccuaacuccaagcugcagaucaauagacaggucauuguggacagcgggaaccgcucuggauacuccggcaucuucagcguugaagggaaauccugcaucaaucgguguuuuuauguggagcugauuagaggacgcaagcaggaaacacgggucugguggaccucuaacagcaucgugguuuucugcggcaccuccgggacauacggcaccggaucuuggcccgauggcgcugacauuaaucucaugcccaucuga

SEQ ID NO: 214102 - RNA, 1410 nt, Artificial Sequence; identical to SEQ ID NO: 213998
  derived and/or modified CDS sequence (opt5) from neuraminidase__InfluenzaA__AFG99537

SEQ ID NO: 214103 - RNA, 1410 nt, Artificial Sequence; identical to SEQ ID NO: 213998
  derived and/or modified CDS sequence (opt5) from neuraminidase__InfluenzaA__AFG99548

SEQ ID NO: 214104 - RNA, 1410 nt, Artificial Sequence; identical to SEQ ID NO: 213998
  derived and/or modified CDS sequence (opt5) from neuraminidase__InfluenzaA__AFG99559

SEQ ID NO: 214105 - RNA, 1410 nt, Artificial Sequence; identical to SEQ ID NO: 213998
  derived and/or modified CDS sequence (opt5) from neuraminidase__InfluenzaA__AFG99570

SEQ ID NO: 214106 - RNA, 1410 nt, Artificial Sequence; identical to SEQ ID NO: 213998
  derived and/or modified CDS sequence (opt5) from neuraminidase__InfluenzaA__AFG99581

SEQ ID NO: 214107 - RNA, 1410 nt, Artificial Sequence
  derived and/or modified CDS sequence (opt5) from neuraminidase__InfluenzaA__AFG99592
augaaccccaaucagaagaucauuaccaucggcagcgugucccugacaauugccacgaccugcuuccucaugcaaaucgcuauucuggucacaaccguuacacuucacuuuaaacaguacgaguguaacucuccuccgaauaaccaggugaugcccugcgaaccuaccaucaucgagagaaauauuacagaaaucguguaucugaccaacacgaccauugagaaggaaaucugucccaaacucgucgaguaccggaauuggagcaagccucagugcaaaauuacaggguucgcccccuuuuccaaggacaacucuauccgccugagcgcgggaggcgauauuugggugaccagagagccuuauguuuccugugacccggggaagugcuaccaauucgcucuuggacagggcacaacccugaauaaccggcauucuaaugauacggugcacgaccgcacacccuauagaacccuccugaugaacgaacugggggucccuuuucaucucggaacaaaacagguguguaucgccuggagcuccagcucuugccacgauggcaaggccuggcugcauguuugugugaccggccacgacgagaaugcuaccgccuccuucaucuacgaugggcggcuugucgacagcauugugucuugguccaaaaacauccugcgcacacaggaaagcgagugcguguguauuaauggaacgugcaccgucguuaugacagauggcucugcuuccgagagagccgacaccaagauccucuuuauugaagaggggaaaaucgugcacaucagcccccuguccggaucugcgcaacauguggaagagugcagcuguuauccucgguaccccggcguccgcugcguguguagagauaacuggaagggguccaaccggccgauuguugacaucaaugugaaggauuacagcauugucucuuccuaugugugcagcggacuuguuggcgacacaccucgcaaaaacgacucuagcuccucuagcuacuguagaaaucccaacaaugaaaagggcucccacggggugaaaggaugggccuucgaugacggcaacgaugucuggauggggcggaccaucggagaggagcugcgcagcggcuaugaaacguuuaaggugauugggggauggucuacaccuaauuccaaacuccagaccaacagacaggucaucguggaccggggcaauagaagcggcuacucugggaucuucuccguugagggaaagagcugcauuaaccgcuguuuuuauguggaacugauccggggcagaaaacaggagaccaaggucugguggacauccaauucuauugugguuuucugcgggaccagcggaacauacggcacgggguccuggcccgauggcgcugacaucaaccugaugcccauuuga

SEQ ID NO: 214108 - RNA, 1410 nt, Artificial Sequence; identical to SEQ ID NO: 213998
  derived and/or modified CDS sequence (opt5) from neuraminidase__InfluenzaA__AFG99603

SEQ ID NO: 214109 - RNA, 1410 nt, Artificial Sequence; identical to SEQ ID NO: 213998
  derived and/or modified CDS sequence (opt5) from neuraminidase__InfluenzaA__AFG99614

SEQ ID NO: 214110 - RNA, 1410 nt, Artificial Sequence; identical to SEQ ID NO: 213998
  derived and/or modified CDS sequence (opt5) from neuraminidase__InfluenzaA__AFG99625

SEQ ID NO: 214111 - RNA, 1410 nt, Artificial Sequence
  derived and/or modified CDS sequence (opt5) from neuraminidase__InfluenzaA__AFG99636
augaaccccaaucagaagaucauuaccaucggcagcgugucccugacaauugccacgaucugcuuccucaugcaaauugcuauccuggucaccacaguuacccuucacuuuaaacaguacgaguguaacucuccuccgaauaaccaggugaugcugugcgaacccacaaucauugagagaaauaucaccgaaauuguguaucucacaaacaccacgaucgagaaggaaauuuguccuaaacuggccgaguaccggaauuggagcaagccccagugcaaaaucaccggguucgcgccuuuuuccaaggacaacucuauucgccuuagcgcuggaggcgauaucugggucacaagagagcccuauguguccugugacccugggaagugcuaccaauucgcccugggacagggcaccacacucaauaaccggcauucuaaugauaccguucacgaccgcacgccguauagaacacugcugaugaacgaacucggggugcccuuucaucugggaaccaaacaggucuguaucgccuggagcuccagcucuugccacgauggcaaggcuuggcuucauguguguguuacaggccacgacgagaaugccaccgcuuccuucauuuacgaugggcggcugguggacagcaucgucucuugguccaaaaacauucuccgcacccaggaaagcgagugcguguguaucaauggaacaugcacgguggucaugaccgauggcucugccuccgagagagcggacacaaagauucuguuuaucgaagaggggaaaaucguucacauuagcccucuuuccggaucugcccaacauguggaagagugcagcuguuauccccgguacccuggcgugcgcugcgucuguagagauaacuggaagggguccaaccggcccaucguggacauuaauguuaaggauuacagcaucgugucuuccuaugucugcagcggacuggugggcgacaccccgcgcaaaaacgacucuagcuccucuagcuacuguagaaauccuaacaaugaaaagggcucccacgggguuaaaggaugggcuuucgaugacggcaacgauguguggauggggcggacaauuggagaggaccuccgcagcggcuaugagaccuuuaaggucaucgggggauggucuacgcccaauuccaaacugcagacaaacagacaggugaucgucgaucggggcaauagaagcggcuacucugggauuuucuccguggaaggaaagagcugcaucaaccgcuguuuuuauguugagcugauucggggcagaaaacaggaaaccaaggugugguggaccuccaauucuaucgucguguucugcgggacaagcggaaccuacggcacaggguccuggccugacggcgccgauauuaaccucaugcccaucuga

SEQ ID NO: 214112 - RNA, 1410 nt, Artificial Sequence
  derived and/or modified CDS sequence (opt5) from neuraminidase__InfluenzaA__AFG99658
augaaccccaaucagaagaucauuaccaucggcagcgugucccugacaauugccacgaucugcuuccucaugcaaauuaccauccuggucacaaccguuacacuucacuuuaaacaguacgaguguaacucuccuccgaauaaccaggugaugcugugcgaacccaccaucauugagagaaauaucacagaaauuguguaucucaccaacacgaccaucgagaaggaaauuuguccuaaacuggucgaguaccggaauuggagcaagccccagugcaaaaucacaggguucgcuccuuuuuccaaggacaacucuauucgccuuagcgccggaggcgauaucugggugaccagagagcccuauguuuccugugacccugggaagugcuaccaauucgcgcugggacagggcacaacccucaauaaccggcauucuaaugauacggugcacgaccgcacaccguauagaacccugcugaugaacgaacucgggguccccuuucaucugggaacaaaacagguguguaucgcuuggagcuccagcucuugccacgauggcaaggccuggcuucauguuugugugaccggccacgacgagaaugccaccgcuuccuucauuuacgaugggcggcuggucgacagcaucucuuccuggagcaaaaacauucuccgcacacaggaaucugagugcguguguaucaauggaacgugcaccguggucaugacagauggcuccgccagcgagagagcugacaccaagauucuguuuaucgaagaggggaaaaucguucacauuuccccucuuucuggaagcgcccaacauguggaagagugcuccuguuauccccgguacccuggcgugcgcugcgucuguagagauaacuggaaggggagcaaccggcccaucguggacauuaauguuaaggauuacucuaucguguccagcuaugucugcucuggacuggugggcgacacaccgcgcaaaaacgacagcuccucuagcuccuacuguagaaauccuaacaaugaaaagggcagccacgggguuaaaggaugggcguucgaugacggcaacgauguguggauggggcggaccauuucugaggagcuccgcuccggauaugaaacguuuaaggucaucggcggguggagcacacccaauucuaaacugcagaucaacagacaggugauugucgaccggggaaauagauccggcuacagcggcaucuucuccguggaggggaagucuugcauuaaccgcuguuuuuauguugaacugauccggggaagaaaacaggagaauaaggugugguggaccagcaacuccauugucguguucugcggcaccucugggacauacggaaccggcagcuggccugauggggccgacaucaaucucaugcccauuuga

SEQ ID NO: 214113 - RNA, 1410 nt, Artificial Sequence
  derived and/or modified CDS sequence (opt5) from neuraminidase__InfluenzaA__AFG99680
augaaccccaaucagaagaucauuaccaucggcagcgugucccugacaauugccacgaucugcuuccucaugcaaauugcuauccuggucaccacaguuacccuucacuuuaaacaguacgaguguucuagcccuccgaacaaucaggugauccugugccagcccacaauuaucgaaagaaacauuaccgagaucguguaucucacaaauaccacgauugaaaaggagaucuguccuaaacuggucgaauaccggaacugguccaagccccaaugcaaaauuaccggguucgccccuuuuucuaaggacaauagcauccgccuuuccgcgggaggcgauaucugggugacaagagagcccuauguuucuugugacccuagcaagugcuaccaguucgcucuggggcagggaaccacacucaacaaucggcauuccaacgauaccgugcacgaccgcacgccguauagaacacugcugaugaaugagcucggcguccccuuucaucuggggaccaaacagguguguauugccuggucuagcuccagcugccacgauggaaaggccuggcuucauguuugugugacaggccacgacgaaaacgcuaccgccucuuucaucuacgauggccggcuggucgacuccauugggagcuggucuaaaaauauccuccgcacccaagaguccgaaugcguguguauuaacggaacaugcacgguggucaugaccgauggcagcgcuuccgagagagccgacacaaagauccuguuuaucgaggaagggaaaguugugcacauuucuccucuuagcggauccgcgcagcauguggaggaaugcagcuguuauccccgguacccuggcguccgcugcguguguagagauaauuggaaggggucuaaccggcccaucguugacauuaacgugaaggauuacuccaucgucagcucuuaugugugcagcggacugguuggcgacaccccgcgcaaaaaugacuccucuagcuccagcuacuguagaaacccuaauaacgagaagggcucucacggggugaaaggaugggccuucgaugacggcaaugaugucuggauggggcggacaauuuccgaggaacuccgcagcggauaugagaccuuuaaggugaucggcggguggucuacgcccaacuccaaacugcagaucaauagacaggucauuguggacagcggaaaccgguccggcuacucuggcaucuucagcguugaagggaaguccugcauuaauagauguuuuuauguggagcugauccgcggacggaaacaagaaacaaaggucugguggaccucuaacagcauugugguuuucugcggcaccuccgggacauacggaaccggcagcuggccugauggggcugacaucaaucucaugcccauuuga

SEQ ID NO: 214114 - RNA, 1410 nt, Artificial Sequence
  derived and/or modified CDS sequence (opt5) from neuraminidase__InfluenzaA__AFG99691
augaaccccaaucagaagaucauuaccaucggcagcgugucccugacaauugccacgaucugcuuccucaugcaaauugcuauccuggucaccacaguuacccuucacuuuaaacaguacgaguguaacucuccuccgaauaaccaggugaugcccugcgaaccuacaaucauugagagaaauaccacagaaaucguguaucugaccaacacgaccauugagaaggaaaucugucccaaacucgucgaguaccggaauuggagcaagccucagugcaaaauuacaggguucgcccccuuuuccaaggacaacucuauccgccugagcgcgggaggcgauauuugggugaccagagagccuuauguuuccugugacccggggaagugcuaccaauucgcucuuggacagggcacaacccugaauaaccggcauucuaaugauacggugcacgaccgcacacccuauagaacccuccugaugaacgaacugggggucccuuuucaucucggaacaaaacagguguguaucgccuggagcuccagcucuugccacgauggcaaggccuggcugcauguuugugugaccggccacgacgagaaugcuaccgccuccuucaucuacgaugggcggcuugucgacagcauugugucuugguccaaaaacauccugcgcacacaggaaagcgagugcguguguauuaauggaacgugcaccgucguuaugacagauggcucugcuuccgagagagccgacaccaagauccucuuuauugaagaggggaaaaucgugcacaucagcccccuguccggaucugcgcaacauguggaagagugcagcuguuauccucgguaccccggcguccgcugcguguguagagauaacuggaagggguccaaccggccgauuguugacaucaaugugaaggauuacagcauugucucuuccuaugugugcagcggacuuguuggcgacacaccucgcaaaaacgacucuagcuccucuagcuacuguagaaaucccaacaaugaaaagggcucccacggggugaaaggaugggccuucgaugacggcaacgaugucuggauggggcggaccaucggagaggagcugcgcagcggcuaugaaacguuuaaggugauugggggauggucuacaccuaauuccaaacuccagaccaacagacaggucaucguggaccggggcaauagaagcggcuacucugggaucuucuccguugagggaaagagcugcauuaaccgcuguuuuuauguggaacugauccggggcagaaaacaggagaccaaggucugguggacauccaauucuauugugguuuucugcgggaccagcggaacauacggcacgggguccuggcccgauggcgcugacaucaaccugaugcccauuuga

SEQ ID NO: 214115 - RNA, 1410 nt, Artificial Sequence; identical to SEQ ID NO: 213998
  derived and/or modified CDS sequence (opt5) from neuraminidase__InfluenzaA__AFG99704

SEQ ID NO: 214116 - RNA, 1410 nt, Artificial Sequence; identical to SEQ ID NO: 213998
  derived and/or modified CDS sequence (opt5) from neuraminidase__InfluenzaA__AFG99715

SEQ ID NO: 214117 - RNA, 1410 nt, Artificial Sequence; identical to SEQ ID NO: 213998
  derived and/or modified CDS sequence (opt5) from neuraminidase__InfluenzaA__AFG99726

SEQ ID NO: 214118 - RNA, 1410 nt, Artificial Sequence
  derived and/or modified CDS sequence (opt5) from neuraminidase__InfluenzaA__AFG99737
augaaccccaaucagaagaucauuaccaucggcagcgugucccugacaauugccacgaucugcuuccucaugcaaauuaccauccuggucacaaccguuacacuucacuuuaaacaguacgaguguaacucuccuccgaauaaccaggugaugcugugcgaacccaccaucauugagagaaauaucacagaaauuguguaucucaccaacacgaccaucgagaaggaaauuuguccuaaacuggucgaguaccggaauuggagcaagccccagugcaaaaucacaggguucgcuccuuuuuccaaggacaacucuauucgccuuagcgccggaggcgauaucugggugaccagagagcccuauguuuccugugacccugggaagugcuaccaauucgcgcugggacagggcacaacccucaauaaccggcauucuaaugauacggugcacgaccgcacaccguauagaacccugcugaugaacgaacucgggguccccuuucaucugggaacaaaacagguguguaucgcuuggagcuccagcucuugccacgauggcaaggccuggcuucauguuugugugaccggccacgacgagaaugccaccgcuuccuucauuuacgaugggcggcuggucgacagcaucggaucuugguccaaaaacauucuccgcacacaggaaagcgagugcguguguaucaauggcacgugcaccguggucaugacagaugggucugccuccgagagagcugacaccaagauucuguuuaucgaagagggaaaaaucguucacauuagcccucuuuccggcucugcccaacauguggaagagugcagcuguuauccccgguacccuggggugcgcugcgucuguagagauaacuggaagggauccaaccggcccaucguggacauuaauguuaaggauuacagcaucgugucuuccuaugucugcagcggccuggugggcgacacaccgcgcaaaaacgacucuagcuccucuagcuacuguagaaauccuaacaaugaaaaggggucccacggaguuaaaggcugggcguucgaugacgggaacgauguguggaugggacggaccauuagcgaggagcuccgcucuggcuaugaaacguuuaaggucaucgggggaugguccacacccaauagcaaacugcagaucaacagacaggugauugucgaccggggcaauagaucuggcuacuccgggaucuucagcguggagggaaaguccugcauuaaccgcuguuuuuauguugaacugauccggggcagaaaacaggagaauaaggugugguggaccucuaacagcauugucguguucugcgggaccuccggaacauacggcaccgggucuuggccugauggcgccgacaucaaucucaugcccauuuga

SEQ ID NO: 214119 - RNA, 1410 nt, Artificial Sequence
  derived and/or modified CDS sequence (opt5) from neuraminidase__InfluenzaA__AFG99748
augaaccccaaucagaagaucauuaccaucggcagcgugucccugacaauugccacgaucugcuuccucaugcaaauugcuauccuggucaccacaguuacccuucacuuuaaacaguacgacuguaacucuccuccgaauaaccaggccaugcugugcgagcccacaaucauugaaagaaauaucaccgagauuguguaucucacaaacaccacgaucgaaaaggagauuuguccuaaacuggcggaauaccggaauuggagcaagccccagugcaaaaucaccggguucgcuccuuuuuccaaggauaacucuauucgccuuagcgccggaggcgacaucugggugacaagagagcccuaugucuccugugauccugggaagugcuaccaauucgcccugggacagggcaccacacucaauaaccggcauucuaaugacaccgugcacgaucgcacgccguauagaacacugcugaugaacgagcucgggguucccuuucaucugggaaccaaacagguguguaucgcuuggagcuccagcucuugccacgacggcaaggccuggcuucaugucugugugacaggccacgaugaaaaugcuaccgccuccuucauuuacgacgggcggcugguugauagcaucggaucuugguccaaaaacauucuccgcacccaggagagcgaaugcguguguaucaauggcacaugcacggucgugaugaccgacgggucugcguccgagagagccgauacaaagauucuguuuaucgaggaaggaaaaaucgugcacauuagcccucuuuccggcucugcucaacaugucgaggaaugcagcuguuauccccgguacccugggguucgcugcguguguagagacaacuggaagggauccaaccggcccaucguggauauuaaugucaaggacuacagcaucgugucuuccuauguuugcagcggccuggugggcgacaccccgcgcaaaaacgauucuagcuccucuagcuacuguagaaauccuaacaaugagaaggggucccacggagucaaaggcugggccuucgacgaugggaacgacguguggaugggacggacaauuggcgaggaacuccgcagcggguaugagaccuuuaagguuaucggaggcuggucuacgcccaauuccaaacugcagaucaacagacaggugauugucgaucggggcaauagaagcggguacucuggaaucuucuccguggaaggcaagagcugcacaaaccgcuguuuuuaugucgagcugauucgggggagaaaacaggaaaccgaggugugguggaccuccaauucuaucguuguguucugcggaacaagcggcaccuacgggacaggcuccuggccugacggagcugauauuaaccucaugcccaucuga

SEQ ID NO: 214120 - RNA, 1410 nt, Artificial Sequence; identical to SEQ ID NO: 213998
  derived and/or modified CDS sequence (opt5) from neuraminidase__InfluenzaA__AFG99759

SEQ ID NO: 214121 - RNA, 1410 nt, Artificial Sequence
  derived and/or modified CDS sequence (opt5) from neuraminidase__InfluenzaA__AFG99770
augaaccccaaucagaagaucauuaccaucggcagcgugucccugacaauugccacgaucugcuuccucaugcaaauugcuauccuggucaccacaguuacccuucacuuuaaacaguacgaguguaacucuccuccgaauaaccagaucaugcugugcgaacccacaauuaucgagagaaauauuaccgaaaucguguaucucacaaacaccacgauugagcgggaaaucuguccuaagcugguggaguaccgcaauuggagcaaaccccagugcaagauuaccggguucgccccuuuuuccaaagacaacucuaucagacuuagcgcgggaggcgauaucugggucacacgggagcccuauguguccugugacccugggaagugcuaccaauucgcucugggacagggcaccacacucaauaaccgccauucuaaugauaccguucacgacagaacgccguaucggacacugcugaugaacgaacucggggugcccuuucaucugggaaccaagcaggucuguauugccuggagcuccagcucuugccacgauggcaaagccuggcuucauguguguguuacaggccacgacgagaaugcuaccgccuccuucaucuacgaugggcgccugguggacagcauuggaucuugguccaagaacauccucagaacccaggaaagcgagugcgucuguauuaauggcacaugcacgguggugaugaccgaugggucugcuuccgagcgggccgacacaaaaauccuguuuaucgaagagggaaagauuguccacaucagcccucuuuccggcucugcgcaacauguugaagagugcagcuguuauccccgcuacccuggggugagaugcgugugucgggauaacuggaaaggauccaaccgccccauugucgacaucaaugugaaggauuacagcauuguuucuuccuaugugugcagcggccuggucggcgacaccccgagaaagaacgacucuagcuccucuagcuacugucggaauccuaacaaugaaaaagggucccacggagugaagggcugggccuucgaugacgggaacgauguuuggaugggacgcacaaucggcgaggagcucagaagcggguaugaaaccuuuaaagugaucggaggcuggucuacgcccaauuccaagcugcagauuaaccggcaggucaucguggacagaggcaaucgcagcggguacucuggaauuuucuccgucgagggcaaaagcugcaucaaccgguguuuuuauguggaacugauuagagggcgcaagcaggagacagaaguuugguggaccuccaauucuaucguggucuucugcggaaccagcggcacauacgggaccggcuccuggccugauggagcugacauuaaccucaugcccaucuga

SEQ ID NO: 214122 - RNA, 1410 nt, Artificial Sequence
  derived and/or modified CDS sequence (opt5) from neuraminidase__InfluenzaA__AFG99781
augaaccccaaucagaagaucauuaccaucggcagcgugucccugacaauugccacgaucugcuuccucaugcaaauugcuauccuggucaccacaguuacccuucacuuuaaacaguacgaguguucuagcccuccgaacaaucaggugaugcugugccagcccacaaucauugaaagaaacaucaccgagauuguguaucucacaaauaccacgaucgaaaaggagauuuguccuaaacuggucgaauaccggaacugguccaagccccaaugcaaaaucaccggguucgccccuuuuucuaaggacaauagcauucgccuuuccgcgggaggcgauaucugggugacaagagagcccuauguuucuugugacccugggaagugcuaccaguucgcucugggacagggcaccacacucaacaaucggcauagcaacgauaccgugcacgaccgcacgccguauagaacacugcugaugaaugagcucgggguccccuuucaucugggaaccaaacagguguguaucgccugguccucuagcuccugccacgauggcaaggccuggcuucauguuugugugacaggccacgacgaaaacgcuaccgccagcuucauuuacgaugggcggcuggucgacucuaucggauccuggagcaaaaauauucuccgcacccaagagucugaaugcguguguaucaacggcacaugcacgguggucaugaccgauggguccgcuagcaagagagccgacacaaaaauucuguuuaucgaggagggaaagaucguucacauuuccccucuuucuggcagcgcgcagcauguggaagagugcuccuguuauccccgguacccuggggugcgcugcgucuguagagauaauuggaagggaagcaaccggcccaucguggacauuaacguuaaagauuacucuaucguguccagcuaugucugcucuggccuggugggcgacaccccgcgcaagaaugacagcuccucuagcuccuacuguagaaacccuaauaacgaaaaagggagccacggaguuaagggcugggccuucgaugacgggaaugauguguggaugggacggacaauuucugaggaacuccgcuccggcuaugagaccuuuaaagucaucgggggauggagcacgcccaacucuaagcugcagacaaauagacaggugaucgucgacuccggcaaccggagcggcuacuccgggauuuucucuguggagggaaaaagcugcaucaauagauguuuuuauguugaacugauucgcggccggaagcaagagaccaaggugugguggaccuccaacucuaucgucguguucugcgggacaagcggaaccuacggcacaggguccuggccugauggcgcugacauuaaucucaugcccaucuga

SEQ ID NO: 214123 - RNA, 1410 nt, Artificial Sequence; identical to SEQ ID NO: 213998
  derived and/or modified CDS sequence (opt5) from neuraminidase__InfluenzaA__AFG99792

SEQ ID NO: 214124 - RNA, 1410 nt, Artificial Sequence; identical to SEQ ID NO: 214118
  derived and/or modified CDS sequence (opt5) from neuraminidase__InfluenzaA__AFG99803

SEQ ID NO: 214125 - RNA, 1410 nt, Artificial Sequence; identical to SEQ ID NO: 213998
  derived and/or modified CDS sequence (opt5) from neuraminidase__InfluenzaA__AFG99825

SEQ ID NO: 214126 - RNA, 1410 nt, Artificial Sequence; identical to SEQ ID NO: 213998
  derived and/or modified CDS sequence (opt5) from neuraminidase__InfluenzaA__AFG99836

SEQ ID NO: 214127 - RNA, 1410 nt, Artificial Sequence; identical to SEQ ID NO: 213998
  derived and/or modified CDS sequence (opt5) from neuraminidase__InfluenzaA__AFG99847

SEQ ID NO: 214128 - RNA, 1410 nt, Artificial Sequence; identical to SEQ ID NO: 213998
  derived and/or modified CDS sequence (opt5) from neuraminidase__InfluenzaA__AFG99858

SEQ ID NO: 214129 - RNA, 1410 nt, Artificial Sequence; identical to SEQ ID NO: 213998
  derived and/or modified CDS sequence (opt5) from neuraminidase__InfluenzaA__AFG99869

SEQ ID NO: 214130 - RNA, 1410 nt, Artificial Sequence; identical to SEQ ID NO: 213998
  derived and/or modified CDS sequence (opt5) from neuraminidase__InfluenzaA__AFG99880

SEQ ID NO: 214131 - RNA, 1410 nt, Artificial Sequence
  derived and/or modified CDS sequence (opt5) from neuraminidase__InfluenzaA__AFG99891
augaaccccaaucagaagaucauuaccaucggcagcgugucccugacaauugccacgaucugcuuccucaugcaaauugcuauccuggucaccacaguuacccuucacuuuaaacaguacgaguguaacucuccuccgaauaaccaggugaugcugugcgaacccacaaucauugagagaaauaucaccgaaauuguguauuucacaaacaccacgaucgagaaggaaauuuguccuaaacucgccgaguaccggaauuggagcaagccccagugcaaaaucaccggguuugcgccuuucuccaaggacaacucuauucgccugagcgcuggaggcgauaucugggucacaagagagcccuauguguccugugacccugggaagugcuaccaauuugcccuuggacagggcaccacacugaauaaccggcauucuaaugauaccguucacgaccgcacgccguauagaacacuccugaugaacgaacugggggugcccuuccaucucggaaccaaacaggucuguaucgccuggagcuccagcucuugccacgauggcaaggcuuggcugcauguguguguuacaggccacgacgagaaugccaccgcuuccuuuauuuacgaugggcggcuuguggacagcaucggaucuugguccaaaaacauucugcgcacccaggaaagcgagugcgucuguaucaauggcacaugcacgguggugaugaccgaugggucugccuccgagagagcggacacaaagauucucuucaucgaagagggaaaaaucguccacauuagcucccugucuggcagcgcccaacauguugaagagugcuccuguuauccucgguaccccggggugcgcugcguguguagagauaacuggaagggaagcaaccggccuaucgucgacauuaaugugaaggauuacucuaucguuuccagcuaugugugcucuggccuugucggcgacacaccccgcaaaaacgacagcuccucuagcuccuacuguagaaauccgaacaaugaaaaggggagccacggagugaaaggcugggcuuuugaugacgggaacgauguuuggaugggacggaccauuggcgaggagcugcgcucuggguaugaaaccuucagagugaucggaggcugguccacgccuaauagcaagcuccagaucaaccggcaggucauuguggacagaggcaaucgcucuggguacuccggaaucuuuagcgucgagggcaaauccugcauuaaccgguguuucuauguggaacugaucagagggcgcaagcaggagacagaaguuugguggaccucuaauagcauuguggucuuuugcggaaccuccggcacauacgggaccggcucuuggcccgauggagccgacaucaaccugaugccuauuuga

SEQ ID NO: 214132 - RNA, 1410 nt, Artificial Sequence; identical to SEQ ID NO: 213998
  derived and/or modified CDS sequence (opt5) from neuraminidase__InfluenzaA__AFG99902

SEQ ID NO: 214133 - RNA, 1410 nt, Artificial Sequence; identical to SEQ ID NO: 213998
  derived and/or modified CDS sequence (opt5) from neuraminidase__InfluenzaA__AFG99913

SEQ ID NO: 214134 - RNA, 1410 nt, Artificial Sequence; identical to SEQ ID NO: 213998
  derived and/or modified CDS sequence (opt5) from neuraminidase__InfluenzaA__AFG99924

SEQ ID NO: 214135 - RNA, 1410 nt, Artificial Sequence
  derived and/or modified CDS sequence (opt5) from neuraminidase__InfluenzaA__AFG99935
augaaccccaaucagaagaucauuaccaucggcagcgugucccugacaauugccacgaucugcuuccucaugcaaauugcuauccuggucaccacaguuacccuucacuuuaaacaguacgaguguaacucuccuccgaauaaccaggugaugcugugcgaacccacaaucguggagagaaauauuaccgaaaucgucuaucucacaaacaccacgauugagaaggaaaucuguccuaaacuggccgaguaccggaauuggagcaagccccagugcaaaauuaccggguucgcgccuuuuuccaaggacaacucuauccgccuuagcgcuggaggcgauauuugggugacaagagagcccuauguuuccugugacccuucuaagugcuaccaauucgcccuggggcagggaaccacacucaauaaccggcauagcaaugauaccgugcacgaccgcacgccguauagaacacugcugaugaacgaacucggcguccccuuucaucuggggaccaaacagguguguaucgccugguccucuagcuccugccacgauggaaaggcuuggcuucauguuugugugacaggccacgacgagaaugccaccgcuagcuucaucuacgauggccggcuggucgacucuauuggguccuggagcaaaaacauccuccgcacccaggaaucugagugcguguguauuaauggaacaugcacgguggucaugaccgauggcuccgccagcgagagagcggacacaaagauccuguuuauugaagaggggaaaaucguucacaucuccccucuuucuggaagcgcccaacauguggaagagugcuccuguuauccccgguacccuggcgugcgcugcgucuguagagauaacuggaaggggagcaaccggcccauuguggacaucaauaugaaggauuacucuauuguuuccagcuaugugugcucuggacuggucggcgacaccccgcgcaacaaugacagcuccucuagcuccuacuguagaaacccuaauaacgaaaaaggcagccacggggugaagggaugggcuuucgaugacggcaaugauguuuggauggggcggacaaucggagaggagcuccgcucuggcuaugaaaccuuuaaagugauugggggaugguccacgcccaacagcaagcugcagaucaauagacaggucaucguggaccggggcaacagaucuggcuacuccgggauuuucagcgucgagggaaaauccugcaucaaucgcuguuuuuauguggaacugauucggggcagaaagcaggagacagaaguuugguggaccucuaacagcaucguggucuucugcgggaccuccggaacauacggcaccgggucuuggccugauggcgccgacauuaaucucaugcccaucuga

SEQ ID NO: 214136 - RNA, 1410 nt, Artificial Sequence; identical to SEQ ID NO: 213998
  derived and/or modified CDS sequence (opt5) from neuraminidase__InfluenzaA__AFG99946

SEQ ID NO: 214137 - RNA, 1410 nt, Artificial Sequence
  derived and/or modified CDS sequence (opt5) from neuraminidase__InfluenzaA__AFG99957
augaaccccaaucagaagaucauuaccaucggcagcgugucccugacaauugccacgaucugcuuccucaugcaaauugcuauccuggucaccacaguuacccuucacuuuaaacaguacgaguguaacucuccuccgaauaaccaggccaugcugugcgaacccacaaucauugagagaaauaucaccgaaauuguguaucucacaaacaccacgaucgagaaggaaauuuguccuaaacuggcggaguaccggaauuggagcaagccccagugcaaaaucaccggguucgcuccuuuuuccaaggacaacucuauucgccuuagcgccggaggcgauaucugggugacaagagagcccuaugucuccugugacccugggaagugcuaccaauucgcccugggacagggcaccacacucaauaaccggcauucuaaugauaccgugcacgaccgcacgccguauagaacacugcugaugaacgaacucgggguucccuuucaucugggaaccaaacagguguguaucgcuuggagcuccagcucuugccacgauggcaaggccuggcuucaugucugugugacaggccacgacgagaaugcuaccgccuccuucauuuacgaugggcggcugguugacagcaucggaucuugguccaaaaacauucuccgcacccaggaaagcgagugcguguguaucaauggcacaugcacggucgugaugaccgaugggucugcguccgagagagccgacacaaagauucuguuuaucgaagagggaaaaaucgugcacauuagcccucuuuccggcucugcucaacaugucgaagagugcagcuguuauccccgguacccugggguucgcugcguguguagagauaacuggaagggauccaaccggcccaucguggacauuaaugucaaggauuacagcaucgugucuuccuauguuugcagcggccuggugggcgacaccccgcgcaaaaacgacucuagcuccucuagcuacuguagaaauccuaacaaugaaaaggggucccacggagucaaaggcugggccuucgaugacgggaacgauguguggaugggacggacaauuggcgaggagcuccgcagcggguaugaaaccuuuaagguuaucggaggcuggucuacgcccaauuccaaacugcagaucaacagacaggugauugucgaccggggcaauagaagcggguacucuggaaucuucuccguggagggcaagagcugcacaaaccgcuguuuuuaugucgaacugauucgggggagaaaacaggagaccgaagugugguggaccuccaauucuaucguuguguucugcggaacaagcggcaccuacgggacaggcuccuggccugauggagcugacauuaaccucaugcccaucuga

SEQ ID NO: 214138 - RNA, 1410 nt, Artificial Sequence; identical to SEQ ID NO: 213998
  derived and/or modified CDS sequence (opt5) from neuraminidase__InfluenzaA__AFG99968

SEQ ID NO: 214139 - RNA, 1410 nt, Artificial Sequence
  derived and/or modified CDS sequence (opt5) from neuraminidase__InfluenzaA__AFG99979
augaaccccaaucagaagaucauuaccaucggcagcgugucccugacaauugccacgaucugcuuccucaugcaaauugcuauccuggucaccacaguuacccuucacuuuaaacaguacgaguguaacucuccuccgaauaaccaggugaugcccugcgaaccuacaaucauugagagaaauaucaccgaaauuguguaucugacaaacaccacgaucgagaaggaaauuugucccaaacucgucgaguaccggaauuggagcaagccucagugcaaaaucaccggguucgcccccuuuuccaaggacaacucuauucgccugagcgcgggaggcgauaucugggugacaagagagccuuauguuuccugugacccggggaagugcuaccaauucgcucuuggacagggcaccacacugaauaaccggcauucuaaugauaccgugcacgaccgcacgcccuauagaacacuccugaugaacgaacugggggucccuuuucaucucggaaccaaacagguguguaucgccuggagcuccagcucuugccacgauggcaaggccuggcugcauguuugugugacaggccacgacgagaaugcuaccgccuccuucauuuacgaugggcggcuugucgacagcaucgugucuugguccaaaaacauucugcgcacccaggaaagcgagugcguguguaucaauggaacaugcacggucguuaugaccgauggcucugcuuccgagagagccgacacaaagauucucuuuaucgaagaggggaaaaucgugcacauuagcccccuguccggaucugcgcaacauguggaagagugcagcuguuauccucgguaccccggcguccgcugcguguguagagauaacuggaagggguccaaccggccgaucguugacauuaaugugaaggauuacagcaucgucucuuccuaugugugcagcggacuuguuggcgacaccccucgcaaaaacgacucuagcuccucuagcuacugucugaaucccaacaaugaaaagggcucccacggggugaaaggaugggccuucgaugacggcaacgaugucuggauggggagaacaauuggagaggagcuccggagcggcuaugaaaccuuuaaggugaucgggggauggucuacgccuaauuccaaacugcagacaaaccgccaggucaucguggacagaggcaaucggagcggcuacucugggauuuucuccguugagagcaaguccugcaucaacagauguuuuuauguggaacugauucgcggacggaaacaggagaccaaggucugguggaccucuaauagcaucgugguuuucugcggcacauccgggaccuacggaacaggcucuuggcccgauggggcugacauuaaccucaugcccaucuga

SEQ ID NO: 214140 - RNA, 1410 nt, Artificial Sequence
  derived and/or modified CDS sequence (opt5) from neuraminidase__InfluenzaA__AFG99990
augaaccccaaucagaagaucauuaccaucggcagcgugucccugacaauugccacgaucugcuuccucaugcaaauugcuauccuggucaccacaguuacccuucacuuuaaacaguacgaguguaacucuccuccgaauaaccaggccaugcugugcgaacccaagaucauugagagaaauaucacagaaauuguguaucucaccaacacaaccaucgagaaagaaauuuguccuaagcuggcggaguaccggaauuggagcaaaccccagugcaagaucacgggguucgcuccuuuuuccaaggacaacucuauucgccuuagcgccggaggcgauaucugggugaccagagagcccuaugucuccugugacccugggaaaugcuaccaauucgcccugggacagggcacaacccucaauaaccggcauucuaaugauacagugcacgaccgcaccccguauagaacgcugcugaugaacgaacucgggguucccuuucaucugggaacaaaacagguguguaucgcuuggagcuccagcucuugccacgauggcaaggccuggcuucaugucugugugaccggccacgacgagaaugcuacagccuccuucauuuacgaugggcggcugguugacagcaucggaucuugguccaagaacauucuccgcacccaggaaagcgagugcguguguaucaaugggaccugcacagucgugaugacggauggcucugcguccgagagagccgacaccaaaauucuguuuaucgaagagggaaagaucgugcacauuagcccucuuuccggcucugcucaacaugucgaagagugcagcuguuauccccgguacccugggguucgcugcguguguagagauaacuggaagggauccaaccggcccaucguggacauuaaugucaaagauuacagcaucgugucuuccuauguuugcagcggccuggugggcgacacaccgcgcaagaacgacucuagcuccucuagcuacuguagaaauccuaacaaugaaaaagggucccacggagucaagggcugggccuucgaugacgggaacgauguguggaugggacggaccauuagcgaggagcuccgcucuggcuaugaaacauuuaaaguuaucgggggaugguccaagcccaauagcaaacugcagaucaacagacaggugauugucgaccggggcaauagaucuggcuacuccgggaucuucagcguggagggaaaguccugcauuaaccgcuguuuuuaugucgaacugauccggggcagaaagcaggagaccgaagugugguggacgucuaauagcauuguuguguucugcgggacauccggaaccuacggcaccgggucuuggccugauggcgcugacaucaaccucaugcccauuuga

SEQ ID NO: 214141 - RNA, 1410 nt, Artificial Sequence
  derived and/or modified CDS sequence (opt5) from neuraminidase__InfluenzaA__AFH00002
augaaccccaaucagaagaucauuaccaucggcagcgugucccugacaauugccacgaucugcuuccucaugcaaauugcuauccuggucaccacaguuacccuucacuuuaaacaguacgaguguucuagcccuccgaacaaucaggugauccccugccagccuacaauuaucgaaagaaacauuaccgagaucguguaucugacaaauaccacgauugaaaaggagaucugucccaaacucgucgaauaccggaacugguccaagccucaaugcaaaauuaccggguucgcccccuuuucuaaggacaauagcauccgccuguccgcgggaggcgauaucugggugacaagagagccuuauguuucuugugacccggggaagugcuaccaguucgcucuuggacagggcaccacacugaacaaucggcauagcaacgauaccgugcacgaccgcacgcccuauagaacacuccugaugaaugagcugggggucccuuuucaucucggaaccaaacagguguguauugccugguccuccucuuccugccacgauggcaaggccuggcugcauguuugugugacaggccacgacgaaaacgcuaccgccagcuucaucuacgaugggcggcuugucgacucuauuggauccuggagcaaaaauauccugcgcacccaagagucugaaugcguguguauuaacggcacaugcgcuguggucaugacggauggguccgccagcgagagagcggacaccaagauccucuuuaucgaggaaggaaaaguugugcacauuagcccccugucuggcagcgcccagcauguggaggaaugcuccuguuauccucgguaccccgggguccgcugcguguguagagauaauuggaagggaagcaaccggccgaucguugacauuaacgugaagaauuacucuaucgucuccagcuaugugugcucuggccuuguuggcgauacaccucgcaaaaacgacagcuccucuagcuccuacuguagaaaucccaacaaugagaaggggagccacggagugaaaggcugggcuuucgacgaugggaacgacgucuggaugggacggaccauuucugaggaacugcgcuccggcuaugagacauuuaaggugaucgggggauggagcaccccuaauucuaaacuccagaucaacagacaggucauuguggauuccggcaaucggagcggcuacuccgggaucuucucuguugaaggaaagagcugcauuaacagauguuuuuauguggagcugauccgcggccggaaacaagaaacgaaggucugguggacauccaauucuauugugguuuucugcgggaccagcggaaccuacggcacaggguccuggcccgacggcgccgauaucaaccugaugcccauuuga

SEQ ID NO: 214142 - RNA, 1410 nt, Artificial Sequence; identical to SEQ ID NO: 207257
  derived and/or modified CDS sequence (opt5) from neuraminidase__InfluenzaA__AFH00013

SEQ ID NO: 214143 - RNA, 1410 nt, Artificial Sequence
  derived and/or modified CDS sequence (opt5) from neuraminidase__InfluenzaA__AFH00024
augaaccccaaucagaagaucauuaccaucggcagcgugucccugacaauugccacgaucugcuuccucaugcaaauuaccauccuggucacaaccguuacacuucacuuuaaacaguacgaguguaacucuccuccgaauaaccaggugaugcugugcgaacccaccaucauugagagaaauaucacagaaauuguguaucucaccaacacgaccaucgagaaggaaauuuguccuaaacuggucgaguaccggaauuggagcaagccccagugcaaaaucacaggguucgcuccuuuuuccaaggacaacucuauucgccuuagcgccggaggcgauaucugggugaccagagagcccuauguuuccugugacccugggaagugcuaccaauucgcgcugggacagggcacaacccucaauaaccggcauucuaaugauacggugcacgaccgcacaccguauagaacccugcugaugaacgaacucgggguccccuuucaucugggaacaaaacagguguguaucgcuuggagcuccagcucuugccacgauggcaaggccuggcuucauguuugugugaccggccacgacgagaaugccaccgcuuccuucauuuacgaugggcggcuggucgacagcaucggaucuugguccaaaaacauucuccgcacacaggaaagcgagugcguguguaucaauggcacgugcaccguggucaugacagaugggucugccuccgagagagcugacaccaagauucuguuuaucgaagagggacggaucguucacauuagcccucuuuccggcucugcccaacauguggaagagugcagcuguuauccccgcuacccuggggugagaugcgucugucgggauaacuggaaaggauccaaccgccccaucguggacauuaauguuaaggauuacagcaucgugucuuccuaugucugcagcggccuggugggcgacacaccgagaaagaacgacucuagcuccucuagcuacugucggaauccuaacaaugaaaaagggucccacggaguuaagggcugggcguucgaugacgggaacgauguguggaugggacgcaccauuagcgaggagcucagaucuggcuaugaaacguuuaaagucaucgggggaugguccacacccaauagcaagcugcagaucaacagacaggugauugucgaccggggcaaucgcucuggcuacuccgggaucuucagcguggagggaaaauccugcauuaaccgguguuuuuauguugaacugaucagaggccgcaagcaggagaauaaagugugguggaccucuaacagcauugucguguucugcgggaccuccggaacauacggcaccgggucuuggccugauggcgccgacaucaaucucaugcccauuuga

SEQ ID NO: 214144 - RNA, 1410 nt, Artificial Sequence; identical to SEQ ID NO: 207257
  derived and/or modified CDS sequence (opt5) from neuraminidase__InfluenzaA__AFH00035

SEQ ID NO: 214145 - RNA, 1410 nt, Artificial Sequence; identical to SEQ ID NO: 207257
  derived and/or modified CDS sequence (opt5) from neuraminidase__InfluenzaA__AFH00046

SEQ ID NO: 214146 - RNA, 1410 nt, Artificial Sequence
  derived and/or modified CDS sequence (opt5) from neuraminidase__InfluenzaA__AFH00057
augaaccccaaucagaagaucauuaccaucggcagcgugucccugacaauugccacgaucugcuuccucaugcaaauugcuauccuggucaccacaguuacccuucacuuuaaacaguacgaguguaacucuccuccgaauaaccaggugaugcugugcgaacccacaaucauugagagaaauaucaccgaaauuguguaucucacaaacaccacgaucgagaaggaaauuuguccuaaacuggccgaguaccggaauuggagcaagccccagugcaaaaucaccggguucgcgccuuuuuccaaggacaacucuauucgccuuagcgcuggaggcgauaucugggucacaagagagcccuauguguccugugacccugggaagugcuaccaauucgcccugggacagggcaccacacucaauaaccggcauucuaaugauaccguucacgaccgcacgccguauagaacacugcugaugaacgaacucggggugcccuuucaucugggaaccaaacaggucuguaucgccuggagcuccagcucuugccacgauggcaaggcuuggcuucauguguguguuacaggccacgacgagaaugccaccgcuuccuucauuuacgaugggcggcugguggacagcaucggaucuugguccaaaaacguccuccgcacccaggaaagcgagugcguguguauuaauggcacaugcacgguggucaugaccgaugggucugccuccgagagagcggacacaaagauccuguuuauugaagagggaaaaaucguucacaucagcccucuuuccggcucugcccaacauguggaagagugcagcuguuauccccgguacccuggggugcgcugcgucuguagagauaacuggaagggauccaaccggcccauuguggacaucaauguuaaggauuacagcauugugucuuccuaugucugcagcggccuggugggcgacaccccgcgcaaaaacgacucuagcuccucuagcuacuguagaaauccuaacaaugaaaaggggucccacggaguuaaaggcugggcuuucgaugacgggaacgauguguggaugggacggacaaucagcgaggagcuccgcucuggcuaugaaaccuuuaaggucauugggggaugguccaaucccaacagcaaacugcagaucaauagacaggugaucgucgaccggggcaacagaucuggcuacuccgggauuuucagcguggagggaaaguccugcaucaaucgcuguuuuuauguugaacugauucggggcagaaaacaggagacggaagugugguggacaucuaacagcaucgucguguucugcgggaccuccggaaccuacggcacagggucuuggccugauggcgccgacauuaaucucaugcccaucuga

SEQ ID NO: 214147 - RNA, 1410 nt, Artificial Sequence; identical to SEQ ID NO: 207257
  derived and/or modified CDS sequence (opt5) from neuraminidase__InfluenzaA__AFH00068

SEQ ID NO: 214148 - RNA, 1410 nt, Artificial Sequence
  derived and/or modified CDS sequence (opt5) from neuraminidase__InfluenzaA__AFH00079
augaaccccaaucagaagaucauuaccaucggcagcgugucccugacaauugccacgaucugcuuccucaugcaaauugcuauccuggucaccacaguuacccuucacuuuaaacaguacgaguguaacucuccuccgaauaaccaggugaugcugugcgaacccacaaucauugagagaaauaucaccgaaauuguguaucucacaaacaccacgaucgagaaggaaauuuguccuaaacuggccgaguaccggaauuggagcaagccccagugcaaaaucaccggguucgcgccuuuuuccaaggacaacucuauucgccuuagcgcuggaggcgauaucugggucacaagagagcccuauguguccugugacccugggaagugcuaccaauucgcccugggacagggcaccacacucaauaaccggcauucuaaugauaccguucacgaccgcacgccguauagaacacugcugaugaacgaacucggggugcccuuucaucugggaaccaaacaggucuguaucgccuggagcuccagcucuugccacgauggcaaggcuuggcuucauguguguguuacaggccacgacgagaaugccaccgcuuccuucauuuacgaugggcggcugguggacagcaucggaucuugguccaaaaacauucuccgcacccaggaaagcgagugcgucuguaucaauggcacaugcacgguggugaugaccgaugggucugccuccgagagagcggacacaaagauucuguuuaucgaagagggaaaaaucguccacauuagcccucuuuccggcucugcccaacauguugaagagugcagcuguuauccccgguacccuggggugcgcugcguguguagagauaacuggaagggauccaaccggcccaucgucgacauuaaugugaaggauuacagcaucguuucuuccuaugugugcagcggccuggucggcgacaccccgcgcaaaaacgacucuagcuccucuagcuacuguagaaauccuaacaaugaaaaggggucccacggagugaaaggcugggcuuucgaugacgggaacgauguuuggaugggacggacaauuagcgaggagcuccgcucuggcuaugaaaccuuuaaggugaucgaggggugguccaaacccaauagcaagcugcagaucaacagacaggucauuguggaccggggaaauagaucuggcuacuccggcaucuucagcgucgaagggaaauccugcauuaaccgcuguuuuuauguggagcugauccggggaagaaagcaggaaacggagguuugguggacaucuaauagcauuguggucuucugcggcaccuccgggaccuacggaacaggcucuuggccugauggggccgacaucaaccucaugcccauuuga

SEQ ID NO: 214149 - RNA, 1410 nt, Artificial Sequence
  derived and/or modified CDS sequence (opt5) from neuraminidase__InfluenzaA__AFH00090
augaaccccaaucagaagaucauuaccaucggcagcgugucccugacaauugccacgaucugcuuccucaugcaaauugcuauccuggucaccacaguuacccuucacuuuaaacaguacgaguguaacucuccuccgaauaaccaggugaugcugugcgaacccacaaucauugagagaaauaucaccgaaauuguguaucucacaaacaccacgaucgagaaggaaauuuguccuaaacuggccgaguaccggaauuggagcaagccccagugcaaaaucaccggguucgcgccuuuuuccaaggacaacucuauucgccuuagcgcuggaggcgauaucugggucacaagagagcccuauguguccugugacccugggaagugcuaccaauucgcccugggacagggcaccacacucaauaaccggcauucuaaugauaccguucacgaccgcacgccguauagaacacugcugaugaacgaacucggggugcccuuucaucugggaaccaaacaggucuguaucgccuggagcuccagcucuugccacgauggcaaggcuuggcuucauguguguguuacaggccacgacgagaaugccaccgcuuccuucauuuacgaugggcggcugguggacagcaucggaucuugguccaaaaacauucuccgcacccaggaaagcgagugcgucuguaucaauggcacaugcacgguggugaugaccgaugggucugccuccgagagagcggacacaaagauucuguuuaucgaagagggaaaaaucguccacauuagcccucuuuccggcucugcccaacauguugaagagugcagcuguuauccccgguacccuggggugcgcugcguguguagagauaacuggaagggauccaaccggcccaucgucgacauuaaugugaaggauuacagcaucguuucuuccuaugugugcagcggccuggucggcgacaccccgcgcaaaaacgacucuagcuccucuagcuacuguuggaauccuaacaaugaaaaggggucccacggagugaaaggcugggcuuucgaugacgggaacgauguuuggaugggaagaacaauuagcgaggagcuccggucuggcuaugaaaccuuuaaggugaucgggggaugguccaaacccaauagcaagcugcagaucaaccgccaggucauuguggacagaggcaaucggucuggcuacuccgggaucuucagcgucgagggaaaauccugcauuaacagauguuuuuauguggaacugauccgcggccggaagcaggagacggaaguuugguggacaucuaauagcauuguggucuucugcgggaccuccggaaccuacggcacagggucuuggccugauggcgccgacaucaaccucaugcccauuuga

SEQ ID NO: 214150 - RNA, 1410 nt, Artificial Sequence
  derived and/or modified CDS sequence (opt5) from neuraminidase__InfluenzaA__AFH00101
augaaccccaaucagaagaucauuaccaucggcagcgugucccugacaauugccacgaucugcuuccucaugcaaauugcuauccuggucaccacaguuacccuucacuuuaaacaguacgaguguaacucuccuccgaauaaccaggugaugcugugcgaacccacaaucauugagagaaauaucaccgaaauuguguaucucacaaacaccacgaucgagaaggaaauuuguccuaaacuggccgaguaccggaauuggagcaagccccagugcaaaaucaccggguucgcgccuuuuuccaaggacaacucuauucgccuuagcgcuggaggcgauaucugggucacaagagagcccuauguguccugugacccugggaagugcuaccaauucgcccugggacagggcaccacacucaauaaccggcauucuaaugauaccguucacgaccgcacgccguauagaacacugcugaugaacgaacucggggugcccuuucaucugggaaccaaacaggucuguaucgccuggagcuccagcucuugccacgauggcaaggcuuggcuucauguguguguuacaggccacgacgagaaugccaccgcuuccuucauuuacgaugggcggcugguggacagcaucggaucuugguccaaaaagauucuccgcacccaggaaagcgagugcgucuguaucaacggcacaugcacgguggugaugaccgaugggucugccuccgagagagcggacacaaaaauucuguuuaucgaagagggaaagaucguccacauuagcccucuuuccggcucugcccaacauguugaagagugcagcuguuauccccgguacccuggggugcgcugcguguguagagauaauuggaagggauccaaccggcccaucgucgacauuaacgugaaagauuacagcaucguuucuuccuaugugugcagcggccuggucggcgacaccccgcgcaagaaugacucuagcuccucuagcuacuguagaaacccuaauaacgaaaaagggucccacggagugaagggcugggcuuucgaugacgggaaugauguuuggaugggacggacaauuagcgaggagcuccgcucuggcuaugaaaccuuuaaagugaucgggggaugguccaagcccaacagcaaacugcagaucaauagacaggucauuguggaccggggcaacagaucuggcuacuccgggaucuucagcgucgagggaaaguccugcauuaaucgcuguuuuuauguggaacugauccggggcagaaagcaggagacggaaguuugguggacaucuaacagcauuguggucuucugcgggaccuccggaaccuacggcacagggucuuggccugauggcgccgacaucaaucucaugcccauuuga

SEQ ID NO: 214151 - RNA, 1410 nt, Artificial Sequence; identical to SEQ ID NO: 207173
  derived and/or modified CDS sequence (opt5) from neuraminidase__InfluenzaA__AFH00112

SEQ ID NO: 214152 - RNA, 1410 nt, Artificial Sequence; identical to SEQ ID NO: 207173
  derived and/or modified CDS sequence (opt5) from neuraminidase__InfluenzaA__AFH00123

SEQ ID NO: 214153 - RNA, 1410 nt, Artificial Sequence
  derived and/or modified CDS sequence (opt5) from neuraminidase__InfluenzaA__AFH00156
augaaccccaaucagaagaucauuaccaucggcagcgugucccugacaauugccacgaucugcuuccucaugcaaauugcuauccuggucaccacaguuacccuucacuuuaaacaguacgaguguaacucuccuccgaauaaccaggugaugcugugcgaacccacaaucauugagagaaauaucaccgaaauuguguaucucacaaacaccacgaucgagaaggaaauuuguccuaaacuggccgaguaccggaauuggagcaagccccagugcaaaaucaccggguucgcgccuuuuuccaaggacaacucuauucgccuuagcgcuggaggcgauaucugggucacaagagagcccuauguguccugugacccugggaagugcuaccaauucgcccugggacagggcaccacacucaauaaccggcauucuaaugauaccguucacgaccgcacgccguauagaacacugcugaugaacgaacucggggugcccuuucaucugggaaccaaacaggucuguaucgccuggagcuccagcucuugccacgauggcaaggcuuggcuucauguguguguuacaggccacgacgagaaugccaccgcuuccuucauuuacgaugggcggcugguggacagcaucggaucuugguccaaaaacauucuccgcacccaggaaagcgagugcgucuguaucaauggcacaugcacgguggugaugaccgaugggucugccuccgagagagcggacacaaagauucuguuuaucgaagagggaaaaaucguccacauuagcccucuuuccggcucugcccaacauguugaagagugcagcuguuauccccgguacccuggggugcgcugcguguguagagauaacuggaagggauccaaccggcccaucauugacaucaaugucaaggauuacagcauugugucuuccuauguuugcagcggccuggugggcgacaccccgcgcaaaaacgacucuagcuccucuagcuacuguagaaauccuaacaaugaaaaggggucccacggagucaaaggcugggcuuucgaugacgggaacgauguguggaugggacggacaaucagcgaggagcuccgcucuggcuaugaaaccuuuaagguuaucgggggaugguccaaacccaauagcaagcugcagauuaacagacaggugaucgucgaccggggcaauagaucuggcuacuccgggauuuucagcguggagggaaaauccugcaucaaccgcuguuuuuaugucgaacugauucggggcagaaagcaggagacggaagugugguggacaucuaauagcaucguuguguucugcgggaccuccggaaccuacggcacagggucuuggccugauggcgccgacauuaaccucaugcccaucuga

SEQ ID NO: 214154 - RNA, 1410 nt, Artificial Sequence
  derived and/or modified CDS sequence (opt5) from neuraminidase__InfluenzaA__AFH00167
augaaccccaaucagaagaucauuaccaucggcagcgugucccugacaauugccacgaugugcuuccucaugcaaaucgcuauucuggucaccacaguuacccuucacuuuaaacaguacgaguguaacucuccuccgaauaaccaggugaugcugugcgaacccacaaucaucgagagaaauauuaccgaaaucguguaucucacaaacaccacgauugagaaggaaaucuguccuaaacuggccgaguaccggaauuggagcaagccccagugcaaaauuaccggguucgcgccuuuuuccaaggacaacucuauccgccuuagcgcuggaggcgauauuugggucacaagagagcccuauguguccugugacccugggaagugcuaccaauucgcccugggacagggcaccacacucaauaaccggcauucuaaugauaccguucacgaccgcacgccguauagaacacugcugaugaacgaacucggggugcccuuucaucugggaaccaaacaggucuguaucgccuggagcuccagcucuugccacgauggcaaggcuuggcuucauguguguguuacaggccacgacgagaaugccaccgcuuccuucaucuacgaugggcggcugguggacagcauuggaucuugguccaaaaacauccuccgcacccaggaaagcgagugcgucuguauuaauggcacaugcacgguggugaugaccgaugggucugccuccgagagagcggacacaaagauccuguuuauugaagagggaaaaaucguccacaucagcccucuuuccggcucugcccaacauguugaagagugcagcuguuauccccgguacccuggggugcgcugcguguguagagauaacuggaagggauccaaccggcccauugucgacaucaaugugaaggauuacagcauuguuucuuccuaugugugcagcggccuggucggcgacaccccgcgcaaaaacgacucuagcuccucuagcuacuguagaaauccuaacaaugaaaaggggucccacggagugaaaggcugggcuuucgaugacgggaacgauguuuggaugggacggacaaucagcgaggagcuccgcucuggcuaugaaaccuuuaaggugauugggggaugguccaaacccaauagcaagcugcagaucaacagacaggucaucguggaccggggcaauagaucuggcuacuccgggauuuucagcgucgagggaaaauccugcaucaaccgcuguuuuuauguggaacugauucggggcagaaagcaggagacggaaguuugguggacaucuaauagcaucguggucuucugcgggaccuccggaaccuacggcacagggucuuggccugauggcgccgacauuaaccucaugcccaucuga

SEQ ID NO: 214155 - RNA, 1410 nt, Artificial Sequence; identical to SEQ ID NO: 214153
  derived and/or modified CDS sequence (opt5) from neuraminidase__InfluenzaA__AFH00178

SEQ ID NO: 214156 - RNA, 1410 nt, Artificial Sequence
  derived and/or modified CDS sequence (opt5) from neuraminidase__InfluenzaA__AFH00189
augaaccccaaucagaagaucauuaccaucggcagcgugucccugacaauugccacgaucugcuuccucaugcaaauugcuauccuggucaccacaguuacccuucacuuuaaacaguacgaguauaacucuccuccgaauaaccaggugaugcugugugaacccaagaucauugagagaaauaucacagaaauuguguaccucaccaacacaaccaucgagaaagaaauuugcccuaagcuggccgaguaucggaauuggagcaaaccccaguguaagaucacgggguucgcgccuuuuuccaaggacaacucuauucgccuuagcgcuggaggcgauaucugggucaccagagagcccuacguguccugcgacccugggaaauguuaucaauucgcccugggacagggcacaacccucaauaaccggcauucuaaugauacaguucacgaccgcaccccguacagaacgcugcugaugaacgaacucggggugcccuuucaucugggaacaaagcaggucugcaucgccuggagcuccagcucuugucacgauggcaaggcuuggcuucaugugugcguuaccggccacgacgagaaugccacagcuuccuucauuuaugaugggcggcugguggacagcaucggaucuugguccaaaaacauucuccgcacccaggaaagcgagugugucugcaucaauggcaccuguacaguggugaugacggaugggucugccuccgagagagcggacaccaaaauucuguuuaucgaagagggaaagaucguccacauuagcccucuuuccggcucugcccaacauguugaagagugcagcugcuacccccgguacccuggggugcgcugugugugcagagauaacuggaagggauccaaccggcccaucgucgacauuaaugugaaagauuauagcaucguuucuuccuacguguguagcggccuggucggcgacacaccgcgcaagaacgacucuagcuccucuagcuauugcagaaauccuaacaaugaaaaagggucccacggagugaagggcugggcuuucgaugacgggaacgauguuuggaugggacggaccauuagcgaggagcuccgcucuggcuacgaaacauuuaaagugaucgggggaugguccaagcccaauagcaaacugcagaucaacagacaggucauuguggaccggggcaauagaucuggcuauuccgggaucuucagcgucgagggaaaguccuguauuaaccgcugcuuuuacguggaacugauccggggcagaaagcaggagaccgaaguuugguggacgucuaauagcauuguggucuucugugggacauccggaaccuauggcaccgggucuuggccugauggcgccgacaucaaccucaugcccauuuga

SEQ ID NO: 214157 - RNA, 1410 nt, Artificial Sequence; identical to SEQ ID NO: 207257
  derived and/or modified CDS sequence (opt5) from neuraminidase__InfluenzaA__AFH00200

SEQ ID NO: 214158 - RNA, 1410 nt, Artificial Sequence; identical to SEQ ID NO: 214154
  derived and/or modified CDS sequence (opt5) from neuraminidase__InfluenzaA__AFH00211

SEQ ID NO: 214159 - RNA, 1410 nt, Artificial Sequence
  derived and/or modified CDS sequence (opt5) from neuraminidase__InfluenzaA__AFH00222
augaaccccaaucagaagaucauuaccaucggcagcgugucccugacaauugccacgaucugcuuccucaugcaaauugcuauccuggucaccacaguuacccuucacuuuaaacaguacgaguguaacucuccuccgaauaaccaggugaugcugugcgaacccacaaucauugagagaaauaucaccgaaauuguguaucucacaaacaccacgaucgagaaggaaauuuguccuaaacuggccgaguaccggaauuggagcaagccccagugcaaaaucaccggguucgcgccuuuuuccaaggacaacucuauucgccuuagcgcuggaggcgauaucugggucacaagagagcccuauguguccugugacccugggaagugcuaccaauucgcccugggacagggcaccacacucaauaaccggcauucuaauaacaccguucacgaucgcacgccguauagaacacugcugaugaaugaacucggggugcccuuucaucugggaaccaaacaggucuguaucgccuggagcuccagcucuugccacgacggcaaggcuuggcuucauguguguguuacaggccacgaugagaacgccaccgcuuccuucauuuacgacgggcggcugguggauagcaucggaucuugguccaaaaauauucuccgcacccaggaaagcgagugcgucuguaucaacggcacaugcacgguggugaugaccgacgggucugccuccgagagagcggauacaaagauucuguuuaucgaagagggaaaaaucguccacauuagcccucuuuccggcucugcccaacauguugaagagugcagcuguuauccccgguacccuggggugcgcugcguguguagagacaacuggaagggauccaaucggcccaucgucgauauuaacgugaaggacuacagcaucguuucuuccuaugugugcagcggccuggucggcgauaccccgcgcaaaaaugacucuagcuccucuagcuacuguagaaacccuaauaacgaaaaggggucccacggagugaaaggcugggcuuucgacgaugggaaugacguuuggaugggacggacaauuagcgaggagcuccgcucuggcuaugaaaccuuuaaggugaucgggggaugguccaaacccaacagcaagcugcagaucaauagacaggucauuguggaucggggcaacagaucuggcuacuccgggaucuucagcgucgagggaaaauccugcauuaaucgcuguuuuuauguggaacugauccggggcagaaagcaggagacggaaguuugguggacaucuaacagcauuguggucuucugcgggaccuccggaaccuacggcacagggucuuggccugacggcgccgauaucaaucucaugcccauuuga

SEQ ID NO: 214160 - RNA, 1410 nt, Artificial Sequence; identical to SEQ ID NO: 207173
  derived and/or modified CDS sequence (opt5) from neuraminidase__InfluenzaA__AFH00233

SEQ ID NO: 214161 - RNA, 1410 nt, Artificial Sequence
  derived and/or modified CDS sequence (opt5) from neuraminidase__InfluenzaA__AFH00244
augaaccccaaucagaagaucauuaccaucggcagcgugucccugacaauugccacgaucugcuuccucaugcaaauugcuauccuggucaccacaguuacccuuuacuuuaaacaguaugaguguaacucuccuccgagcaaucaggugaugcugugcgaacccacaaucguggagagaaacauuaccgaaaucgucuaccucacaaauaccacgauugagaaggaaaucuguccuaaacuggccgaguaucggaacugguccaagccccagugcaaaauuaccggguucgcgccuuuuucuaaggacaauagcauccgccuuuccgcuggaggcgauauuugggugacaagagagcccuacguuucuugugacccugggaagugcuaucaauucgcccugggacagggcaccacacucaacaaucggcacagcaacgauaccgugcaugaccgcacgccguacagaacacugcugaugaaugaacucgggguccccuuucaccugggaaccaaacagguguguaucgccugguccucuagcuccugccaugauggcaaggcuuggcuucacguuugugugacaggccaugacgagaacgccaccgcuagcuucaucuaugaugggcggcuggucgacucuauuggauccuggagcaaaaauauccuccgcacccaggaaucugagugcguguguauuaacggcacaugcacgguggucaugaccgauggguccgccagcgagagagcggacacaaagauccuguuuauugaagagggaaaaaucguucacaucuccccucuuucuggcagcgccaagcacguggaagagugcuccuguuacccccgguacccuggggugcgcugcgucuguagagauaauuggaagggaagcaaccggcccauuguggacaucaacguuaaagauuauucuauuguguccagcuacgucugcucuggccuggugggcgacaccccgcgcaagaaugacagcuccucuagcuccuauuguagaaacccuaauaacgaaaaagggagccauggaguuaagggcugggcuuucgaugacgggaaugauguguggaugggacggacaaucucugaggagcuccgcuccggcuacgaaaccuuuaaagucauugggggauggagcaagcccaacucuaaacugcaaaucaauagacaggugaucgucgaccggggcaacagauccggcuauagcgggauuuucuccguggagggaaagucuugcaucaaucgcuguuuuuacguugaacugauucggggcagaaagcaggagacggaagugugguggacaagcaacuccaucgucguguucugcgggaccucuggaaccuauggcacagggagcuggccugauggcgccgacauuaaucucaugcccaucuga

SEQ ID NO: 214162 - RNA, 1410 nt, Artificial Sequence; identical to SEQ ID NO: 207257
  derived and/or modified CDS sequence (opt5) from neuraminidase__InfluenzaA__AFH00255

SEQ ID NO: 214163 - RNA, 1410 nt, Artificial Sequence; identical to SEQ ID NO: 207257
  derived and/or modified CDS sequence (opt5) from neuraminidase__InfluenzaA__AFH00266

SEQ ID NO: 214164 - RNA, 1410 nt, Artificial Sequence
  derived and/or modified CDS sequence (opt5) from neuraminidase__InfluenzaA__AFH00277
augaaccccaaucagaagaucauuaccaucggcagcgugucccugacaauugccacgaucugcuuccucaugcaaauugcuauccuggucaccacaguuacccuucacuuuaaacaguacgaguguaacucuccuccgagcaaucaggugaugcugugcgaacccacaaucauugagagaaacaucaccgaaauuguguaucucacaaauaccacgaucgagaaggaaauuuguccuaaacuggccgaguaccggaacugguccaagccccagugcaaaaucaccggguucgcgccuuuuucuaaggacaauagcauucgccuuuccgcuggaggcgauaucugggucacaagagagcccuaugugucuugugacccugggaagugcuaccaauucgcccugggacagggcaccacacucaacaaucggcauagcaacgauaccguucacgaccgcacgccguauagaacacugcugaugaaugaacucggggugcccuuucaucugggaaccaaacaggucuguaucgccugguccucuagcuccugccacgauggcaaggcuuggcuucauguguguguuacaggccacgacgagaacgccaccgcuagcuucauuuacgaugggcggcugguggacucuaucggauccuggagcaaaaauauucuccgcacccaggaaucugagugcgucuguaucaacggcacaugcacgguggugaugaccgauggguccgccagcgagagagcggacacaaagauucuguuuaucgaagagggaaaaaucguccacauuuccccucuuucuggcagcgcccaacauguugaagagugcuccuguuauccccgguacccuggggugcgcugcguguguagagauaauuggaagggaagcaaccggcccaucgucgacauuaacgugaaggauuacucuaucguuuccagcuaugugugcucuggccuggucggcgacaccccgcgcaaaaaugacagcuccucuagcuccuacuguagaaagccuaacaaugaaaaagggagccacggacucaagggcugggcuuucgaugacgggaacgauguguggaugggacggacaauuucugaggagcugcgcuccggcuaugaaaccuuuaaaguuaucgggggauggagcaagcccaauucuaaacugcagaucaacagacaggugauugucgaccggggcaauagauccggcuacagcgggaucuucuccguggagggaaagucuugcauuaaccgcuguuuuuaugucgaacucauccggggcagaaagcaggagacggaagugugguggacaagcaauuccauuguuguguucugcgggaccucuggaaccuacggcacagggagcuggccugauggcgccgacaucaaccugaugcccauuuga

SEQ ID NO: 214165 - RNA, 1410 nt, Artificial Sequence; identical to SEQ ID NO: 207257
  derived and/or modified CDS sequence (opt5) from neuraminidase__InfluenzaA__AFH00288

SEQ ID NO: 214166 - RNA, 1410 nt, Artificial Sequence; identical to SEQ ID NO: 214089
  derived and/or modified CDS sequence (opt5) from neuraminidase__InfluenzaA__AFH00299

SEQ ID NO: 214167 - RNA, 1410 nt, Artificial Sequence
  derived and/or modified CDS sequence (opt5) from neuraminidase__InfluenzaA__AFH00310
augaaccccaaucagaagaucauuaccaucggcagcgugucccugacaauugccacgaucugcuuccucaugcaaauugcuauccuggucaccacaguuacccuucacuuuaaacaguacgaguguucuagcuccccuaacaaucaggugaucccgugccagcccacaauuaucgaaagaaacauuaccgagaucguguaucugacaaauaccacgauugaaaaggagaucuguccuaaacucgucgaauaccggaacuggucuaagccccaaugcaaaauuaccggguucgccccuuuuagcaaggacaauuccauccgccugucugcgggaggcgauaucugggugacaagagagcccuauguuagcugugacccugggaagugcuaccaguucgcucuuggacagggcaccacacugaacaaucggcauuccaacgauaccgugcacgaccgcacgccguauagaacacuccugaugaaugagcuggggguccccuuucaucucggaaccaaacagguguguauugccuggucuagcuccagcugccacgauggcaaggccuggcugcauguuugugugacaggccacgacgaaaacgcuaccgccucuuucaucuacgaugggcggcuugucgacuccauuggaagcuggucuaaaaauauccugcgcacccaagaguccgaaugcguguguauuaacggcacaugcacgguggucaugaccgaugggagcgcuuccgagaaggccgacacaaaaauccucuuuaucgaggaaggaaagguugugcacauuucuccucugagcggcuccgcgcagcauguggaggaaugcagcuguuaucccagauacccugggguccggugcgugugucgcgauaauuggaagggaucuaacagacccaucguugacauuaacgugaaaaauuacuccaucgucagcucuuaugugugcagcggccuuguuggcgauaccccgcggaagaacgacuccucuagcuccagcuacugucgcaauccuaacaaugagaaagggucucacggagugaagggcugggccuucgacgaugggaacgacgucuggaugggaagaacaauuuccgaggaacugcggagcggcuaugagaccuuuaaagugaucgggggauggucuacgcccaauuccaagcuccagaucaaccgccaggucauuguggauagcggcaauagauccggcuacucugggaucuucagcguugaaggaaaauccugcauuaaccgguguuuuuauguggagcugaucagaggccgcaagcaagaaacaaaggucugguggaccucuaauagccuggugguuuucugcgggaccuccggaacauacggcaccgggagcuggccugacggcgcugauauuaaccucaugcccaucuga

SEQ ID NO: 214168 - RNA, 1410 nt, Artificial Sequence; identical to SEQ ID NO: 214167
  derived and/or modified CDS sequence (opt5) from neuraminidase__InfluenzaA__AFH00321

SEQ ID NO: 214169 - RNA, 1410 nt, Artificial Sequence
  derived and/or modified CDS sequence (opt5) from neuraminidase__InfluenzaA__AFH00332
augaaccccaaucagaagaucauuaccaucggcagcgugucccugacaauugccacgaucugcuuccucaugcaaauugcuauccuggucaccacaguuacccuucacuuuaaacaguacgaguguaacucuccuccgaauaaccaggugaugcugugcgaacccacaaucauugagagaaauaucaccgaaauuguguaucucacaaacaccacgaucgagaaggaaauuuguccuaaacuggccgaguaccggaauuggagcaagccccagugcaaaaucaccggguucgcgccuuuuuccaaggacaacucuauucgccuuagcgcuggaggcgauaucugggucacaagagagcccuauguguccugugacccugggaagugcuaccaauucgcccugggacagggcaccacacucaauaaccggcauucuaaugauaccguucacgaccgcacgccguauagaacacugcugaugaacgaacucggggugcccuuucaucugggaaccaaacaggucuguaucgccuggagcuccagcucuugccacgauggcaaggcuuggcuucauguguguguuacaggccacgacgagaaugccaccgcuuccuucauuuacgaugggcggcugguggacagcaucggaucuugguccaaaaacauucuccgcacccaggaaagcgagugcgucuguaucaauggcacaugcacgguggugaugaccgaugggucugccuccgagagagcggacacaaagauucuguuuaucgaagagggaaaaaucguccacauuagcccucuuuccggcucugcccaacauguugaagagugcagcuguuauccccgguacccuggggugcgcugcguguguagagauaacuggaagggauccaaccggcccaucgucgacauuaaugugaaggauuacagcaucguuucuuccuaugugugcagcggccuggucggcgacaccccgcgcaaaaacgacucuagcuccucuagccacugucucaauccuaacaaugaagaagggggacauggcgugaaggggugggcuuucgaugacggaaacgauguuuggaugggcagaacaauuuccgagaaacugcggagcggguacgagaccuuuaaggugaucggaggcuggucuaaacccaauuccaagcugcagaucaaccgccaggucauuguggacagaggcaaucggagcggguauucuggaaucuucuccgucgagggcaaagggugcauuaacagauguuuuuacguggaacucauccgcggacggaagcaggagacggaaguuugguggacaagcaauuccauuguggucuucugcggcaccucugggaccuauggcacaggaagcuggccugauggcgccgacaucaaccugaugcccauuuga

SEQ ID NO: 214170 - RNA, 1410 nt, Artificial Sequence
  derived and/or modified CDS sequence (opt5) from neuraminidase__InfluenzaA__AFH00343
augaaccccaaucagaagaucauuaccaucggcagcgugucccugacaauugccacgaucugcuuccucaugcaaauugcuauccuggucaccacaguuacccuucacuuuaaacaguacgaguguaacucuccuccgagcaaucaggccaugcugugcgaacccacaaucauugagagaaacaucaccgaaauuguguaucucacaaauaccacgaucgagaaggaaauuuguccuaaacuggcggaguaccggaacugguccaagccccagugcaaaaucaccggguucgcuccuuuuucuaaggacaauagcauucgccuuuccgccggaggcgauaucugggugacaagagagcccuaugucucuugugacccugggaagugcuaccaauucgcccugggacagggcaccacacucaacaaucggcauagcaacgauaccgugcacgaccgcacgccguauagaacacugcugaugaaugaacucgggguucccuuucaucugggaaccaaacagguguguaucgcuugguccucuagcuccugccacgauggcaaggccuggcuucaugucugugugacaggccacgacgagaacgcuaccgccagcuucauuuacgaugggcggcugguugacucuaucggauccuggagcaaaaauauucuccgcacccaggaaucugagugcguguguaucaacggcacaugcacggucgugaugaccgauggguccgcgagcgagagagccgacacaaagauucuguuuaucgaagagggaaaaaucgugcacauuuccccucuuucuggcagcgcucaacaugucgaagagugcuccuguuauccccgguacccugggguucgcugcguguguagagauaauuggaagggaagcaaccggcccaucguggacauuaacgucaaggauuacucuaucguguccagcuauguuugcucuggccuggugggcgacaccccgcgcaaaaaugacagcuccucuagcuccuacuguagaaacccuaauaacgaaaaggggagccacggagucaaaggcugggccuucgaugacgggaaugauguguggaugggacggacaauuucugaggagcuccgcuccggcuaugaaaccuuuaagguuaucgggggauggagcaaacccaacucuaagcugcagaucaauagacaggugauugucgaccggggcaacagauccggcuacagcgggaucuucuccguggagggaaaaucuugcauuaaucgcuguuuuuaugucgaacugauccggggcagaaagcaggagacggaagugugguggacaagcaacuccauuguuguguucugcgggaccucuggaaccuacggcacagggagcuggccugauggcgcugacaucaaucucaugcccauuuga

SEQ ID NO: 214171 - RNA, 1410 nt, Artificial Sequence
  derived and/or modified CDS sequence (opt5) from neuraminidase__InfluenzaA__AFH00354
augaaccccaaucagaagaucauuaccaucggcagcgugucccugacaauugccacgaucugcuuccucaugcaaauugcuauccuggucaccacaguuacccuucacuuuaaacaguacgaguguaacucuccuccgaauaaccaggugaugcugugcgaacccacaaucauugagagaaauaucaccaagauuguguaucucacaaacaccacgaucgaaaaagagauuuguccuaagcuggccgaauaccggaauuggagcaaaccccagugcaagaucaccggguucgcgccuuuuuccaaggacaacucuauucgccuuagcgcuggaggcgauaucugggucacaagagagcccuauguguccugugacccugggaaaugcuaccaauucgcccugggacagggcaccacacucaauaaccggcauucuaaugauaccguucacgaccgcacgccguauagaacacugcugaugaacgagcucggggugcccuuucaucugggaaccaagcaggucuguaucgccuggagcuccagcucuugccacgauggcaaggcuuggcuucauguguguguuacaggccacgacgaaaaugccaccgcuuccuucauuuacgaugggcggcugguggacagcaucggaucuugguccaaaaacauucuccgcacccaggagagcgaaugcgucuguaucaauggcacaugcacgguggugaugaccgaugggucugccuccgagagagcggacacaaaaauucuguuuaucgaggaaggaaagaucguccacauuagcccucuuuccggcucugcccaacauguugaggaaugcagcuguuauccccgguacccuggggugcgcugcguguguagagauaacuggaagggauccaaccggcccaucgucgacauuaaugugaaagauuacagcaucguuucuuccuaugugugcagcggccuggucggcgacaccccgcgcaagaacgacucuagcuccucuagcuacugucucaauccuaacaaugaggaagggggacacggcgugaaagggugggcuuucgaugacggaaacgauguuuggaugggcagaacaauuuccgagaagcugcggagcggguaugagaccuuuaaagugaucggaggcuggucuaagcccaauuccaaacugcagaucaaccgccaggucauuguggacagaggcaaucggagcggguacucuggaaucuucuccgucgaaggcaagagcugcgugaacagauguuuuuauguugagcucauucgcgggcggaagcaggaaacggaggugugguggacauccaauucuaucgucguguucugcggaaccagcggcaccuacgggacaggcuccuggccugauggagccgacauuaaccugaugcccaucuga

SEQ ID NO: 214172 - RNA, 1410 nt, Artificial Sequence; identical to SEQ ID NO: 207052
  derived and/or modified CDS sequence (opt5) from neuraminidase__InfluenzaA__AFH00365

SEQ ID NO: 214173 - RNA, 1410 nt, Artificial Sequence
  derived and/or modified CDS sequence (opt5) from neuraminidase__InfluenzaA__AFH00376
augaaccccaaucagaagaucauuaccaucggcagcgugucccugacaauugccacgaucugcuuccucaugcaaauugcuauccuggucaccacaguuacccuucacuuuaaacagugugagugcaacucuccuccgaauaaccaggugaugcugugugaacccacaaucauugagagaaauaucaccgaaauuguguaccucacaaacaccacgaucgagaaggaaauuugcccuaaacuggccgaguaucggaauuggagcaagccccaguguaaaaucaccggguucgcgccuuuuuccaaggacaacucuauucgccuuagcgcuggaggcgauaucugggucacaagagagcccuacguguccugcgacccugggaaguguuaucaauucgcccugggacagggcaccacacucaauaaccggcauucuaaugauaccguucacgaccgcacgccguacagaacacugcugaugaacgaacucggggugcccuuucaucugggaaccaaacaggucugcaucgccuggagcuccagcucuugucacgauggcaaggcuuggcuucaugugugcguuacaggccacgacgagaaugccaccgcuuccuucauuuaugaugggcggcugguggacagcaucggaucuugguccaaaaacauucuccgcacccaggaaagcgagugugucugcaucaauggcacaugcacgguggugaugaccgaugggucugccuccggcagagcggacacaaagauucuguuuaucgaggaaggaaaaaucguccacauuagcccucuuuccgggucugcccaacauguugaggaauguagcugcuacccccgguauccuggagugcgcugugugugcagagauaacuggaagggcuccaaccggcccaucgucgacauuaaugugaaggauuacagcaucguuucuuccuacguguguagcggccuggucggggacaccccgcgcaaaaacgacucuagcuccucuagcuauugccucaauccuaacaaugaggaaggaggccacggggugaagggaugggcuuucgaugacggcaacgauguuuggauggggagaacaauuuccgagaaacugcggagcggauacgagaccuuuaaggugaucggcggcuggucuaaacccaauuccaagcugcagaucaaccgccaggucauuguggacagagggaaucggagcggauauucuggcaucuucuccgucgaagggaaaagcuguauuaacagaugcuuuuacguggagcucauccgcggacggaagcaggaaacggagguuugguggacauccaauucuauuguggucuucuguggcaccagcgggaccuauggcacaggauccuggccugauggcgccgacaucaaccugaugcccauuuga

SEQ ID NO: 214174 - RNA, 1410 nt, Artificial Sequence
  derived and/or modified CDS sequence (opt5) from neuraminidase__InfluenzaA__AFH00387
augaaccccaaucagaagaucauuaccaucggcagcgugucccugacaauugccacgaucugcuuccucaugcaaauugcuauccuggucaccacaguuacccuucacuuuaaacaguacgaguguaacucuccuccgaauaaccaggugaugcugugcgaacccacaaucauugagagaaauaucaccgaaauuguguaucucacaaacaccacgaucgagaaggaaauuuguccuaaacuggccgaguaccggaauuggagcaagccccagugcaaaaucaccggguucgcgccuuuuuccaaggacaacucuauucgccuuagcgcuggaggcgauaucugggucacaagagagcccuauguguccugugacccugauaagugcuaccaauucgcccuggggcagggaaccacacucaauaaccggcauucuaaugacaccguucacgaucgcacgccguauagaacacugcugaugaacgaacucggcgugcccuuucaucuggggaccaaacaggucuguaucgccuggagcuccagcucuugccacgacggaaaggcuuggcuucauguguguguuacaggccacgaugagaaugccaccgcuuccuucauuuacgacggccggcugguggauagcaucucuuccuggagcaaaaacauucuccgcacccaggaaucugagugcgucuguaucaaugggacaugcacgguggugaugaccgacggauccgccagcgagagagcggauacaaagauucuguuuaucgaagagggcaaaaucguccacauuuccccucuuucugggagcgcccaacauguugaagagugcuccuguuauccccgguacccuggagugcgcugcguguguagagacaacuggaagggcagcaaccggcccaucgucgauauuaaugugaaggacuacucuaucguuuccagcuaugugugcucugggcuggucggagacaccccgcgcaaaaacgauagcuccucuagcuccuacugucucaauccuaacaaugaagagggcggccacggggugaagggaugggcuuucgacgauggcaacgacguuuggauggggagaacaauuagcgagaaacugcggucuggauaugaaaccuuuaaggugaucggcgggugguccaaacccaauagcaagcugcagaucaaccgccaggucauuguggauagaggaaaucggucuggcuacuccggcaucuucagcgucgaggggaaauccugcgugaacagauguuuuuauguugaacucauucgcggacggaagcaggagacggaagugugguggacaucuaauagcaucgucguguucugcggcaccuccgggaccuacggaacaggcucuuggccugacggggccgauauuaaccugaugcccaucuga

SEQ ID NO: 214175 - RNA, 1410 nt, Artificial Sequence
  derived and/or modified CDS sequence (opt5) from neuraminidase__InfluenzaA__AFH00398
augaaccccaaucagaagaucauuaccaucggcagcgugucccugacaauugccacgaucugcuuccucaugcaaauugcuauccuggucaccacaguuacccuucacuuuaaacaguacgaguguaacucuccuccgaauaaccaggugaugcugugcgaacccacaaucauugagagaaauaucaccgaaauuguguaucucacaaacaccacgaucgagaaggaaauuuguccuaaacuggccgaguaccggaauuggagcaagccccagugcaaaaucaccggguucgcgccuuuuuccaaggacaacucuauucgccuuagcgcuggaggcgauaucugggucacaagagagcccuauguguccugugacccugggaagugcuaccaauucgcccugggacagggcaccacacucaauaaccggcauucuaaugauaccguucacgaccgcacgccguauagaacacugcugaugaacgaacucggggugcccuuucaucugggaaccaaacaggucuguaucgccuggagcuccagcucuugccacgauggcaaggcuuggcuucauguguguguuacaggccacgacgagaaugccaccgcuuccuucauuuacgaugggcggcugguggacagcaucggaucuugguccaaaaacauucuccgcacccaggaaagcgagugcgucuguaucaauggcacaugcacgguggugaugaccgaugggucugccuccgagagagcggacacaaagauucuguuuaucgaagagggaaaaaucguccacauuagcccucuuuccggcucugcccaacauguugaagagugcagcuguuauccccgguacccuggggugcgcugcguguguagagauaacuggaagggauccaaccggcccaucgucgacauuaaugugaaggauuacagcaucguuucuuccuaugugugcagcggccuggucggcgacaccccgcgcaaaaacgacucuagcuccucuagcuacugucucaauccuaacaaugaagaagggggacacggcgugaaggggugggcuuucgaugacggaaacgauguuuggaugggcagaacaauuuccgagaaacugcggagcggguaugagaccuuuaaggugaucggaggcuggucuaaacccaauuccaagcugcagaucaaccgccaggucauuguggacagaggcaaucggagcggguacucuggaaucuucuccgucgagggcaaaagcugcgugaacagauguuuuuauguugaacucauucgcgggcggaagcaggagacggaagugugguggacauccaauucuaucgucguguucugcggaaccagcggcaccuacggggccggcuccuggccugauggagcugacauuaaccugaugcccaucuga

SEQ ID NO: 214176 - RNA, 1410 nt, Artificial Sequence
  derived and/or modified CDS sequence (opt5) from neuraminidase__InfluenzaA__AFH00409
augaaccccaaucagaagaucauuaccaucggcagcgugucccugacaauugccacgaucugcuuccucaugcaaauugcuauccuggucaccacaguuacccuucacuuuaaacaguacgaguguaacucuccuccgaauaaccaggugaugcugugcgaacccacaaucauugagagaaauaucaccgaaauuguguaucucacaaacaccacgaucgagaaggaaauuuguccuaaacuggccgaguaccggaauuggagcaagccccagugcaaaaucaccggguucgcgccuuuuuccaaggacaacucuauucgccuuagcgcuggaggcgauaucugggucacaagagagcccuauguguccugugacccugggaagugcuaccaauucgcccugggacagggcaccacacucaauaaccggcauucuaaugauaccguucacgaccgcacgccguauagaacacugcugaugaacgaacucggggugcccuuucaucugggaaccaaacaggucuguaucgccuggagcuccagcucuugccacgauggcaaggcuuggcuucauguguguguuacaggccacaaugagaacgccaccgcuuccuucauuuacgacgggcggcugguggauagcaucggaucuugguccaaaaauauucuccgcacccaggaaagcgagugcgucuguaucaacggcacaugcacgguggugaugaccgacgggucugccuccggcagagcggauacaaagauucuguuuaucgaggaaggaaaaaucguccacauuagcccucuuuccgggucugcccaacauguugaggaaugcagcuguuauccccgguacccuggagugcgcugcguguguagagacaacuggaagggcuccaaucggcccaucgucgauauuaacgugaaggacuacagcaucguuucuuccuaugugugcagcggccuggucggggauaccccgcgcaaaaaugacucuagcuccucuagcuacugucucaacccuaauaacgaggaaggaggccacggggugaagggaugggcuuucgacgauggcaaugacguuuggauggggagaacaauuuccgagaaacugcggagcggauaugagaccuuuaaggugaucggcggcuggucuaaacccaacuccaagcugcagaucaaucgccaggucauuguggauagagggaaccggagcggauacucuggcaucuucuccgucgaagggaaaagcugcauuaauagauguuuuuauguggagcucauccgcggacggaagcaggaaacggagguuugguggacauccaacucuauuguggucuucugcggcaccagcgggaccuacggcacaggauccuggccugacggcgccgauaucaaucugaugcccauuuga

SEQ ID NO: 214177 - RNA, 1410 nt, Artificial Sequence; identical to SEQ ID NO: 207052
  derived and/or modified CDS sequence (opt5) from neuraminidase__InfluenzaA__AFH00420

SEQ ID NO: 214178 - RNA, 1410 nt, Artificial Sequence; identical to SEQ ID NO: 207185
  derived and/or modified CDS sequence (opt5) from neuraminidase__InfluenzaA__AFH00431

SEQ ID NO: 214179 - RNA, 1410 nt, Artificial Sequence
  derived and/or modified CDS sequence (opt5) from neuraminidase__InfluenzaA__AFH00442
augaaccccaaucagaagaucauuaccaucggcagcgugucccugacaauugccacgaucugcuuccucaugcaaauugcuauccuggucaucaccguuacacuucacuuuaaacaguacgaguguaacucuccuccgaauaaccaggugaugcugugcgaacccaccauuaucgagagaaauauuacagaaaucguguaucucaccaacacaaccauugagaaggaaaucuguccuaaacuggccgaguaccggaauuggagcaagccccagugcaaaauuacgggguucgcgccuuuuuccaaggacaacucuauccgccuuagcgcuggaggcgauaucugggucaccagagagcccuauguguccugugacccugggaagugcuaccaauucgcccugggacagggcacaacccucaauaaccggcauucuaaugauacaguucacgaccgcaccccguauagaacgcugcugaugaacgaacucggggugcccuuucaucugggaacaaaacaggucuguauugccuggagcuccagcucuugccacgauggcaaggcuuggcuucauguguguguuaccggccacaaugagaacgccacagcuuccuucaucuacgacgggcggcugguggauagcauuggaucuugguccaaaaauauccuccgcacccaggaaagcgagugcgucuguauuaacggaaccugcacaguggugaugacggacgggucugccuccggcagagcggauaccaagauccuguuuaucgaggaaggcaaaauuguccacaucagcccucuuuccgggucugcccaacauguugaggaaugcagcuguuauccccgguacccuggagugcgcugcguguguagagacaacuggaagggcuccaaucggcccauugucgauaucaacgugaaggacuacagcauuguuucuuccuaugugugcagcggccuggucggggauacaccgcgcaaaaaugacucuagcuccucuagccacugucucaacccuaauaacgaggaaggaggccauggggugaagggaugggcuuucgacgauggcaaugacguuuggauggggagaaccaucuccgagaaacugcggagcggauacgagacauuuaaggugaucggcggcuggucuaaacccaacuccaagcugcagauuaaucgccaggucaucguggauagagggaaccggagcggauauucuggcauuuucuccgucgaagggaaaagcugcaucaauagauguuuuuacguggagcucauucgcggacggaagcaggaaaccgagguuugguggacguccaacucuaucguggucuucugcggcacaagcgggaccuauggcaccggauccuggccugacggcgccgauauuaaucugaugcccaucuga

SEQ ID NO: 214180 - RNA, 1410 nt, Artificial Sequence
  derived and/or modified CDS sequence (opt5) from neuraminidase__InfluenzaA__AFH00453
augaaccccaaucagaagaucauuaccaucggcagcgugucccugacaauugccacgaucugcuuccucaugcaaauugcuauccuggucaccacaguuacccuucacuuuaaacaguacgaguguaacucuccuccgaauaaccaggugaugcugugcgaacccacaaucauugagagaaauaucaccgaaguggucuaucucacaaacaccacgauugagaaggaaaucuguccuaaacuggccgaguaccggaauuggagcaagccccagugcaaaauuaccggguucgcgccuuuuuccaaggacaacucuauccgccuuagcgcuggaggcgauauuugggugacaagagagcccuauguuuccugugacccugauaagugcuaccaauucgcccuggggcagggaaccacacucaauaaccggcauucuaaugacaucgugcacgaucgcaccccguauagaacgcugcugaugaacgaacucggcguccccuuucaucuggggacaaaacagguguguaucgccuggagcuccagcucuugccacgacggaaaggcuuggcuucauguuugugugaccggccacgaugagaaugccacagcuuccuucauuuacgacggccggcuggucgauagcaucgggucuugguccaaaaagauucuccgcacccaggaaagcgagugcguguguaucaacggaaccugcacaguggucaugacggacggcucugccuccgggagagcggauaccaaaauucuguuuaucgaggaaggaaagaucguucacauuagcccucuuuccggcucugcccaacauguggaggaaugcagcuguuauccccgguacccuggggugcgcugcgucuguagagacaauuggaagggauccaaccggcccaucguggauauuaacguuaaagacuacagcaucgugucuuccuaugucugcagcggccuggugggcgacacaccgcgcaagaaugauucuagcuccucuagccacugucucaacccuaauaacgaggaagggggacauggcguuaaagggugggcuuucgacgauggaaaugacguguggaugggcagaaccauuuccgagaagcugcggagcggguacgagacauuuaaagucaucggaggcuggucuaagcccaacuccaaacugcagaucaaucgccaggugauugucgauagaggcaaccggagcggguauucuggaaucuucuccguggaaggcaagagcugcauuaauagauguuuuuacguugagcucauccgcgggcggaagcaggaaaccgaggugugguggacguccaacucuauugucguguucugcggaacaagcggcaccuaugggaccggcuccuggccugacggagccgauaucaaucugaugcccauuuga

SEQ ID NO: 214181 - RNA, 1410 nt, Artificial Sequence
  derived and/or modified CDS sequence (opt5) from neuraminidase__InfluenzaA__AFH00464
augaaccccaaucagaagaucauuaccaucggcagcgugucccugacaauugccacgaucugcuuccucaugcaaauugcuauccuggucaccacaguuacccuucacuuuaaacaguacgaguguaacucuccuccgaauaaccaggugaugcugugcgaacccacaaucauugagagaaauaucaccgaaauuguguaucucacaaacaccacgaucgagaaggaaauuuguccuaaacuggccgaguaccggaauuggagcaagccccagugcaaaaucaccggguucgcgccuuuuuccaaggacaacucuauucgccuuagcgcuggaggcgauaucugggucacaagagagcccuauguguccugugacccugggaagugcuaccaauucgcccugggacagggcaccacacucaaaaaucggcauucuaacgauaccguucacgaccgcacgccguauagaacacugcugaugaaugaacucggggugcccuuucaucugggaaccaagcaggucuguaucgccuggagcuccagcucuugccacgauggcaaagccuggcuucauguguguguuacaggccacgacgagaacgcuaccgcuuccuucauuuacgggggacggcugguggauagcaucggcucuugguccaagaaaauucuccgcacccaggaaagcgagugcgucuguaucaaugggacaugcacgguggugaugaccgacggaucugccuccggcagagcggauacaaagauucuguuuaucgaggaagggaagaucguccacauuagcccucuuuccggaucugcccaacauguugaggaaugcagcuguuauccccgguacccuggcgugcgcugcguguguagagacaacuggaaaggcuccaaucggcccaucgucgauauuaacgugaaggacuacagcaucguuucuuccuaugugugcagcgggcuggucggagauaccccgcgcaaaaacgacucuagcuccucuagcuacugucucaauccuaacaaugaggaaggcgggcacggagugaagggcugggcuuucgacgaugggaacgacguuuggaugggaagaacaauuuccgagaaacugcggagcggcuaugagaccuuuaaggugaucggcggguggucuaaacccaauuccaagcugcagaucaaccgccaggucauuguggauagaggaaaucggagcggcuacucugggaucuucuccgucgaaggaaagagcugcauuaacagauguuuuuauguggagcucauccgcggccggaaacaggaaacggagguuugguggacauccaauucuauuguggucuucugcgggaccagcggcaccuacggaacaggcuccuggccugacggggccgauaucaaccugaugcccauuuga

SEQ ID NO: 214182 - RNA, 1410 nt, Artificial Sequence
  derived and/or modified CDS sequence (opt5) from neuraminidase__InfluenzaA__AFH00475
augaaccccaaucagaagaucauuaccaucggcagcgugucccugacaauugccacgaucugcuuccucaugcaaauugcuauccuggucaccacaguuacccuucacuuuaaacaguacgaguguaacucuccuccgaauaaccaggugaugcugugcgaacccacaaucauugagagaaauaucaccgaaauuguguaucucacaaacaccacgaucgagaaggaaauuuguccuaaacuggccgaguaccggaauuggagcaagccccagugcaaaaucaccggguucgcgccuuuuuccaaggacaacucuauucgccuuagcgcuggaggcgauaucugggucacaagagagcccuauguguccuguaauccugacaagugcuaccaauucgcccuggggcagggaaccacacucaacaaucggcauucuaacgauaccguucacgaccgcacgccguauagaacacugcugaugaaugaacucggcgugcccuuucaucuggggaccaaacaggucuguaucgccuggagcuccagcucuugccacgauggaaaggcuuggcuucauguguguguuacaggccacgacgagaacgccaccgcuuccuucauuuacgauggccggcugguggacagcaucgggucuugguccaaaaagauucuccgcacccaggaaagcgagugcgucuguaucaauggaacaugcacgguggugaugaccgauggcucugccuccgggagagcggacacaaaaauucuguuuaucgaggaaggaaagaucguccacauuagcccucuuuccggcucugcccaacauguugaggaaugcagcuguuauccccgguacccuggggugcgcugcguguguagagauaacuggaagggauccaaccggcccaucgucgacauuaaugugaaagauuacagcaucguuucuuccuaugugugcagcggccuggucggcgacaccccgcgcaagaacgacucuagcuccucuagccacugucucaauccuaacaaugaggaagggggacauggcgugaaagggugggcuuucgaugacggaaacgauguuuggaugggcagaacaauuuccgagaagcugcggagcggguacgagaccuuuaaagugaucgaaggauggucuaagcccaauuccaaacugcagaucaaccgccaggucauuguggacagaggcaaucggagcggcuauucugggaucuucuccgucgagggaaagagcugcauuaacagauguuuuuacguggaacucauccgcggccggaagcaggagacggaaguuugguggacauccaauucuauuguggucuucugcgggaccagcggaaccuauggcacaggguccuggccugauggcgccgacaucaaccugaugcccauuuga

SEQ ID NO: 214183 - RNA, 1410 nt, Artificial Sequence
  derived and/or modified CDS sequence (opt5) from neuraminidase__InfluenzaA__AFH00486
augaaccccaaucagaagaucauuaccaucggcagcgugucccugacaauugccacgaucugcuuccucaugcaaauugcuauccuggucaccacaguuacccuucacuuuaaacaguacgaguguaacucuccuccgaauaaccaggugaugcugugcgaacccacaaucauugagagaaauaucaccgaaauuguguaucucacaaacaccacgaucgagaaggaaauuuguccuaaacuggccgaguaccggaauuggagcaagccccagugcaaaaucaccggguucgcgccuuuuuccaaggacaacucuauucgccuuagcgcuggaggcgauaucugggucacaagagagcccuauguguccugugacccugauaagugcuaccaauucgcccuggggcagggaaccacacucaauaaccggcauucuaaugacaccguucacgaucgcacgccguauagaacacugcugaugaacgaacucggcgugcccuuucaucuggggaccaaacaggucuguaucgccuggagcuccagcucuugccacgacggaaaggcuuggcuucauguguguguuacaggccacgaugagaaugccaccgcuuccuucauuuacgacggccggcugguggauagcaucgggucuugguccaaaaagauucuccgcacccaggaaagcgagugcgucuguaucaacggaacaugcacgguggugaugaccgacggcucugccuccgggagagcggauacaaaaauucuguuuaucgaggaaggaaagaucguccacauuagcccucuucugggcuccgcccaacauguugaggaaugcucuuguuauccccgguacccuggggugcgcugcguguguagagacaauuggaagggaagcaaccggcccaucgucgauauuaacgugaaagacuacuccaucguuagcucuuaugugugcuccggccucgucggcgacaccccgcgcaagaaugauagcucuagcuccucucacugucugaacccuaauaacgaggaagggggacauggcgugaaagggugggcuuucgacgauggaaaugacguuuggaugggcagaacaauuagcgagaagcugcgguccggguacgagaccuuuaaagugaucgaaggauggagcaagcccaacucuaaacuccagaucaaucgccaggucauuguggauagaggcaaccgguccggcuauagcgggaucuucucugucgagggaaaguccugcauuaauagauguuuuuacguggaacugauccgcggccggaagcaggagacggaaguuugguggacaagcaacuccauuguggucuucugcgggaccucuggaaccuauggcacagggagcuggccugacggcgccgauaucaaucuuaugcccauuuga

SEQ ID NO: 214184 - RNA, 1410 nt, Artificial Sequence
  derived and/or modified CDS sequence (opt5) from neuraminidase__InfluenzaA__AFH00497
augaaccccaaucagaagaucauuaccaucggcagcgugucccugacaauugccacgaucugcuuccucaugcaaauugcuauccuggucaccacaguuacccuucacuuuaaacaguacgaguguaacucuccuccgaauaaccaggugaugcugugcgaacccacaaucauugagagaaauaucaccgaaauuguguaucucacaaacaccacgaucaagaaagagauuuguccuaagcuggccgaauaccggaauuggagcaaaccccagugcaagaucaccggguucgcgccuuuuuccaaggacaacucuauucgccuuagcgcuggaggcgauaucugggucacaagagagcccuauguguccugugacccugggaaaugcuaccaauucgcccugggacagggcaccacacucaauaaccggcauucuaaugauaccguucacgaccgcacgccguauagaacacugcugaugaacgagcucggggugcccuuucaucugggaaccaagcaggucuguaucgccuggagcuccagcucuugccacgauggcaaggcuuggcuucauguguguguuacaggccacgacgaaaaugccaccgcuuccuucauuuacgaugggcggcugguggacagcaucggaucuugguccaaaaacauucuccgcacccaggagagcgaaugcgucuguaucaauggcacaugcacgguggugaugaccgaugggucugccuccgagagagcggacacaaaaauucuguuuaucgaggaaggaaagaucguccacauuagcccucuuuccggcucugcccaacauguugaggaaugcagcuguuauccccgguacccuggggugcgcugcguguguagagauaacuggaagggauccaaccggcccaucgucgacauuaaugugaaagauuacagcaucguuucuuccuaugugugcagcggccuggucggcgacaccccgcgcaagaacgacucuagcuccucuagcuacuguuggaauccuaacaaugagaaagggggacacggcgugaaggggugggcuuucgaugacggaaacgauguuuggaugggcagaacaauuuccgaggaacuccggagcggguaugagaccuuuaaagugaucggaggcuggucuaagcccaauuccaaacugcagaucaaccgccaggucauuguggacagaggcaaucggagcggguacucuggaaucuucuccgucgaaggcaagagcugcauuaacagauguuuuuauguggagcugauccgcgggcggaagcaggaaacggagguuugguggacauccaauucuauuguggucuucugcggaaccagcggcaccuacgggacaggcuccuggccugauggagccgacaucaaccucaugcccauuuga

SEQ ID NO: 214185 - RNA, 1410 nt, Artificial Sequence
  derived and/or modified CDS sequence (opt5) from neuraminidase__InfluenzaA__AFH00508
augaaccccaaucagaagaucauuaccaucggcagcgugucccugacaauugccacgaucugcuuccucaugcaaauugcuauccuggucaucaccguuacacuucacuuuaaacaguacgaguguaacucuccuccgaauaaccaggugaugcugugcgaacccaccauuaucgagagaaauauuacagaaaucguguaucucaccaacacaaccauugagaaggaaaucuguccuaaacuggccgaguaccggaauuggagcaagccccagugcaaaauuacgggguucgcgccuuuuuccaaggacaacucuauccgccuuagcgcuggaggcgauaucugggucaccagagagcccuauguguccugugacccugggaagugcuaccaauucgcccugggacagggcacaacccucaauaaccggcauucuaaugauacaguucacgaccgcaccccguauagaacgcugcugaugaacgaacucggggugcccuuucaucugggaacaaaacaggucuguauugccuggagcuccagcucuugccacgauggcaaggcuuggcuucauguguguguuaccggccacaaugagaacgccacagcuuccuucaucuacgacgggcggcugguggauagcauuggaucuugguccaaaaauauccuccgcacccaggaaagcgagugcgucuguauuaacggaaccugcacaguggugaugacggacgggucugccuccggcagagcggauaccaagauccuguuuaucgaggaaggcaaaauuguccacaucagcccucuuuccgggucugcccaacauguugaggaaugcagcuguuauccccgguacccuggagugcgcugcguguguagagacaacuggaagggcuccaaucggcccauugucgauaucaacgugaaggacuacagcauuguuucuuccuaugugugcagcggccuggucggggauacaccgcgcaaaaaugacucuagcuccucuagccacugucucaacccuaauaacgaggaaggaggccauggggugaagggaugggcuuucgacgauggcaaugacguuuggauggggagaaccaucuccgagaaacugcggagcggauacgagacauuucgcgugaucggcggcuggucuaagcccaacuccaaacugcagauuaauagacaggucaucguggaucgggggaacagaagcggauauucuggcauuuucuccgucgaaggaaagagcugcaucaaucgcuguuuuuacguggagcucauucgggggagaaaacaggaaaccgagguuugguggacguccaacucuaucguggucuucugcggcacaagcgggaccuauggcaccggauccuggccugacggcgccgauauuaaucugaugcccaucuga

SEQ ID NO: 214186 - RNA, 1410 nt, Artificial Sequence
  derived and/or modified CDS sequence (opt5) from neuraminidase__InfluenzaA__AFH00519
augaaccccaaucagaagaucauuaccaucggcagcgugucccugacaauugccacgaugugcuuccucaugcaaaucgcuauucuggucaccacaguuacccuucacuuuaaacaguacgaguguaacucuccuccgaauaaccaggugaugcugugcgaacccacaaucaucgagagaaauauuaccgaaaucguguaucucacaaacaccacgauugagaaggaaaucuguccuaaacuggccgaguaccggaauuggagcaagccccagugcaaaauuaccggguucgcgccuuuuuccaaggacaacucuauccgccuuagcgcuggaggcgauauuugggucacaagagagcccuauguguccugugacccugggaagugcuaccaauucgcccugggacagggcaccacacucaauaacgggcauucuaaugauaccguucacgaccggacgccguaucgcacacugcugaugaacgaacucggagugcccuuucaucugggcaccaaacaggucuguaucgccuggagcuccagcucuugccacgauggcaaggcuuggcuucauguguguguuacagggcacgacgagaaugccaccgcuuccuucaucuacgauggaagacugguggacagcauuggcucuugguccaaaaacauccuccggacccaggaaagcgagugcgucuguauuaaugggacaugcacgguggugaugaccgauggaucugccuccggccgcgcggacacaaagauccuguuuauugaggaagggaaaaucguccacaucagcccucuuuccggaucugcccaacauguugaggaaugcagcuguuaucccagauacccuggcgugcggugcgugugucgcgauaacuggaagggcuccaacagacccauugucgacaucaaugugaaggauuacagcauuguuucuuccuaugugugcagcgggcuggucggagacaccccgcggaaaaacgacucuagcuccucuagccacugucucaauccuaacaaugaggaaggcgggcauggagugaagggcugggcuuucgaugacgggaacgauguuuggaugggacgcacaaucuccgagaaacugagaagcggcuacgagaccuuuaaggugauuggcggguggucuaaacccaauuccaagcugcagaucaaccggcaggucaucguggaccgcggaaauagaagcggcuauucugggauuuucuccgucgaaggaaaaagcugcaucaaccgguguuuuuacguggagcucauuagaggccgcaagcaggaaacggagguuugguggacauccaauucuaucguggucuucugcgggaccagcggcaccuauggaacaggcuccuggccugauggggccgacauuaaccugaugcccaucuga

SEQ ID NO: 214187 - RNA, 1410 nt, Artificial Sequence; identical to SEQ ID NO: 206645
  derived and/or modified CDS sequence (opt5) from neuraminidase__InfluenzaA__AFH00530

SEQ ID NO: 214188 - RNA, 1410 nt, Artificial Sequence; identical to SEQ ID NO: 206645
  derived and/or modified CDS sequence (opt5) from neuraminidase__InfluenzaA__AFH00541

SEQ ID NO: 214189 - RNA, 1410 nt, Artificial Sequence
  derived and/or modified CDS sequence (opt5) from neuraminidase__InfluenzaA__AFH00552
augaaccccaaucagaagaucauuaccaucggcagcgugucccugacaauugccacgaucugcuuccucaugcaaauugcuauccuggucaccacaguuacccuucacuuuaaacaguacgaguguaacucucugccuaauaaccaggugaugcucugcgaaccgacaaucauugagagaaauaucaccgaaauuguguaucugacaaacaccacgaucgagaaggaaauuugucccaaacuugccgaguaccggaauuggagcaagccucagugcaaaaucaccggguucgcgcccuuuuccaaggacaacucuauucgccugagcgcuggaggcgauaucugggucacaagagagccuuauguguccugugaccccgauaagugcuaccaauucgcccucgggcagggaaccacacugaauaaccggcauucuaaugacaccguucacgaucgcacgccuuauagaacacugcucaugaacgaacugggcgugccguuucaucuugggaccaaacaggucuguaucgccuggagcuccagcucuugccacgacggaaaggcuuggcugcauguguguguuacaggccacgaugagaaugccaccgcuuccuucauuuacgacggccggcucguggauagcaucgggucuugguccaaaaagauucugcgcacccaggaaagcgagugcgucuguaucaacggaacaugcacgguggugaugaccgacggcucugccuccgggagagcggauacaaaaauucuuuuuaucgaggaaggaaagaucauucacaucagccaacuguccggcucuacccagcaugucgaggaaugcagcuguuauccccgguacccugggguucgcugcguguguagagacaauuggaagggauccaaccggcccauuguggauaucaacgucaaagacuacagcauugugucuuccuauguuugcagcggccucgugggcgacacaccucgcaagaaugauucuagcuccucuagccacugucugaaccccaauaacgaggaagggggacauggcgucaaagggugggccuucgacgauggaaaugacguguggaugggcagaaccaucuccgagaaguuucggagcggguacgagacguucaaaguuaucgaaggauggucuaagccgaacuccaaacugcagauuaaucgccaggugaucgucgauagagacaaccggagcggcuauucuggcauuuuuagcguggaggggaaguccugcaucaauagauguuucuacgucgaacucauucgcggacggaagcaagagacagaagugugguggaccuccaacucuaucguuguguuuugcggcaccagcgggacauauggaaccggcuccuggccugauggggcugacauuaaucugaugcccaucuga

SEQ ID NO: 214190 - RNA, 1410 nt, Artificial Sequence
  derived and/or modified CDS sequence (opt5) from neuraminidase__InfluenzaA__AFH00563
augaaccccaaucagaagaucauuaccaucggcagcgugucccugacaauugccacgaucugcuuccucaugcaaauugcuauccuggucaccacaguuacccuucacuuuaaacaguacgaguguaacucuccuccgaauaaccaggugaugcugugcgaacccacaaucauugagagaaauaucaccgaaauuguguaucucacaaacaccacgaucgagaaggaaauuuguccuaaacuggccgaguaccggaauuggagcaagccccagugcaacaucaccggguucgcgccuuuuuccaaagacaauucuauucgccuuagcgcuggaggcgauaucugggucacaagagagcccuauguguccugugacccugauaagugcuaccaauucgcccuggggcagggaaccacacucaacaauggccauucuaacgacaccguucacgaacggacgccguaucgcacacugcugaugaaugagcucggggugcccuuucaucugggaaccaagcaggucuguaucgccuggagcuccagcucuugccacgauggcaaagccuggcuucauguguguguuacaggcgacgaugaaaacgcuaccgcuuccuucauuuacaaugggagacugguggacagcaucggaucuugguccaagaaaauucuccggacccaggagagcgagugcgucuguaucaacggcacaugcacgguggugaugaccgaugggucugccuccggaaaggcggacacaaaaauucuguuuaucgaagagggcaagaucguccacaccagcccucuuuccgggucugcccaacacguugaagagugcagcuguuauccccgcuacccuggagugagaugcgugugucgggauaacuggaagggcuccaaucgccccauugucgacaucaacgugaaagauuacagcauuguuucuuccuaugugugcagcggccuggucggggacacaccgagaaagaaugacucuagcuccucuagccauugucucgauccuaacaaugaagagggaggccacggggugaaaggaugggcuuucgacgauggcaacgacguuuggauggggcggaccaucuccgagaagcugcgcagcggauacgaaacguuuaaagugauugagggcuggucuaagcccaauuccaaacugcagaucaacagacaggucaucguggaucggggcaaucgcagcggguauucuggaauuuucuccgucgaaggcaagagcugcaucaacagauguuuuuacguggagcucauucgggggagaaagcaggaaacagagguucuguggaccuccaauucuaucguggucuucugcggaaccagcggcacauaugggaccggcuccuggccugacggagccgauauuaaccuuaugcccaucuga

SEQ ID NO: 214191 - RNA, 1410 nt, Artificial Sequence
  derived and/or modified CDS sequence (opt5) from neuraminidase__InfluenzaA__AFH00574
augaaccccaaucagaagaucauuaccaucggcagcgugucccugacaauugccacgaucugcuuccucaugcaaauugcuauccuggucaccacaguuacccuucacuuuaaacaguacgaguguaacucuccuccgaauaaccaggugaugcugugcgaacccaagaucauugagagaaauaucacagaaauuguguaucucaacaauaccacaaucgagaaagaaauuuguccuaagcuggccgaguaccggaacuggagcaaaccccagugcaauaucaccggguucgcgccuuuuuccaaggacaacucuauucgccuuagcgcuggaggcgauaucugggucacgagagagcccuauguguccugugacccugauaagugcuaccaauucgcccuggggcagggaaccacacucaauaacggccauucuaaugacaccguucacgaucggacaccguaucgcacccugcugaugaacgaacucggggugcccuuucaucugggaacgaaacaggucuguaucgccuggagcuccagcucuugccacgacggcaaggcuuggcuucauguguguguuacaggcgaugacgagaaugccaccgcuuccuucauuuacaacgggagacugguggauagcaucggaucuugguccaaaaagauucuccggacacaggaaagcgagugcgucuguaucaacgggaccugcaccguggugaugacagacggcucugccuccggaaaagcggauacgaagauucuguuuaucgaggaaggcaagaucguccacaccagccuucuguccgggucugcccaacacguugaggaaugcagcuguuauccucgcuaccccggagugagaugcgugugucgggacaauuggaaaggcuccaaccgcccuauugucgauaucaaugugaaggacuacagcauuguuucuuccuaugugugcagcggccucgucggggacacaccccggaaaaacgauucuagcuccucuagccauugucuggacccgaauaacgaggaaggaggccacggggugaagggaugggcuuucgaugacggcaaugauguuuggauggggagaaccaucuccgagaaacugcgcagcggauacgagacauuuaaggugauugaaggcuggucuaaaccuaacuccaagcuccagaucaauagacaggucaucguggaccggggcaaccgcagcggguauucuggaauuuucuccgucgagggcaagagcugcaucaauagauguuuuuacguggaacugauucgggggagaaaacaggagaccgaaguucuuuggacguccaacucuaucguggucuucugcggaacaagcggcaccuaugggaccggcuccuggcccgauggagccgacauuaaucugaugccuaucuga

SEQ ID NO: 214192 - RNA, 1410 nt, Artificial Sequence
  derived and/or modified CDS sequence (opt5) from neuraminidase__InfluenzaA__AFH00585
augaaccccaaucagaagaucauuaccaucggcagcgugucccugacaauugccacgaucugcuuccucaugcaaauugcuauccuggucaccacaguuacccuucacuuuaaacaguacgaguguaacucuccuccgaauaaccaggugaugcugugcgaacccacaaucauugagagaaauaucaccgaaauuguguaucucacaaacaccacgaucaagaaagagauuuguccuaagcuggccgaauaccggaauuggagcaaaccccagugcaacaucaccggguucgcgccuuuuuccaaggacaauucuauucgccuuagcgcuggaggcgauaucugggucacaagagagcccuauguguccugugacccugauaagugcuaccaauucgcccuggggcagggaaccacacucaacaaucggcauucuaacgacaaaguucacgaucgcaccccguauagaacgcugcugaugaaugagcucggcgugcccuuucaucuggggacaaagcaggucuguaucgccuggagcuccagcucuugccacgacggaaaagccuggcuucauguguguguuaccggcgaugacgaaaacgcuacagcuuccuucauuuacaauggccggcugguggauagcaucgggucuugguccaagaaaauucuccgcacccaggagagcgaaugcgucuguaucaacggaaccugcacaguggugaugacggacggcucugccuccgggaaggcggauaccaagauucuguuuaucaaagagggaaagaucguccacacaagcucccuuucuggcagcgcccaacacguugaggaaugcuccuguuauccuagauaccccggggugcggugcgugugucgcgacaacuggaaaggaagcaauagaccuauugucgauaucaacgugaaggacuacucuauuguuuccagcuaugugugcucuggccuggucggcgacacaccccggaaaaaugauagcuccucuagcucccauugucucgacccgaacaaugaggaagggggacacggcgugaaggggugggcuuucgaugacggaaacgauguuuggaugggccgcaccaucagcgagaaacugagaucuggguacgaaaccuuuaaggugauugagggaugguccaaggccaauagcaaacugcagaucaaccggcaggucaucguggaccgcggcaauagaucuggcuauuccgggauuuucagcgucgaguccaagucuugcaucaaccgguguuuuuacguggaacucauuagaggacgcaaacaggagacggaaguucuguggacaagcaauuccaucguggucuucugcggcaccucugggaccuauggaacaggcagcuggccugauggggcugacauuaaccuuaugcccaucuga

SEQ ID NO: 214193 - RNA, 1410 nt, Artificial Sequence; identical to SEQ ID NO: 206780
  derived and/or modified CDS sequence (opt5) from neuraminidase__InfluenzaA__AFH00596

SEQ ID NO: 214194 - RNA, 1410 nt, Artificial Sequence
  derived and/or modified CDS sequence (opt5) from neuraminidase__InfluenzaA__AFH00607
augaaccccaaucagaagaucauuaccaucggcuucguguuuuucacaauugccacgaucugcuuucugaugcaaauugcuauccucgucaccacaguuacccugcacuucaaacaguacgaguguaacccuccgcccaauaaccaggugaugcuuugcgaaccuacaaucauugagagaaauaucaccgaaauuguguaucugacaaacaccacgaucgagaaggaaauuugucccaaacucgccgaguaccggaauuggagcaagccucagugcaacaucaccggguuugcgcccuucuccaaagacaauucuauucgccugagcgcuggaggcgauaucugggucacaagagagccuuauguguccugugacccggauaagugcuaccaauuugcccuugggcagggaaccacacugaacaauggccauucuaacgacaccguucacgaucggacgcccuaucgcacacuccugaugaaugaacugggggugccuuuccaucucggaaccagacaggucuguaucgccuggagcuccucuagcugccacgacggcaaggcuuggcugcauguguguguuacaggcgaugacgagaacgccaccgcuuccuuuauuuacaaugggcggcuuguggauagcaucggaucuugguccaaaaagauucugcgcacccaggaaagcgagugcgucuguaucaacggcacaugcacgguggugaugaccgacgggucugccuccggaaaagcggauacaaagauucucuucaucgaggaaggcaaaaucguccacauuagcacccugucuggguccgcccaacacguugaggaaugcagcuguuaucccagauacccuggagugcggugcgugugucgcgacaacuggaagggcuccaauagacccaucgucgauauuaacgugaaggacuacucuaucguuagcuccuaugugugcagcggccuugucggggacacaccgcggaaaaaugauucuuuuuccagcucucauugucuggacccuaacaaugaggaaggaggccacggggugaagggaugggcuuucgaugacggcaacgauguuuggauggggcgcaccauuagcgagaaacucagauccggauacgagacguuuaaggugaucgaaggcuggucuaaacccaauagcaagcugcagacaaaccggcaggucaucguggagcgcggcaauagauccggguauagcggaauuuucucugucgaaggcaaauccugcaucaaccgguguuucuacguggagcugauuagagggcgcaaggaagagaccgagguuugguggaccagcaauucuaucguggucuuuugcggaacauccggcaccuaugggacaggcagcuggccugacggagccgauauuaaccucaugcccaucuga

SEQ ID NO: 214195 - RNA, 1410 nt, Artificial Sequence; identical to SEQ ID NO: 208001
  derived and/or modified CDS sequence (opt5) from neuraminidase__InfluenzaA__AFH00618

SEQ ID NO: 214196 - RNA, 1410 nt, Artificial Sequence
  derived and/or modified CDS sequence (opt5) from neuraminidase__InfluenzaA__AFH00629
augaaccccaaucagaagaucauuaccaucggcagcgugucccugacaauugccacgaucugcuuccucaugcaaauuaccauccuggucacaaccguuacacuucacuuuaaacaguacgaguguaacucuccuccgaauaaccaggugaugcugugcgaacccaccaucauugagagaaauaucacagaaauuguguaucucaccaacacgaccaucgagaaggggauuuguccuaaacuggcugaauaccggaauuggagcaagccccagugcaacaucacaggauucgccccuuuuuccaaagacaauucuauucgccuuagcgcgggcggggauaucugggucaccagagagcccuauguguccugugacccugauaagugcuaccaauucgcucugggacagggcacaacccucaacaaugggcauucuaacgacacgguucacgaucggacaccguaucgcacccugcugaugaaugagcucggagugcccuuucaucugggcacaagacaggucuguaucgccuggagcuccagcucuugccacgacggcaaggccuggcuucauguguguguuaccggggaugacaaaaacgcuaccgccuccuucauuuacaauggacggcugguggauagcaucggcucuugguccaagaaaauucuccgcacacaggaaagcgagugcgucuguaucaacgggacgugcaccguggugaugacagacggaucugcuuccggcaaggccgauaccaaaauucuguuuaucgaagaggggaagaucauucacaucagcacacuucugggauccgcgcaacacgucgaggaaugcucuuguuauccuagauaccccggcguucggugcgugugucgcgacaacuggaagggcagcaauagaccuauuguggauaucaacgucaaagacuacuccauugugagcucuuauguuugcuccgggcucgugggagacacgccccggaagaaugauagcucuagcuccucucauugucuggacccgaacaaugaggaaggcgggcacggagucaaaggcugggccuucgaugacgggaacgauguguggaugggacgcaccaucagcgagaagcugagauccggcuacgaaacauuuaaaguuaucgagggcuggagcaagccuaauucuaaacuccagauuaaccgccaggugaucgucgagcgggggaauagauccggauauagcggcauuuucucuguggaagggaaguccugcaucaaccgguguuuuuacgucgagcugauuagaggacgcaaggaagagaccgaagugugguggaccagcaauuccaucguuguguucugcggcacaucugggaccuauggcacaggaagcuggcccgacggcgcugauauuaaccuuaugccuaucuga

SEQ ID NO: 214197 - RNA, 1410 nt, Artificial Sequence; identical to SEQ ID NO: 206399
  derived and/or modified CDS sequence (opt5) from neuraminidase__InfluenzaA__AFH00640

SEQ ID NO: 214198 - RNA, 1410 nt, Artificial Sequence; identical to SEQ ID NO: 208528
  derived and/or modified CDS sequence (opt5) from neuraminidase__InfluenzaA__AFH00651

SEQ ID NO: 214199 - RNA, 1410 nt, Artificial Sequence; identical to SEQ ID NO: 206399
  derived and/or modified CDS sequence (opt5) from neuraminidase__InfluenzaA__AFH00662

SEQ ID NO: 214200 - RNA, 1410 nt, Artificial Sequence
  derived and/or modified CDS sequence (opt5) from neuraminidase__InfluenzaA__AFH00673
augaaccccaaucagaagaucauuaccaucggcagcgugucccugacaauuucuacgaucugcuucuuuaugcaaauugccauccucaucaccacagucacccugcacuucaaacaguacgaguuuagcuccccuccgaacaaucagguuaugcuuugugaacccacaauuaucgagagaaacauuaccgaaaucguguaucugacaaauaccacgauugagaaggaaaccugcccuaaacucgcugaguaccggaacuggucuaagccccagugugacaucacaggguucgccccuuuuagcaaagauaauuccauucgccugucugcgggaggcgacaucugggugaccagagagcccuaugucagcugcgauccugacaaguguuaccaauucgcucuugggcagggaacaacccugaacaaugugcauuccaacgauacgguucacgaccggacaccguaucgcacccuccugaugaaugaacugggcgugcccuuucaucucgggacaaagcaggucugcaucgccuggucuagcuccagcugucacgauggaaaagccuggcugcaugugugcguuaccggcgacgauaagaacgcuaccgccucuuucauuuacaauggcagacuuguggacuccaucgucagcuggucuaaagagauucugcggacacaggaauccgagugugugugcaucaacgggacguguaccguggucaugacagauggaagcgcuuccggcaaggccgacaccaaaauucucuuuaucgaggaagggaagaucguucacacaucuacccugagcggauccgcgcaacacguggaggaaugcagcugcuauccucgcuaccccggcgugagaugugucugccgggauaauuggaaggggucuaaccgcccuauuguggacaucaacauuaaagacuacuccaucguuagcagauauguguguucuggacuugucggcgauacgccccggaagaaugacagcuccucuagcucccauugccuggauccgaacaaugaggaaggcgggcacggagugaaaggcugggccuucgacgaugggaacgacguuuggaugggacgcacaauuagcgugaagucuagauccggcuacgagaccuuuaaagucaucgagggguggagcaauccuaacucuaagcuccagaucaaucgccaggugauugucgaucggggaaacagauccggcuauagcggcaucuucuccguggaagggaaaucuuguauuaaucggugcuuuuacguugagcugaucagaggacgcaaggaagagaccgaagugcuguggacaagcaacuccauugucguguucuguggcaccucugggacauauggaacgggcagcuggcccgacggggcugauaucaaucucaugccuauuuga

SEQ ID NO: 214201 - RNA, 1410 nt, Artificial Sequence
  derived and/or modified CDS sequence (opt5) from neuraminidase__InfluenzaA__AFH00684
augaaccccaaucagaagaucauuaccaucggcagcgugucccugacaauuucuacgaucugcuucuuuaugcaaauugccauccucaucaccacagucacccugcacuucaaacaguacgaguuuaacagcccuccgaauaaccagguuaugcuuugugaacccacaauuaucgagagaaauauuaccgaaaucguguaucugacaaacaccacgauugagaaggaaaucugcccuaaacucgcugaguaccggaauugguccaagccccagugugacauuaccggguucgccccuuuuucuaaagauaacagcauccgccuguccgcgggaggcgacaucugggugacaagagagcccuaugucucuugcgauccugacaaguguuaccaauucgcucuugggcagggaaccacacugaauaacgugcauagcaauaacaccguucgggaacgcacgccguauagaacacuccugaugaaugagcugggcgugcccuuucaccucgggaccaagcaggucugcauugccugguccucuagcuccugucaugauggaaaagccuggcugcacgugugcaucacaggcgacgauaagaacgcuaccgccagcuucauuuacaauggccggcuuguugacucuaucguguccuggagcaaagaaauucugcgcacccaggagucugagugugucugcaucaacgggacauguacgguggugaugaccgauggauccgcuagcggcaaggccgacacaaaaauccucuuuauugaagaggggaagaucguccauaccuccacacugucuggaagcgcgcaacacguugaagagugcuccugcuauccuagauaccccggcgugcggugugugugccgcgauaacuggaaggggagcaauagaccuauugucgacaucaacauuaaagaucacucuaucguguccagcuacguuuguucuggacuugugggcgacacgccccggaagaaugacagcuccucuagcucccauugccuggauccgaacaaugaagagggcgggcacggagucaaaggcugggccuucgacgaugggaacgacguguggaugggacgcaccaucagcgagaagucuagacucggcuaugaaacauuuaaaguuauugaggggugguccaauccuaagagcaaacugcagaucaaccgccaggugauugucgaucggggaaauagaucuggcuacuccggcaucuucagcguggaagggaaguccuguauuaaccggugcuuuuaugucgagcugaucagaggacgcaaggaagagaccgaggugcucuggaccucuaauagcauuguuguguucuguggcacauccgggaccuacggaacaggcucuuggcccgacggggcugauaucaaccugaugccuaucuga

SEQ ID NO: 214202 - RNA, 1410 nt, Artificial Sequence
  derived and/or modified CDS sequence (opt5) from neuraminidase__InfluenzaA__AFH00695
augaaccccaaucagaagaucauuaccaucggcagcgugucccugacaauuucuacgaucugcuucuuuaugcaaauugccauccucaucaccacagucacccugcacuucaaacaguacgaguuuaacagcccuccgaauaaccagguuaugcuuugugaacccacaauuaucgagagaaauauuaccgaaaucguguaucugacaaacaccacgauugagaaggaaaucugcccuaaacucgcugaguaccggaauugguccaagccccagugugacauuaccggguucgccccuuuuucuaaagauaacagcauccgccuguccgcgggaggcgacaucugggugacaagagagcccuaugucucuugcgauccugacaaguguuaccaauucgcucuugggcagggaaccacacugaauaacgugcauagcaaugauaccguucgggaacgcacgccguauagaacacuccugaugaacgagcugggcgugcccuuucaccucgggaccaagcaggucugcauugccugguccucuagcuccugucaugacggaaaagccuggcugcacgugugcaucacaggcgaugacaagaaugcuaccgccagcuucauuuacaacggccggcuuguugauucuaucguguccuggagcaaagaaauucugcgcacccaggagucugagugugucugcaucaaugggacauguacgguggugaugaccgacggauccgcuagcggcaaggccgauacaaaaauccucuuuauugaagaggggaagaucguccauaccuccacacugucuggaagcgcgcaacacguugaagagugcuccugcuauccuagauaccccggcgugcggugugugugccgcgacaacuggaaggggagcaacagaccuauugucgauaucaauauuaaagaccacucuaucguguccagcuacguuuguucuggacuugugggcgacacgccccggaagaacgauagcuccucuagcucccauugccuggacccgaauaacgaagagggcgggcacggagucaaaggcugggccuucgaugacgggaaugauguguggaugggacgcaccaucagcgagaagucuagacucggcuaugaaacauuuaaaguuauugaggggugguccaacccuaagagcaaacugcagaucaaucgccaggugauugucgaccggggaaacagaucuggcuacuccggcaucuucagcguggaagggaaguccuguauuaaucggugcuuuuaugucgagcugaucagaggacgcaaggaagagaccgaggugcucuggaccucuaacagcauuguuguguucuguggcacauccgggaccuacggaacaggcucuuggcccgauggggcugacaucaaucugaugccuaucuga

SEQ ID NO: 214203 - RNA, 1410 nt, Artificial Sequence
  derived and/or modified CDS sequence (opt5) from neuraminidase__InfluenzaA__AFH00706
augaaccccaaucagaagaucauuaccaucggcagcgugucccugacaauuucuacgaucugcuucuuuaugcaaauugccauccucaucaccacagucacccugcacuucaaacaguacgaguuuaacagcccuccgaauaaccagguuaugcuuugugaacccacaauuaucgagagaaauauuaccgaaaucguguaucugacaaacaccacgauugagaaggaaaucugcccuaaacucgcugaguaccggaauugguccaagccccagugugacauuaccggguucgccccuuuuucuaaagauaacagcauccgccuguccgcgggaggcgacaucugggugacaagagagcccuaugucucuugcgauccuaauaaguguuaccaauucgcucuugggcagggaaccacacugaacaaugugcauagcaacaauaccguucgggaccgcacgccguauagaacacuccugaugaacgaacugggcgugcccuuucaccucgggaccaagcaggucugcauugccugguccucuagcuccugucaugauggaaaagccuggcugcacgugugcaucacaggcgacgauaagaaugcuaccgccagcuucauuuacaacggccggcuuguugacucuguggucuccuggagcaaagagauccugcgcacccaggaaucugagugugugugcauuaacgggacauguacgguggucaugaccgauggauccgcuagcggcaaggccgacacaaaaauccucuuuaucgaggaagggaagauuguucauaccuccacacugucuggaagcgcgcaacacguggaggaaugcuccugcuauccuagauaccccggcgugcggugugucugccgcgauaauuggaaggggagcaacagaccuaucguggacauuaauaugaaagaucacucuaucguuuccagcuacguguguucuggacuugucggcgacacgccccggaagaacgacagcuccucuagcucccauugcuucgauccgaauaacgaggaaggcgggcacggagugaaaggcugggccuuugacgaugggaaugacguuuggaugggacgcaccauuagcgagaagucuagacugggcuaugagacauucaaagugaucgaagggugguccaacccuaagagcaaacuccagaucaaucggcaggucauuguggaucgcggagacagaucuggcuacuccggcaucuuuagcgucgaggggaaguccuguauuaaccggugcuucuauguggaacugaucagaggaucuaaggaggaaaccgagguucuguggaccagcaauuccauuguggucuucuguggcacaucugggaccuacggaacaggcagcuggcccgauggggcugacaucaaccucaugccuauuuga

SEQ ID NO: 214204 - RNA, 1410 nt, Artificial Sequence
  derived and/or modified CDS sequence (opt5) from neuraminidase__InfluenzaA__AFH00728
augaaccccaaucagaagaucauuaccaucggcagcgugucccugacaauugccacgaucugcuuccucaugcaaauugcuauccuggucaccacaguuacccuucacuuuaaacaguacgaguguucuagcccuccgaacaaucaggugaugcccugcgaaccuaucauuaucgagagaaacauuacagaaaucguguaucugaccaauacaaccauugagaaggaaaucugucccaaacucgucgaguaccggaacugguccaagccucagugcaaaauuacgggguucgcccccuuuucuaaggacaauagcauccgccuguccgcgggaggcgauaucugggugaccagagagccuuauguuucuugugacccggggaagugcuaccaauucgcucuuggacagggcacaacccugaacaauaaacauagcaacgauacaauucacgaccggacccccuaucgcacgcuccugaugaaugaacugggggugccuuuucaucucggaacaagacaggucuguaucgccugguccuccucuuccugccacgauggcaaggccuggcugcauguguguguuaccggccacgacaaaaacgcuacagccagcuucauuuacaaugggcggcuuguggauucuaucggauccuggagcaagaacauucugcgcacccaggagucugaaugcgucuguaucaaugggaccugcacaguggugaugacggacggcuccgcuagcgagagagccgauaccaaaauccucuuuauugaggaaggaaagaucguccacauuagcccccugucuggcagcgcgcaacauguugaggaaugcuccuguuauccucgguaccccggggugcgcugcguguguagagacaacuggaagggaagcaaccggccgaucgucgauauuaaugugaaagacuacucuaucguuuccagcuaugugugcucuggccuugucggcgauacaccucgcaagaacgacagaagcuccucuagcuacugucggaaucccaacaaugagaaagggaaccacggagugaagggcugggccuucgacgaugggaaugacguuuggaugggacgcaccaucggcgaggaacugagauccggguaugagacauuuaaagugauuggaggcuggagcaccccuaacucuaagcuccagaucaaucggcaggucauuguggauuccgacaacagaagcggcuacucugggaucuucuccgucgaaggaaaaagcugcauuaaucgcuguuuuuauguggagcugauccggggcagagaacaggagacgcgcguucuguggacauccaacucuauuguggucuucugcgggaccagcggaaccuacggcacaggguccuggcccgauggcgcugacaucaaucucaugcccaucuga

SEQ ID NO: 214205 - RNA, 1410 nt, Artificial Sequence
  derived and/or modified CDS sequence (opt5) from neuraminidase__InfluenzaA__AFH00739
augaaccccaaucagaagaucauuaccaucggcagcgugucccugacaauugccacgaucugcuuccucaugcaaauugcuauccuggucaccacaguuacccuucacuuuaaacaguacgaguguucuagcccuccgaacaaucaggugaugcccugcgaaccuacaaucauugagagaaacaucaccgaaauuguguaucugacaaauaccacgaucgagaaggaaauuugucccaaacucgucgaguaccggaacugguccaagccucagugcaaaaucaccggguucgcccccuuuucuaaggacaauagcauucgccuguccgcgggaggcgauaucugggugacaagagagccuuauguuucuugugacccggggaagugcuaccaauucgcucuuggacagggcaccacacugaacaaucggcauagcaacgauaccgugcacgaccgcacgcccuauagaacacuccugaugaaugaacugggggucccuuuucaucucggaaccaaacagguguguaucgccugguccuccucuuccugccacgauggcaaggccuggcugcauguuugugugacaggccacgacaaaaacgcuaccgccagcuucauuuacgaugggcggcuugucgacucuaucggauccuggagcaagaauauucugcgcacccaggagucugaaugcguguguaucaacggcacaugcacgguggucaugaccgauggguccgcuagcgagagagccgacacaaaaauucucuuuaucgaggaaggaaagaucguucacauuagcccccugucuggcagcgcgcaacauguggaggaaugcuccuguuauccucgguaccccggggugcgcugcgucuguagagauaauuggaagggaagcaaccggccgaucguggacauuaacguuaaagauuacucuaucguguccagcuaugucugcucuggccuugugggcgacaccccucgcaagaaugacagaagcuccucuagcuacugucggaaccccaauaacgagaaagggucccacggaguuaagggcugggccuucgaugacgggaaugauguguggaugggacgcacaauuggcgaggaacugagaagcggguaugagaccuuuaaagucaucggaggcuggucuacgccuaacuccaagcuccagaucaauagacaggugauugucgacagcggcaaccggucuggguacuccggaaucuucagcguggaaggcaaauccugcauuaaucgcuguuuuuauguugagcugauccgggggagaggacaggaaacacgcgugugguggaccucuaacagcauugucguguucugcggcaccuccgggacauacggcaccggaucuuggcccgauggcgcugacaucaaucugaugcccauuuga

SEQ ID NO: 214206 - RNA, 1410 nt, Artificial Sequence
  derived and/or modified CDS sequence (opt5) from neuraminidase__InfluenzaA__AFH00750
augaaccccaaucagaagaucauuaccaucggcagcgugucccugacaauugccacgaucugcuuccucaugcaaauugcuauccuggucaccacaguuacccuucacuuuaaacaguacgaguguucuagcccuccgaacaaucaggugaugcccugcgaaccuacaaucauugagagaaacaucaccgaaauuguguaucugacaaauaccacgaucgagaaggaaauuugucccaaacucgucgaguaccggaacugguccaagccucagugcaaaaucaccggguucgcccccuuuucuaaggacaauagcauucgccuguccgcgggaggcgauaucugggugacaagagagccuuauguuucuugugacccggggaagugcuaccaauucgcucuuggacagggcaccacacugaacaaucggcauagcaacgauaccgugcacgaccgcacgcccuauagaacacuccugaugaaugaacugggggucccuuuucaucucggaaccaaacagguguguaucgccugguccuccucuuccugccacgauggcaaggccuggcugcauguuugugugacaggccacgacaaaaacgcuaccgccagcuucauuuacgaugggcggcuugucgacucuaucggauccuggagcaagaauauucugcgcacccaggagucugaaugcguguguaucaacggcacaugcacgguggucaugaccgauggguccgcuagcgagagagccuauacaaaaauucucuuuaucaaggagggaaagaucguucacauuagcccccugucuggcagcgcgcaacauguggaagagugcuccuguuacccucgguaccccggggugcgcugcgucuguagagacaauuggaaaggaagcaaccggccgaucguggauauuaacguuaaggacuauucuaucguguccagcuacgucugcucuggccuugugggcgauaccccucgcaaaaaugacagaagcuccucuagcuauugucggaaccccaauaacgaaaaggggucccacggaguuaaaggcugggccuucgacgaugggaaugacguguggaugggacgcacaauuggcgaggaacugagaagcggguacgagaccuuuaaggucaucggaggcuggucuacgccuaacuccaaacuccagaucaauagacaggugauugucgagagcggcaaccggucuggguauuccggaaucuucagcguggaaggcaaguccugcauuaaucgcuguuuuuacguugagcugauccgggggagagaacaggagacacgcgugugguggaccucuaacagcauugucguguucugcggaaccuccggcacauaugggaccggcucuuggcccgauggagcugacaucaaucugaugcccauuuga

SEQ ID NO: 214207 - RNA, 1410 nt, Artificial Sequence
  derived and/or modified CDS sequence (opt5) from neuraminidase__InfluenzaA__AFH00761
augaaccccaaucagaagaucauuaccaucggcagcgugucccugacaauugccacgaucugcuuccucaugcaaauugcuauccuggucaccacaguuacccuucacuuuaaacaguacgaguguaacucuccuccgaauaaccaggugaugcccugcgaaccuacaaucauugagagaaauaucaccgaaauuguguaucugacaaacaccacgaucgagaaggaaauuugucccaaacucgucgaguaccggaauuggagcaagccucagugcaaaaucaccggguucgcccccuuuuccaaggacaacucuauucgccugagcgcgggaggcgauaucugggugacaagagagccuuauguuuccugugacccggggaagugcuaccaauucgcucuuggacagggcaccacacugaauaaccggcauucuaaugauaccgugcacgaccgcacgcccuauagaacacuccugaugaacgaacugggggucccuuuucaucucggaaccaaacagguguguaucgccuggagcuccagcucuugccacgauggcaaggccuggcugcauguuugugugacaggccacgacgagaaugcuaccgccuccuucauuuacgaugggcggcuugucgacagcaucggaucuugguccaaaaacauucugcgcacccaggaaagcgagugcguguguaucaauggcacaugcacgguggucaugaccgaugggucugcuuccgagagagccgacacaaagauucucuuuaucgaagagggaaaaaucguucacauuagcccccuguccggcucugcgcaacauguggaagagugcagcuguuauccucgguaccccggggugcgcugcgucuguagagauaacuggaagggauccaaccggccgaucguggacauuaauguuaaggauuacagcaucgugucuuccuaugucugcagcggccuugugggcgacaccccucgcaaaaacgacucuagcuccucuagcuacuguagaaaucccaacaaugaaaaggggucccacggaguuaaaggcugggccuucgaugacggggaugacguguggaugggacggacaauuggcgaggagcugcgcagcggguaugaaaccuuuaaggucaucggaggcuggucuacgccuaacuccaaacuccagaucaauagacaggugauugucgaucggggcaacagaagcggguacucuggaaucuucuccguggagggcaagagcugcauuaaucgcuguuuuuauguugaacugauccgggggagaaaacaggagacaaaggugugguggaccuccaacucuauugucguguucugcggaaccagcggcacauacgggaccggcuccuggcccgacggagcugauaucaaucugaugcccauuuga

SEQ ID NO: 214208 - RNA, 1410 nt, Artificial Sequence
  derived and/or modified CDS sequence (opt5) from neuraminidase__InfluenzaA__AFH00783
augaaccccaaucagaagaucauuaccaucggcagcgugucccugacaauugccacgaucugcuuccucaugcaaauugcuauccuggucaccacaguuacccuucacuuuaaacaguacgaguguaacucuccuccgaauaaccaggugaugcugugcgaacccacaaucauugagagaaauaucaccgaaauuguguaucucacaaacaccacgaucgagaaggaaauuuguccuaaacuggccgaguaccggaauuggagcaagccccagugcaaaaucaccggguucgcgccuuuuuccaaggacaacucuauucgccuuagcgcuggaggcgauaucugggucacaagagagcccuauguguccugugacccugauaagugcuaccaauucgcccuggggcggggaaccacacucaauaaccgccauucuaaugacaccguucacgauagaacgccguaucggacacugcugaugaacgaacucggcgugcccuuucaucuggggaccaaacaggucuguaucgccuggagcuccagcucuugccacgacggaaaggcuuggcuucauguguguguuacaggccacgaugagaaugccaccgcuuccuucauuuacgacggccgccugguggauagcaucgggucuugguccaaaaagauucucagaacccaggaaagcgagugcgucuguaucaacggaacaugcacgguggugaugaccgacggcucugccuccgggcgggcggauacaaaaauucuguuuaucgaggaaggaaagaucguccacauuagcccucuuuccggcucugcccagcauguugaggaaugcagcuguuauccccgcuacuccggggugagaugcgugugucgggacaauuggaagggaagcaaccgcccuaucgucgauauuaacgugaaagacuacucuaucguuuccagcuaugugugcucuggccuggucggcgacacccccagaaagaaugauagcuccucuagcucccacugucucaacccgaauaacgaggaagggggacauggcgugaaagggugggcuuucgacgauggaaaugacguuuggaugggccggacaauuagcgagaaguuucgcucuggguacgagaccuucaaagugaucggaggcugguccaagccuaacagcaaacugcaaaucaauagacaggucauuguggaucggggcaacagaucuggguauuccggaaucuuuagcgucgaaggcaaguccugcauuaaucgcuguuucuacguggagcugauccgggggagaaagcaggaaacggagguuugguggacaucuaacagcauuguggucuuuugcggaaccuccggcaccuaugggacaggcucuuggcccgacggagccgauaucaaucucaugccuauuuga

SEQ ID NO: 214209 - RNA, 1410 nt, Artificial Sequence
  derived and/or modified CDS sequence (opt5) from neuraminidase__InfluenzaA__AFH00794
augaaccccaaucagaagaucauuaccaucggcagcgugucccugacaauugccacgaucugcuuccucaugcaaauugcuauccuggucaccacaguuacccuucacuuuaaacaguacgaguguaacucuccuccgaauaaccaggugaugcugugcgaacccacaaucauugagagaaauaucaccgaaauuguguaucucacaaacaccacgaucgagaaggaaauuuguccuaaacuggccgaguaccggaauuggagcaagccccagugcaaaaucaccggguucgcgccuuuuuccaaggacaacucuauucgccuugcugccggaggcgauaucugggucacaagagagcccuaugugagcugugacccugauaagugcuaccaauucgcccuggggcagggaaccacacucaauaaccggcauuccaaugacaccguucacgaucgcacgccguauagaacacugcugaugaacgaacucggcgugcccuuucaucuggggaccaaacaggucuguaucgcuuggucuagcuccagcugccacgacggaaaggccuggcuucauguguguguuacaggccacgaugagaaugcuaccgccucuuucauuuacgacggccggcugguggauuccaucgggagcuggucuaaaaagauucuccgcacccaggaauccgagugcgucuguaucaacggaacaugcacgguggugaugaccgacggcagcgcgucugagagagccgauacaaaaauucuguuuaucgaagaggggaagaucguccacauuucccaacuuagcggauccgcucagcauguugaagagugcucuuguuauccucgguaccccggcgugcgcugcguguguagagacaauuggaaggggagcaaccggccuaucgucgauauuaacgugaaagacuacuccaucguuagcucuuaugugugcuccggacuggucggcgacacaccccgcaagaaugauagcucuagcuccucucacugucucaacccgaauaacgaagagggcgggcauggagugaaaggcugggccuucgacgauggggacgauguuuggaugggaagaaccauuagcgagaagcugcgguccggcuacgaaaccuuuaaagugaucgagggguggagcaagccuaauucuaaacugcagacgaaccgccaggucaucguggacagaggaaaucgguccggcuauagcggcauuuucucugucgaagggaaguccugcaucaacagauguuuuuacguggagcucauucgcggacggaagcaagaaacagagguuugguggaccagcaauuccaucguggucuucugcggcaccucugggacauauggaaccggcagcuggcccgauggggcugacauuaaccugaugccuaucuga

SEQ ID NO: 214210 - RNA, 1410 nt, Artificial Sequence; identical to SEQ ID NO: 207560
  derived and/or modified CDS sequence (opt5) from neuraminidase__InfluenzaA__AFH00805

SEQ ID NO: 214211 - RNA, 1410 nt, Artificial Sequence; identical to SEQ ID NO: 211590
  derived and/or modified CDS sequence (opt5) from neuraminidase__InfluenzaA__AFH00816

SEQ ID NO: 214212 - RNA, 1410 nt, Artificial Sequence
  derived and/or modified CDS sequence (opt5) from neuraminidase__InfluenzaA__AFH00827
augaaccccaaucagaagaucauuaccaucggcagcgugucccugacaauuucuacgaccugcuucuuuaugcaaaucgccauucucaucacaaccgucacacugcacuucaaacaguacgaguuuaacagcccuccgaauaaccagguuaugcuuugugaacccaccaucauugagagaaauaugacagaaaucguguaucugaccaacacgaccauugagaaggaaaucugcccuaaacccgcugaguaccggaauugguccaagccucagugugacauuacaggguucgcccccuuuucuaaagauaacagcauccgccucuccgcgggaggcgacauuugggugaccagagagccuuaugucucuugcgauccggacaaguguuaccaauucgcucuggggcagggaacaacccuuaauaacgugcauagcaauaacacgguucgggaucgcacacccuauagaacccugcucaugaaugaacugggcgugccuuuucaccuggggacaaagcaggucugcaucgccugguccucuagcuccugucaugacggaaaagccuggcuccacgugugcaucaccggcgaugacaagaacgcuaccgccagcuucauuuacaauggccggcugguugauucuguggucuccuggagcaaagagauccuucgcacacaggaaucugagugugugugcauuaacgggacguguaccguggucaugacagacggauccgcuagcggcaaggccgauaccaaaauccuguuuauugaggaagggaagaucguucauacauccacccucucuggaagcgcgcaacacguggaggaaugcuccugcuaucccagauacccuggcgugcggugugucugccgcgacaacuggaaggggagcaauagacccaucguggauauuaacaucaaagaccacucuauuguuuccagcuacguguguucuggacuggucggcgacacgccgcggaagaaugauagcuccucuagcucccauugccuugacccuaacaaugaggaaggcgggcacggagugaaaggcugggccuucgaugacgggaacgauguuuggaugggacgcacaaucaaugagaccagcagacugggcuaugagaccuuuaaggugauugaaggguggucuaaccccaaauccaagcuccagaucaaucggcaggucaucguggaccgcggagauagaagcggcuacucuggcauuuucuccgucgaggggaaaagcuguaucaaccggugcuuuuauguggaacugauuagaggacgcaaggaggaaacagagguucuguggaccuccaauucuaucguggucuucuguggcacaagcgggacguacggaaccggcuccuggccugacggggcugaucucaaccugaugccccuuuga

SEQ ID NO: 214213 - RNA, 1410 nt, Artificial Sequence; identical to SEQ ID NO: 208001
  derived and/or modified CDS sequence (opt5) from neuraminidase__InfluenzaA__AFH01410

SEQ ID NO: 214214 - RNA, 1410 nt, Artificial Sequence
  derived and/or modified CDS sequence (opt5) from neuraminidase__InfluenzaA__AFH34942
augaaccccaaucagaagaucauuaccaucggcagcgugucccugacaauuucuacgaucugcuucuuuaugcaaauugccauccucaucaccacagucacccugcacuucaaacaguacgaguuuaacagcccuccgaauaaccagguuaugcuuugugaacccaagauuaucgagagaaauauuacagaaaucguguaucugaccaacacaaccauugagaaagaaaucugcccuaagcccgcugaguaccggaauugguccaaaccucagugugacauuacgggguucgcccccuuuucuaaggauaacagcauccgccucuccgcgggaggcgacaucugggugaccagagagccuuaugucucuugcgauccggacaaguguuaccaauucgcucuggggcagggaacaacccuuaauaacgugcauagcaauaacacaguucggaaucgcacccccuauagaacgcugcucaugaacgaacugggcgugccuuuucaccuggggacaaaacaggucugcauugccugguccagcagcuccugucaugauggaaaggccuggcuccacgugugcaucaccggcgacgauaaaaaugcuacagccagcuucauuuacaacggcaagcugguugacucuguggucuccuggagcaaagagauccuucggacccaggaaucugagugugugugcauuaacgggaccuguacaguggucaugacggauggauccgcuagcggcaaggccgacaccaagauccuguuuaucgaggaagggaaaauuguucauacauccacccucucuggaagcgcgcaacacguggaggaaugcuccugcuauccccgcuacccuggcgugagaugugucugccgggauaauuggaaggggagcaaccgccccaucguggacauuaauaucaaagaucacucuauuguuuccagcuacguguguucuggacuggucggcgacacaccgagaaagaacgacagcuccucuagcucccauugccuugauccuaauaacgaggaaggcgggcacggagugaaaggcugggccuucgacgaugggaaugacguuuggaugggacggaccaucaacgagacgagccgccugggcuaugagacauuuaaggugaucgaaggguggucuaaucccaaauccaagcuccagauuaacagacaggucaucguggaucggggagaccgcagcggcuacucuggcauuuucuccgucgaggggaagucuuguaucaauagaugcuuuuauguggaacugauucggggaagaaaagaggaaaccgagguucuguggaccuccaacucuaucguggucuucuguggcacaagcgggaccuacggaacaggcuccuggccugauggggcugaccucaaucugaugcccauuuga

SEQ ID NO: 214215 - RNA, 1410 nt, Artificial Sequence
  derived and/or modified CDS sequence (opt5) from neuraminidase__InfluenzaA__AFH34956
augaaccccaaucagaagaucauuaccaucggcagcgugucccugacaauuucuacgaucugcuucuuuaugcaaauugccauccucaucaccacagucacccugcacuucaaacaguacgaguuuaacagcccuccgaauaaccagguuaugcuuugugaacccacaauuaucgagagaaauauuaccgaaaucguguaucugacaaacaccacgauugagaaggaaaucugcccuaaacccgcugaguaccggaauugguccaagccucagugugacauuaccggguucgcccccuuuucuaaagauaacagcauccgccucuccgcgggaggcgacaucugggugacaagagagccuuaugucucuugcgauccggacaaguguuaccaauucgcucuggggcagggaaccacacuuaauaacgugcauagcaauaacaccguucggggccgcacgcccuauagaacacugcucaugaaugaacugggggugccuuuucaccugggaaccaagcaggucugcauugccugguccucuagcuccugucaugauggcaaagccuggcuccacgugugcaucacaggcgacgauaagaacgcuaccgccagcuucauuuacaaugggcggcugguugacucuguggucuccuggagcaaagagauccuucgcacccaggaaucugagugugugugcauuaacggaacauguacgguggucaugaccgauggcuccgcuagcgggaaggccgacacaaaaauccuguuuaucgaggaaggaaagauuguucauaccuccacacucucuggcagcgcgcaacacguggaggaaugcuccugcuaucccagauacccuggggugcggugugucugccgcgauaacuggaagggaagcaauagacccaucguggacauuaacaucaaagaucacucuauuguuuccagcuacguguguucuggccuggucggcgacaccccgcggaagaaugacagcuccucuagcucccauugccuugauccuaacaaugaggaagggggacacggcgugaaagggugggccuucgacgauggaaacgacguuuggaugggccgcacgaucaaugagacaagcagacugggguaugagaccuuuaaggugaucgaaggauggucuaaccccaaauccaagcuccagauuaaucggcaggucaucguggaucgcggcgacagaagcggcuacucugggauuuucuccgucgagggaaaaagcuguaucaaccggugcuuuuauguggaacugauuagaggccgcaaggaggaaaaugagguucuguggaccuccaacucuaucguggucuucugugggacaagcggaaccuacggcacaggguccuggccugauggcgcugaccucaaucugaugcccauuuga

SEQ ID NO: 214216 - RNA, 1410 nt, Artificial Sequence
  derived and/or modified CDS sequence (opt5) from neuraminidase__InfluenzaA__AFH34963
augaaccccaaucagaagaucauuaccaucggcagcgugucccugacaauuucuacgaucugcuucuuuaugcaaauugccauccucaucaccacagucacccugcacuucaaacaguacgaguuuaacagcccuccgaauaaccagguuaugcuuugugaacccacaauuaucgagagaaauauuaccgaaaucguguaucugacaaacaccacgauugagaaggaaaucugcccuaaacccgcugaguaccggaauugguccaagccucagugugacauuaccggguucgcccccuuuucuaaagauaacagcauccgccucuccgcgggaggcgacaucugggugacaagagagccuuaugucucuugcgauccggacaaguguuaccaauucgcucuggggcagggaaccacacuuaauaacgugcauagcaauaacauuguucgggaucgcacccccuauagaacgcugcucaugaaugaacugggcgugccuuuucaccuggggacaaagcaggucugcaucgccugguccucuagcuccugucaugacggaaaagccuggcuccacgugugcauuaccggcgaugacaagaacgcuacagccagcuucaucuacaauggccggcugguugauucuguggucuccuggagcaaagagauucuucgcacccaggaaucugagugugugugcaucaacgggaccuguacaguggucaugacggacggauccgcuagcggcaaggccgauaccaaaauccuguuuauugaggaagggaagaucguucauacauccacccucucuggaagcgcgcaacacguggaggaaugcuccugcuaucccagauacccuggcgugcggugugucugccgcgacaacuggaaggggagcaauagacccauuguggauaucaacauuaaagaccacucuaucguuuccagcuacguguguucuggacuggucggcgacacaccgcggaagaaugauagcuccucuagcucccauugccuugacccuaacaaugaggaaggcgggcacggagugaaaggcugggccuucgaugacgggaacgauguuuggaugggacgcaccaucaaugagacgagcagacugggcuaugagacauuuaaggugauugaaggguggucuaaccccaaauccaagcuccagaucaaucggcaggucauuguggaccgcggagauagaagcggcuacucuggcaucuucuccgucgaggggaaaagcuguauuaaccggugcuuuuauguggaacugaucagaggacgcaaggaggaaaaugagguucuguggaccuccaacucuauuguggucuucuguggcaccagcgggacauacggaaccggcuccuggccugacggggcugaucucaaucugaugcccaucuga

SEQ ID NO: 214217 - RNA, 1410 nt, Artificial Sequence
  derived and/or modified CDS sequence (opt5) from neuraminidase__InfluenzaA__AFH34970
augaaccccaaucagaagaucauuaccaucggcagcgugucccugacaauuucuacgaucugcuucuuuaugcaaauugccauccucaucaccacagucacccugcacuucaaacaguacgaguuuaacagcccuccgaauaaccagguuaugcuuuaugaacccacaauuaucgagagaaauauuaccgaaaucguguaccugacaaacaccacgauugagaaggaaaucuguccuaaacccgcugaguaucggaauugguccaagccucagugcgacauuaccggguucgcccccuuuucuaaagauaacagcauccgccucuccgcgggaggcgacaucugggugacaagagagccuuacgucucuugugauccggacaagugcuaucaauucgcucuggggcagggaaccacacuuaauaacgugcauagcaauaacaccguucgggaucgcacgcccuacagaacacugcucaugaaugaacugggcgugccuuuucaccuggggaccaagcaggucuguauugccugguccucuagcuccugccaugacggaaaagccuggcuccacguguguaucacaggcgaugacaagaacgcuaccgccagcuucauuuauaauggccggcugguugauucuguggucuccuggagcaaagagauccuucgcacccaggaaucugagugcguguguauuaacgggacaugcacgguggucaugaccgacggauccgcuagcggcaaggccgauacaaaaauccuguuuaucgaggaagggaagauuguucauaccuccacacucucuggaagcgcgcaacacguggaggaauguuccugcuaccccagauacccuggcgugcggugcgucugucgcgacaacuggaaggggagcaauagacccaucguggauauuaacaucaaagaccacucuauuguuuccagcuaugugugcucuggacuggucggcgacaccccgcggaagaaugauagcuccucuagcucccauugucuugacccuaacaaugaggaaggcgggcacggagugaaaggcugggccuucgaugacgggaacgauguuuggaugggacgcacgaucaaugagacaagcagacugggcuacgagaccuuuaaggugaucgaaggguggucuaaccccaaauccaagcuccagauuaaucggcaggucaucguggaccgcggagauagaagcggcuauucuggcauuuucuccgucgaggggaaaagcugcaucaaccgguguuuuuacguggaacugauuagaggacgcaaggaggaaaaugagguucuguggaccuccaacucuaucguggucuucugcggcacaagcgggaccuauggaacaggcuccuggccugacggggcugaucucaaucugaugcccauuuga

SEQ ID NO: 214218 - RNA, 1410 nt, Artificial Sequence
  derived and/or modified CDS sequence (opt5) from neuraminidase__InfluenzaA__AFH34977
augaaccccaaucagaagaucauuaccaucggcagcgugucccugacaauuucuacgaucugcuucuuuaugcaaauugccauccucaucaccacagucacccugcacuucaaacaguacgaguuuaacagcccuccgaauaaccagguuaugcuuugugaacccacaauuaucgagagaaauauuaccgaaaucguguaucugacaaacaccacgauugagaaggaaaucugcccuaaacccgcugaguaccggaauugguccaagccucagugugggauuaccggauucgcccccuuuucuaaagacaacagcauccgccucuccgcgggcggggauaucugggugacaagagagccuuaugucucuugcgacccggauaaguguuaccaauucgcucugggacagggcaccacacuuaauaacgugcauagcaauaacaccguucgggaccgcacgcccuauagaacacugcucaugaaugaacugggggugccuuuucaccugggaaccaagcaggucugcauugccugguccucuagcuccugucaugauggcaaagccuggcuccacgugugcaucacaggcgacgauaagaacgcuaccgccagcuucauuuacaaugggcggcugguugacucuguggucuccuggagcaaagagauccuucgcacccaggaaucugagugugugugcauuaacggaacauguacgguggucaugaccgauggcuccgcuagcgggaaggccgacacaaaaauccuguuuaucgaggaaggaaagauuguucauaccuccacacucucuggcagcgcgcaacacguggaggaaugcuccugcuaucccagauacccuggggugcggugugucugccgcgauaacuggaagggaagcaauagacccaucguggacauuaacaucaaagaucacucuauuguuuccagcuacguguguucuggccuggucggcgacaccccgcggaagaaugacagcuccucuagcucccauugccuugauccuaacaaugaggaagggggacacggcgugaaagggugggccuucgacgauggaaacgacguuuggaugggccgcacgaucaaugagacaagcagacugggguaugagaccuuuaaggugaucgaaggauggucuaaccccaaauccaagcuccagauuaaucggcaggucaucguggaucgcggcgacagaagcggcuacucugggauuuucuccgucgagggaaaaagcuguaucaaccggugcuuuuauguggaacugauuagaggccgcaaggaggaaaccgagguucuguggacauccaauucuaucguggucuucugugggaccagcggaacauacggcacgggguccuggccugauggcgcugaccucaaccugaugcccauuuga

SEQ ID NO: 214219 - RNA, 1410 nt, Artificial Sequence
  derived and/or modified CDS sequence (opt5) from neuraminidase__InfluenzaA__AFH74468
augaaccccaaucagaagaucauuaccaucggcagcgugucccugacaauuucuacgaucugcuucuuuaugcaaaccgccauucucaucacaaccgucacacugcacuucaaacagugugaguuuaacagcccuccgaauaaccagguuaugcuuugcgaacccaccaucauugagagaaauaucacagaaauuguguaccugaccaacacgaccaucgagaaggaaauuuguccuaaacucgcugaguaucggaauugguccaagccccagugcgacaucacaggguucgccccuuuuucuaaagauaacagcauucgccuguccgcgggaggcgacaucugggugaccagagagcccuacgucucuugugauccugacaagugcuaucaauucgcucuugggcagggaacaacccugaauaacgugcauagcaauaacacgguucgggaucgcacaccguacagaacccuccugaugaaugaacugggcgugcccuuucaccucgggacaaagcaggucuguaucgccugguccucuagcuccugccaugacggaaaagccuggcugcacguguguauuaccggcgaugacaagaacgcuaccgccagcuucaucuauaauggccggcuuguugauucuguggucuccuggagcaaagagauucugcgcacacaggaaucugagugcguguguaucaacgggacgugcaccguggucaugacagacggauccgcuagcggcaaggccgauaccaaaauucucuuuaucgaggaagggagaaucguucauacauccacccugucuggaagcgcgcaacacguggaggaaugcuccuguuacccucgguaucccggcgugcgcugcgucuguagagacaacuggaaggggagcaaucggccuauuguggauaucaacauuaaggaccacucuaucguuuccagcuacgugugcucuggacuugucggcgacacgccccgcaaaaaugauagcuccucuagcucccauugucuggacccgaacaaugaggaaggcgauaacggggugaagggaugggccuucgacgauggcaaugacguuuggauggggagaacaauuagcgagaaaucucggcucggauacgagaccuuuaaggugaucgaaggcugguccaacccuaaaagcaagcugcagaucaaucgccaggucauuguggauagagggaaccggucuggauauuccggcaucuucagcgucgagggcaaauccugcauuaauagauguuuuuacguggaacugauccgcgggcggaaggaggaaaccgagguucucuggacaucuaacagcauuguggucuucugcggaaccuccggcacauaugggacgggaucuuggcccgacggcgcugauaucaaucugaugccuauuuga

SEQ ID NO: 214220 - RNA, 1410 nt, Artificial Sequence; identical to SEQ ID NO: 210723
  derived and/or modified CDS sequence (opt5) from neuraminidase__InfluenzaA__AFH74469

SEQ ID NO: 214221 - RNA, 1410 nt, Artificial Sequence; identical to SEQ ID NO: 208671
  derived and/or modified CDS sequence (opt5) from neuraminidase__InfluenzaA__AFH74480

SEQ ID NO: 214222 - RNA, 1410 nt, Artificial Sequence; identical to SEQ ID NO: 208671
  derived and/or modified CDS sequence (opt5) from neuraminidase__InfluenzaA__AFH74491

SEQ ID NO: 214223 - RNA, 1410 nt, Artificial Sequence; identical to SEQ ID NO: 213714
  derived and/or modified CDS sequence (opt5) from neuraminidase__InfluenzaA__AFH74502

SEQ ID NO: 214224 - RNA, 1410 nt, Artificial Sequence
  derived and/or modified CDS sequence (opt5) from neuraminidase__InfluenzaA__AFH74513
augaaccccaaucagaagaucauuaccaucggcagcgugucccugacaauuucuacgaucugcuucuuuaugcaaauugccauccucaucaccacagucacccugcacuucaaacaguacgaguuuaacagcccuccgaauaaccagguuaugcuuugugaacccacaauuaucgagagaaauauuaccgaaaucguguaucugacaaacaccacgauugagaaggaaaccugcccuaaacucgcugaguaccggaauugguccaagccccagugugacaucacaggguucgccccuuuuucuaaagauaacagcauucgccuguccgcgggaggcgacaucugggugaccagagagcccuaugucucuugcgauccugacaaguguuaccaauucgcucuugggcagggaacaacccugaauaacgugcauagcaauaacacgguucgggaucgcacaccguauagaacccuccugaugaaugaacugggcgugcccuuucaccucgggacaaagcaggucugcaucgccugguccucuagcuccugucaugacggaaaagccuggcugcacgugugcauuaccggcgaugacaagaacgcuaccgccagcuucaucuacaauggccggcuuguugauucuguggucuccuggagcaaagagauucugcgcacacaggaaucugagugugugugcaucaacgggacguguaccguggucaugacagacggauccgcuagcggcaaggccgauaccaaaauucucuuuaucgaggaagggaagaucguucauacauccacccugucuggaagcgcgcaacacguggaggaaugcuccugcuauccuagauaccccggcgugcggugugucugccgcgacaacuggaaggggagcaauagaccuauuguggauaucaacauuaaagaccacucuaucguuuccagcuacguguguucuggacuugucggcgacacgccccggaagaaugauagcuccucuagcucccauugccuggacccgaacaaugaggaaggcgggcacggagugaaaggcugggccuucgaugacgggaacgauguuuggaugggacgcacaauuagcgagaagucuagacucggcuaugagaccuuuaaagugaucgaagggugguccaauccuaagagcaaacugcagaucaaccggcaggucauuguggaccgcggaaauagaucuggcuacuccggcaucuucagcgucgaggggaaguccuguauuaaccggugcuuuuauguggaacugaucagaggacgcaaggaggaaaccgagguucucuggacaucuaauagcauuguggucuucuguggcaccuccgggacauacggaacgggcucuuggcccgauggggcugacaucaaccugaugccuguguga

SEQ ID NO: 214225 - RNA, 1410 nt, Artificial Sequence
  derived and/or modified CDS sequence (opt5) from neuraminidase__InfluenzaA__AFH74524
augaaccccaaucagaagaucauuaccaucggcagcgugucccugacaauuucuacgaucugcuucuuuaugcaaauugccauccucaucaccacagucacccugcacuucaaacaguacgaguuuaacagcccuccgaauaaccagguuaugcuuugugaacccacaauuaucgagagaaauauuaccgaaaucguguaucugacaaacaccacgauugagaaggaaaucugcccuaaacucgcugaguaccggaauugguccaagccccagugugacauuaccggguucgccccuuuuucuaaagauaacagcauccgccuguccgcgggaggcgacaucugggugacaagagagcccuaugucucuugcgauccugacaaguguuaccaauucgcucuugggcagggaaccacaauuaauaacgugcauagcaauaacaccguucgggaucgcacgccguauagaacacugcucaugaaugaacugggcgugcccuuucaccuggggaccaagcaggucugcaucgccugguccucuagcuccugucaugacggaaaagccuggcuccacgugugcauuacaggcgaugacaagaacgcuaccgccagcuucaucuacaauggccggcugguugauucuguggucuccuggagcaaagagauucuucgcacccaggaaucugagugugugugcaucaacgggacauguacgguggucaugaccgacggauccgcuagcggcaaggccgauacaaaaauccuguuuauugaggaagggaagaucguucauaccuccacacucucuggaagcgcgcaacacguggaggaaugcuccugcuauccuagauaccccggcgugcggugugucugccgcgacaacuggaaggggagcaauagaccuauuguggauaucaacaugaaagaccacucuauuguuuccagcuacguguguucuggacuggucggcgacacgccccggaagaaugauagcuccucuagcucccauugccuugacccgaacaaugaggaaggcgggcacggagugaaaggcugggccuucgaugacgggaacgauguuuggaugggacgcaccaucagcgagaagucuagacugggcuaugagacauuuaaagugaucgaagggugguccaauccuaagagcaaacuccagauuaaccggcaggucaucguggaccgcggaaauagaucuggcuacuccggcauuuucagcgucgaggggaaguccuguaucaaccggugcuuuuauguggaacugauuagaggacgcaaggaggaaaccgagguucuguggaccucuaauagcguggucguguucuguggcacauccgggaccuacggaacaggcucuuggcccgauggggcugacaucaaccucaugccuauuuga

SEQ ID NO: 214226 - RNA, 1410 nt, Artificial Sequence; identical to SEQ ID NO: 208671
  derived and/or modified CDS sequence (opt5) from neuraminidase__InfluenzaA__AFH74535

SEQ ID NO: 214227 - RNA, 1410 nt, Artificial Sequence; identical to SEQ ID NO: 213707
  derived and/or modified CDS sequence (opt5) from neuraminidase__InfluenzaA__AFH74546

SEQ ID NO: 214228 - RNA, 1410 nt, Artificial Sequence; identical to SEQ ID NO: 213707
  derived and/or modified CDS sequence (opt5) from neuraminidase__InfluenzaA__AFH74557

SEQ ID NO: 214229 - RNA, 1410 nt, Artificial Sequence; identical to SEQ ID NO: 213707
  derived and/or modified CDS sequence (opt5) from neuraminidase__InfluenzaA__AFH74568

SEQ ID NO: 214230 - RNA, 1410 nt, Artificial Sequence; identical to SEQ ID NO: 213710
  derived and/or modified CDS sequence (opt5) from neuraminidase__InfluenzaA__AFH74579

SEQ ID NO: 214231 - RNA, 1410 nt, Artificial Sequence
  derived and/or modified CDS sequence (opt5) from neuraminidase__InfluenzaA__AFH74590
augaaccccaaucagaagaucauuaccaucggcagcgugucccugacaauuucuacgaucugcuucuuuaugcaaauugccauccucaucaccacagucacccugcacuucaaacaguacgaguuuaacagcccuccgaauaaccagguuaugcuuugugaacccacaauuaucgagagaaauauuaccgaaaucguguaucugacaaacaccacgauugagaaggaaaucugcccuaaacucgcugaguaccggaauugguccaagccccagugugacauuaccggguucgccccuuuuucuaaagauaacagcauccgccuguccgcgggaggcgacaucugggugacaagagagcccuaugucucuugcgauccugacaaguguuaccaauucgcucuugggcagggaaccacacugaauaacgugcauagcaauaacaccguucgggaucgcacgccguauagaacacuccugaugaaugaacugggcgugcccuuucaccucgggaccaagcaggucugcauugccugguccucuagcuccugucaugacggaaaagccuggcugcacgugugcaucacaggcgaugacaagaacgcuaccgccagcuucauuuacaauggccggcuuguugauucuguggucuccuggagcaaagagauccugcgcacccaggaaucugagugugugugcauuaacgggacauguacgguggucaugaccgacggauccgcuagcggcaaggccgauacaaaaauccucuuuaucgaggaagggaagauuguucauaccuccacacugucuggaagcgcgcaacacguggaggaaugcuccugcuauccuagauaccccggcgugcggugugucugccgcgacaacuggaaggggagcaauagaccuaucguggauauuaacaucaaagaccacucuauuguuuccagcuacguguguucuggacuugucggcgacacgccccggaagaaugauagcuccucuagcucccauugccuggacccgaacaaugaggaaggcgggcacggagugaaaggcugggccuucgaugacgggaacgauguuuggaugggacgcaccaucagcgagaagucuagacucggcuaugagacauuuaaagugaucgaagggugguccaauccuaagagcaaacugcagauuaaccggcaggucaucguggaccgcggaaauagaucuggcuacuccggcauuuucagcgucgaggggaaguccuguaucaaccggugcuuuuauguggaacugauuagaggacgcaaggaggaaaccgagguucucuggaccucuaauagcaucguggucuucuguggcacauccgggaccuacggaacaggcucuuggcccgauggggcugacauuaaccugaugagcguguga

SEQ ID NO: 214232 - RNA, 1410 nt, Artificial Sequence; identical to SEQ ID NO: 213707
  derived and/or modified CDS sequence (opt5) from neuraminidase__InfluenzaA__AFH74601

SEQ ID NO: 214233 - RNA, 1410 nt, Artificial Sequence
  derived and/or modified CDS sequence (opt5) from neuraminidase__InfluenzaA__AFH74612
augaaccccaaucagaagaucauuaccaucggcagcgugucccugacaauuucuacgaucugcuucuuuaugcaaaccgccauucucaucacaaccgucacacugcacuucaaacagugugaguuuaacagcccuccgaauaaccagguuaugcuuugcgaacccaccaucauugagagaaauaucacagaaauuguguaccugaccaacacgaccaucgagaaggaaauuuguccuaaacucgcugaguaucggaauugguccaagccccagugcgacaucacaggguucgccccuuuuucuaaagauaacagcauucgccuguccgcgggaggcgacaucugggugaccagagagcccuacgucucuugugauccugacaagugcuaucaauucgcucuugggcagggaacaacccugagcaaugugcauuccaacaauacgguucgggaucgcacaccguacagaacccuccugaugaacgaacugggcgugcccuuucaccucgggacaaagcaggucuguaucgccuggucuagcuccagcugccaugacggaaaagccuggcugcacguguguauuaccggcgaugacaagaaugcuaccgccucuuucaucuauaacggccggcuuguugauuccguggucagcuggucuaaagagauucugcgcacacaggaauccgagugcguguguaucaaugggacgugcaccguggucaugacagacggaagcgcuuccggcaaggccgauaccaaaauucucuuuaucgaggaagggaagaucguucauacaucuacccugagcggauccgcgcaacacguggaggaaugcagcuguuacccuagauaucccggcgugcggugcgucugucgcgacaacuggaaggggucuaacagaccuauuguggauaucaauauuaaagaccacuccaucguuagcucuuacgugugcagcggacuugucggcgacacgccccggaagaacgauuccucuagcuccagccauugucuggacccgaauaacgaggaaggcgggcacggagugaaaggcugggccuucgaugacgggaaugauguuuggaugggacgcacaauuucugagaaguccagacucggcuacgagaccuuuaaagugaucgaaggguggagcaacccuaagucuaaacugcagaucaaucggcaggucauuguggaccgcggaaacagauccggcuauagcggcaucuucuccgucgaggggaagucuugcauuaaucgguguuuuuacguggaacugaucagaggacgcaaggaggaaaccgagguucucuggacaagcaacuccauuguggucuucugcggcaccucugggacauauggaacgggcagcuggcccgauggggcugacaucaaucugaugccuauuuga

SEQ ID NO: 214234 - RNA, 1410 nt, Artificial Sequence; identical to SEQ ID NO: 213707
  derived and/or modified CDS sequence (opt5) from neuraminidase__InfluenzaA__AFH74623

SEQ ID NO: 214235 - RNA, 1410 nt, Artificial Sequence; identical to SEQ ID NO: 213707
  derived and/or modified CDS sequence (opt5) from neuraminidase__InfluenzaA__AFH74634

SEQ ID NO: 214236 - RNA, 1410 nt, Artificial Sequence; identical to SEQ ID NO: 213714
  derived and/or modified CDS sequence (opt5) from neuraminidase__InfluenzaA__AFH74645

SEQ ID NO: 214237 - RNA, 1410 nt, Artificial Sequence; identical to SEQ ID NO: 213714
  derived and/or modified CDS sequence (opt5) from neuraminidase__InfluenzaA__AFH74656

SEQ ID NO: 214238 - RNA, 1410 nt, Artificial Sequence; identical to SEQ ID NO: 213714
  derived and/or modified CDS sequence (opt5) from neuraminidase__InfluenzaA__AFH74667

SEQ ID NO: 214239 - RNA, 1410 nt, Artificial Sequence; identical to SEQ ID NO: 213714
  derived and/or modified CDS sequence (opt5) from neuraminidase__InfluenzaA__AFH74678

SEQ ID NO: 214240 - RNA, 1410 nt, Artificial Sequence; identical to SEQ ID NO: 208671
  derived and/or modified CDS sequence (opt5) from neuraminidase__InfluenzaA__AFH74689

SEQ ID NO: 214241 - RNA, 1410 nt, Artificial Sequence; identical to SEQ ID NO: 208671
  derived and/or modified CDS sequence (opt5) from neuraminidase__InfluenzaA__AFH74700

SEQ ID NO: 214242 - RNA, 1410 nt, Artificial Sequence
  derived and/or modified CDS sequence (opt5) from neuraminidase__InfluenzaA__AFH74711
augaaccccaaucagaagaucauuaccaucggcagcgugucccugacaauuucuacgaucugcuucuuuaugcaaauugccauccucaucaccacagucacccugcacuucaaacaguacgaguuuaacagcccuccgaauaaccagguuaugcuuugugaacccacaauuaucgagagaaauauuaccgaaaucguguaucugacaaacaccacgauugagaaggaaaucugcccuaaacucgcugaguaccggaauugguccaagccccagugugacauuaccggguucgccccuuuuucuaaagauaacagcauccgccuguccgcgggaggcgacaucugggugacaagagagcccuaugucucuugcgauccugacaaguguuaccaauucgcucuugggcagggaaccacacugaauaacgugcauagcaauaacaccguucgggaucgcacgccguauagaacacuccugaugaaugaacugggcgugcccuuucaccucgggaccaagcaggucugcauugccugguccucuagcuccugucaugacggaaaagccuggcugcacgugugcaucacaggcgaugacaagaacgcuaccgccagcuucauuuacaauggccggcuuguugauucuguggucuccuggagcaaagagauccugcgcacccaggaaucugagugugugugcauuaacgggacauguacgguggucaugaccgacggauccgcuagcggcaaggccgauacaaaaauccucuuuaucgaggaagggaagauuguucauaccuccacacugucuggaagcgcgcaacacguggaggaaugcuccugcuauccuagauaccccugugugcggugcgucugucgcgacaacuggaagggcagcaauagaccuaucguggauauuaacaucaaagaccacucuauuguuuccagcuacgugugcucugggcuugucggagacacgccccggaagaaugauagcuccucuagcucccauugucuggacccgaacaaugaggaaggcggccacggggugaaaggaugggccuucgaugacggcaacgauguuuggauggggcgcaccaucagcgagaagucuagacucggauaugagacauuuaaagugaucgaaggcugguccaauccuaagagcaaacugcagauuaaccggcaggucaucguggaccgcgggaauagaucuggauacuccggcauuuucagcgucgagggcaaguccugcaucaaccgguguuuuuauguggaacugauuagagggcgcaaggaggaaaccgagguucucuggaccucuaauagcaucguggucuucugcggaacauccggcaccuacgggacaggaucuuggcccgauggcgcugacauuaaccugaugccuguguga

SEQ ID NO: 214243 - RNA, 1410 nt, Artificial Sequence; identical to SEQ ID NO: 213707
  derived and/or modified CDS sequence (opt5) from neuraminidase__InfluenzaA__AFH74722

SEQ ID NO: 214244 - RNA, 1410 nt, Artificial Sequence; identical to SEQ ID NO: 213707
  derived and/or modified CDS sequence (opt5) from neuraminidase__InfluenzaA__AFH74733

SEQ ID NO: 214245 - RNA, 1410 nt, Artificial Sequence
  derived and/or modified CDS sequence (opt5) from neuraminidase__InfluenzaA__AFH74744
augaaccccaaucagaagaucauuaccaucggcagcgugucccugacaauuucuacgaucugcuucuuuaugcaaauugccauccucaucaccacagucacccugcacuucaaacaguacgaguuuaacagcccuccgaauaaccagguuaugcuuugugaacccacaauuaucgagagaaauauuaccgaaaucguguaucugacaaacaccacgauugagaaggaaaucugcccuaaacucgcugaguaccggaauugguccaagccccagugugacauuaccggguucgccccuuuuucuaaagauaacagcauccgccuguccgcgggaggcgacaucugggugacaagagagcccuaugucucuugcgauccugacaaguguuaccaauucgcucuugggcagggaaccacacugaauaacgugcauagcaauaacaccguucgggaucgcacgccguauagaacacuccugaugaaugaacugggcgugcccuuucaccucgggaccaagcaggucugcauugccugguccagcagcuccugucaugacggaaaagccuggcugcacgugugcaucacaggcgaugacaagaacgcuaccgccagcuucauuuacaauggccggcuuguugauucuguggucuccuggagcaaagagauccugcgcacccaggaaucugagugugugugcauuaacgggacauguacgguggucaugaccgacggauccgcuagcggcaaggccgauacaaaaauccucuuuaucgaggaagggaagauuguucauaccuccacacugucuggaagcgcgcaacacguggaggaaugcuccugcuauccuagauaccccggcgugcggugugucugccgcgacaacuggaaggggagcaauagaccuaucguggauauuaacaucaaagaccacucuauuguuuccaauuacguguguagcggacuugucggcgacacgccccggaagaacgauucuagcuccucuagccauugccuggacccgaauaacgaggaaggcgggcacggagugaaaggcugggccuucgaugacgggaaugauguuuggaugggacgcaccaucuccgagaagucuagacucggcuaugagacauuuaaagugaucgaaggguggucuaacccuaaguccaaacugcagauuaaucggcaggucaucguggaccgcggaaacagaagcggcuacucuggcauuuucuccgucgagggaaagagcuguaucaaucggugcuuuuauguggaacugauuagagggcgcaaggaggaaaccgagguucucuggaccuccaacucuaucguggucuucuguggcacaagcgggaccuacggaacaggcuccuggcccgauggggcugacauuaaucugaugccuguguga

SEQ ID NO: 214246 - RNA, 1410 nt, Artificial Sequence; identical to SEQ ID NO: 213707
  derived and/or modified CDS sequence (opt5) from neuraminidase__InfluenzaA__AFH74755

SEQ ID NO: 214247 - RNA, 1410 nt, Artificial Sequence; identical to SEQ ID NO: 213707
  derived and/or modified CDS sequence (opt5) from neuraminidase__InfluenzaA__AFH74766

SEQ ID NO: 214248 - RNA, 1410 nt, Artificial Sequence; identical to SEQ ID NO: 213707
  derived and/or modified CDS sequence (opt5) from neuraminidase__InfluenzaA__AFH74777

SEQ ID NO: 214249 - RNA, 1410 nt, Artificial Sequence; identical to SEQ ID NO: 208671
  derived and/or modified CDS sequence (opt5) from neuraminidase__InfluenzaA__AFH74788

SEQ ID NO: 214250 - RNA, 1410 nt, Artificial Sequence
  derived and/or modified CDS sequence (opt5) from neuraminidase__InfluenzaA__AFH74799
augaaccccaaucagaagaucauuaccaucggcagcgugucccugacaauuucuacgaucugcuucuuuaugcaaauugccauccucaucaccacagucacccugcacuucaaacaguacgaguuuaacagcccuccgaauaaccagguuaugcuuugugaacccacaauuaucgagagaaauauuaccgaaaucguguaucugacaaacaccacgauugagaaggaaaucugcccuaaacucgcugaguaccggaauugguccaagccccagugugacauuaccggguucgccccuuuuucuaaagauaacagcauccgccuguccgcgggaggcgacaucugggugacaagagagcccuaugucucuugcgggccugauaaguguuaccaauucgcucuuggacagggcaccacacugaauaacgugcauagcaauaacaccguucgggaccgcacgccguauagaacacuccugaugaaugaacugggggugcccuuucaccucggaaccaagcaggucugcauugccugguccucuagcuccugucaugauggcaaagccuggcugcacgugugcaucacaggcgacgauaagaacgcuaccgccagcuucauuuacaaugggcggcuuguugacucuguggucuccuggagcaaagagauccugcgcacccaggaaucugagugugugugcauuaacggaacauguacgguggucaugaccgauggcuccgcuagcgggaaggccgacacaaaaauccucuuuaucgaggaaggaaagauuguucauaccuccacacugucuggcagcgcgcaacacguggaggaaugcuccugcuauccuagauaccccggggugcggugugucugccgcgauaacuggaagggaagcaauagaccuaucguggacauuaacaucaaagaucacucuauuguuuccagcuacguguguucuggccuugucggcgacacgccccggaagaaugacagcuccucuagcucccauugccuggauccgaacaaugaggaagggggacacggcgugaaagggugggccuucgacgauggaaacgacguuuggaugggccgcaccaucagcgagaagucuagacucggguaugagacauuuaaagugaucgaaggaugguccaauccuaagagcaaacugcagauuaaccggcaggucaucguggaucgcggcaauagaucuggcuacuccgggauuuucagcgucgagggaaaguccuguaucaaccggugcuuuuauguggaacugauuagaggccgcaaggaggaaaccgagguucucuggaccucuaauagcaucguggucuucugugggacauccggaaccuacggcacagggucuuggcccgacggcgcugauauuaaccugaugccuguguga

SEQ ID NO: 214251 - RNA, 1410 nt, Artificial Sequence; identical to SEQ ID NO: 213727
  derived and/or modified CDS sequence (opt5) from neuraminidase__InfluenzaA__AFH74810

SEQ ID NO: 214252 - RNA, 1410 nt, Artificial Sequence; identical to SEQ ID NO: 213727
  derived and/or modified CDS sequence (opt5) from neuraminidase__InfluenzaA__AFH74821

SEQ ID NO: 214253 - RNA, 1410 nt, Artificial Sequence; identical to SEQ ID NO: 213727
  derived and/or modified CDS sequence (opt5) from neuraminidase__InfluenzaA__AFH74832

SEQ ID NO: 214254 - RNA, 1410 nt, Artificial Sequence; identical to SEQ ID NO: 213727
  derived and/or modified CDS sequence (opt5) from neuraminidase__InfluenzaA__AFH74843

SEQ ID NO: 214255 - RNA, 1410 nt, Artificial Sequence; identical to SEQ ID NO: 213707
  derived and/or modified CDS sequence (opt5) from neuraminidase__InfluenzaA__AFH74854

SEQ ID NO: 214256 - RNA, 1410 nt, Artificial Sequence; identical to SEQ ID NO: 213707
  derived and/or modified CDS sequence (opt5) from neuraminidase__InfluenzaA__AFH74865

SEQ ID NO: 214257 - RNA, 1410 nt, Artificial Sequence; identical to SEQ ID NO: 213707
  derived and/or modified CDS sequence (opt5) from neuraminidase__InfluenzaA__AFH74876

SEQ ID NO: 214258 - RNA, 1410 nt, Artificial Sequence; identical to SEQ ID NO: 213707
  derived and/or modified CDS sequence (opt5) from neuraminidase__InfluenzaA__AFH74887

SEQ ID NO: 214259 - RNA, 1410 nt, Artificial Sequence; identical to SEQ ID NO: 213707
  derived and/or modified CDS sequence (opt5) from neuraminidase__InfluenzaA__AFH74898

SEQ ID NO: 214260 - RNA, 1410 nt, Artificial Sequence; identical to SEQ ID NO: 213707
  derived and/or modified CDS sequence (opt5) from neuraminidase__InfluenzaA__AFH74909

SEQ ID NO: 214261 - RNA, 1410 nt, Artificial Sequence
  derived and/or modified CDS sequence (opt5) from neuraminidase__InfluenzaA__AFH74920
augaaccccaaucagaagaucauuaccaucggcagcgugucccugacaauuucuacgaucugcuucuuuaugcaaaccgccauucucaucacaaccgucacacugcacuucaaacagugugaguuuaacagcccuccgaauaaccagguuaugcuuugcgaacccaccaucauugagagaaauaucacagaaauuguguaccugaccaacacgaccaucgagaaggaaauuuguccuaaacucgcugaguaucggaauugguccaagccccagugcgacaucacaggguucgccccuuuuucuaaagauaacagcauucgccuguccgcgggaggcgacaucugggugaccagagagcccuacgucucuugugauccugacaagugcuaucaauucgcucuugggcagggaacaacccugaauaacgugcauagcaauaacacgguucgggaucgcacaccguacagaacccuccugaugaaugaacugggcgugcccuuucaccucgggacaaagcaggucuguaucgccugguccucuagcuccugccaugacggaaaagccuggcugcacguguguauuaccggcgaugacaagaacgcuaccgccagcuucaucuauaauggccggcuuguugauucuguggucuccuggagcaaagagauucugcgcacacaggaaucugagugcguguguaucaacgggacgugcaccguggucaugacagacggauccgcuagcggcaaggccgauaccaaaauucucuuuaucgaggaagggaagaucguucauacauccacccugucuggaagcgcgcaacacguggaggaaugcuccuguuacccuagauaucccggcgugcggugcgucugucgcgacaacuggaaggggagcaauagaccuauuguggauaucaacauuaaagaccacucuaucguuuccagcuacgugugcucuggacuugucggcgacacgccccggaagaaugauagcuccucuagcucccauugucuggacccgaacaaugaggaaggcgaucacggggugaaaggaugggccuucgacgauggcaacgacguuuggauggggcgcacaauuagcgagaagucuagacucggauacgagaccuuuaaagugaucgaaggcugguccaauccuaagagcaaacugcagaucaaccggcaggucauuguggaucgcgggaauagaucuggauauuccggcaucuucagcgucgagggcaaguccugcauuaaccgguguuuuuacguggaacugaucagagggcgcaaggaggaaaccgagguucucuggacaucuaauagcauuguggucuucugcggaaccuccggcacauaugggacgggaucuuggcccgacggcgcugauaucaaccugaugccuauuuga

SEQ ID NO: 214262 - RNA, 1410 nt, Artificial Sequence; identical to SEQ ID NO: 208671
  derived and/or modified CDS sequence (opt5) from neuraminidase__InfluenzaA__AFH74931

SEQ ID NO: 214263 - RNA, 1410 nt, Artificial Sequence; identical to SEQ ID NO: 208671
  derived and/or modified CDS sequence (opt5) from neuraminidase__InfluenzaA__AFH74942

SEQ ID NO: 214264 - RNA, 1410 nt, Artificial Sequence; identical to SEQ ID NO: 213707
  derived and/or modified CDS sequence (opt5) from neuraminidase__InfluenzaA__AFH74953

SEQ ID NO: 214265 - RNA, 1410 nt, Artificial Sequence
  derived and/or modified CDS sequence (opt5) from neuraminidase__InfluenzaA__AFH74964
augaaccccaaucagaagaucauuaccaucggcagcgugucccugacaauuucuacgaucugcuucuuuaugcaaauugccauccucaucaccacagucacccugcacuucaaacaguacgaguuuaacagcccuccgaauaaccagguuaugcuuugugaacccacaauuaucgagagaaauauuaccgaaaucguguaucugacaaacaccacgauugagaaggaaaucugcccuaaacucgcugaguaccggaauugguccaagccccagugugacauuaccggguucgccccuuuuucuaaagauaacagcauccgccuguccgcgggaggcgacaucugggugacaagagagcccuaugucucuugcgauccugacaaguguuaccaauucgcucuugggcagggaaccacacugaauaacgugcauagcaauaacaccguucgggaucgcacgccguauagaacacuccugaugaaugaacugggcgugcccuuucaccucgggaccaagcaggucugcauugccugguccucuagcuccugucaugacggaaaagccuggcugcacgugugcaucacaggcgaugacaagaacgcuaccgccagcuucauuuacaauggccggcuuguugauucuguggucuccuggagcaaagagauccugcgcacccaggaaucugagugugugugcauuaacgggacauguacgguggucaugaccgacggauccgcuagcggcaaggccgauacaaaaauccucuuuaucgaggaagggaagauuguucauaccuccauccugucuggaagcgcgcaacacguggaggaaugcuccugcuauccuagauaccccggcgugcggugugucugccgcgacaacuggaaggggagcaauagaccuauuguggauaucaacauuaaagaccacucuaucguuuccagcuacguguguucuggacuugucggcgacacaccccggaagaaugauagcuccucuagcucccauugccuggacccgaacaaugaggaaggcgggcacggagugaaaggcugggccuucgaugacgggaacgauguuuggaugggacgcaccaucagcgagaagucuagacucggcuaugagacguuuaaagugauugaagggugguccaauccuaagagcaaacugcagaucaaccggcaggucauuguggaccgcggaaauagaucuggcuacuccggcaucuucagcgucgaggggaaguccuguauuaaccggugcuuuuauguggaacugaucagaggacgcaaggaggaaacagagguucucuggaccucuaauagcauuguggucuucuguggcaccuccgggacauacggaaccggcucuuggcccgauggggcugacaucaaccugaugccuguguga

SEQ ID NO: 214266 - RNA, 1410 nt, Artificial Sequence; identical to SEQ ID NO: 213707
  derived and/or modified CDS sequence (opt5) from neuraminidase__InfluenzaA__AFH75391

SEQ ID NO: 214267 - RNA, 1410 nt, Artificial Sequence; identical to SEQ ID NO: 208810
  derived and/or modified CDS sequence (opt5) from neuraminidase__InfluenzaA__AFH97143

SEQ ID NO: 214268 - RNA, 1410 nt, Artificial Sequence
  derived and/or modified CDS sequence (opt5) from neuraminidase__InfluenzaA__AFI56407
augaaccccaaucagaagaucauuaccaucggcagcgugugcaugacaauugggauggccaaccugauccuccaaauuggaaauaucaucuccauuuggaucucucacagcauucagcugggcaaccagaaucagaucgagacguguaaccaauccgucauuaccuacgaaaauaacacauggguuaaucagaccuaugugaacaucucuaauacaaacuucgcugccgggcagagcguggucuccgugaaacuugcgggaaauucuagccugugcccuguuuccggcugggcuauuuacagcaaggacaacucuaucagaaucggguccaaaggaaauguguuugucauucgggagccguucaucagcuguucuccccucgaaugccgcaccuuuuuccugacacagggcgcccuucugaacgauaagcauuccaacggcaccauuaaagacagaagcccuuaucggacgcucaugucuugucccaucggggaggugccuucccccuacaauagccgcuuugaauccguugccuggucugcuagcgccugccacgauggaauuaacuggcugaccaucggcaucuccgggccugacaauggagcuguggccguccugaaguauaacggcauuaucacagauaccauuaagagcuggagaaauaacauccuccggacacaagagucugagugugcgugcgugaauggguccuguuucaccauuaugacggacggaccgagcgauggccaggccucuuacaaaaucuuucgcaucgaaaagggcaaaauugucaagagcguggagaugaacgcucccaauuaucauuacgaagagugcuccuguuacccugacucuagcgagaucacaugcguuugcagagauaacuggcacggguccaaucggcccugggugagcuucaaccagaaucuggaauaucagauuggauacaucuguucuggcauuuuuggggacaacccucgccccaaugauaaaaccggauccugcggcccggugagcucuaacggggccaacggagucaagggcuucuccuuuaaguauggcaaugggguguggaucggaagaacaaaaagcauuuccucucggaagggcuucgagaugaucugggacccuaacggguggaccggaaccgauaauagcuuuuccaucaaacaagacauuguuggcaucaacgaauggucuggguacagcggcuccuucgugcagcaucccgagcuuacaggacuggacuguauucgcccuugcuucugggucgaacucaucagaggccggcccaaggagaauacgauuuggaccagcgggucuuccaucagcuuuuguggagugaacucuggcacaguugggugguccuggcccgauggagcugagcugccuuucaccaucgacaaauga

SEQ ID NO: 214269 - RNA, 1410 nt, Artificial Sequence
  derived and/or modified CDS sequence (opt5) from neuraminidase__InfluenzaA__AFJ05141
augaaccccaaucagaagaucauuaccaucggcagcgugucccugacaauuucuacgaucugcuucuuuaugcaaauugccauccucaucaccacagucacccugcacuucaaacaguacgaguuuaacagcccuccgaauaaccagguuaugcuuugugaacccacaauuaucgagagaaauauuaccgaaaucguguaucugacaaacaccacgauugagaaggaaaucugcccuaaacccgcugaguaccggaauugguccaagccucagugugacauuaccggguucgcccccuuuucuaaagauaacagcauccgccucuccgcgggaggcgacaucugggugacaagagagccuuaugucucuugcgauccggacaaguguuaccaauucgcucuggggcagggaaccacacuuaauaacgugcauagcaauaacaccguucgggaucgcacgcccuauagaucccugcucaugaaugaacugggcgugccuuuucaccuggggacaaagcaggucugcauugccuggucuagcuccagcugucaugacggaaaagccuggcuccacgugugcaucaccggcgaugacaagaacgcuacagccucuuucauuuacaauggccggcugguugauuccguggucagcuggucuaaagagauccuucgcacccaggaauccgagugugugugcauuaacgggaccuguacaguggucaugacggacggaagcgcuuccggcaaggccgauaccaaaauccuguuuaucgaggaagggaagauuguucauacaucuacccucagcggauccgcgcaacacguggaggaaugcagcugcuaucccagauacccuggcgugcggugugucugccgcgacaacuggaaggggucuaauagacccaucguggauauuaacaucaaagaccacuccauuguuagcucuuacguguguagcggacuggucggcgacacaccgcggaagaaugauuccucuagcuccagccauugccuugacccuaacaaugaggaaggcgggcacggagugaaaggcugggccuucgaugacgggaacgauguuuggaugggacgcaccaucaaugagacgucuagacugggcuaugagacauuuaaggugaucgaagggugguccaaccccaaaagcaagcuccagauuaaucggcaggucaucguggaccgcggagauagaucuggcuacuccggcauuuucagcgucgaggggaaauccuguaucaaccggugcuuuuauguggaacugauuagaggacgcaaggaggaaaccgagguucuguggaccucuaauagcaucguggucuucuguggcacauccgggaccuacggaacaggcucuuggccugacggggcugaucucaaccugaugcccauuuga

SEQ ID NO: 214270 - RNA, 1410 nt, Artificial Sequence
  derived and/or modified CDS sequence (opt5) from neuraminidase__InfluenzaA__AFJ05145
augaaccccaaucagaagaucauuaccaucggcagcgugucccugacaaugucuacgauuugcuucuuuaugcaaaucgccauucucaucaccacagucacccugcacuucaaacaguacgaguuuaacagcccuccgaauaaccagguuaugcuuugugaacccacaaucauugagagaaauaucaccgaaauuguguaucugacaaacaccacgaucgagaaggaaauuugcccuaaacccgcugaguaccggaauugguccaagccucagugugacaucaccggguucgcccccuuuucuaaagauaacagcauucgccucuccgcgggaggcgacaucugggugacaagagagccuuaugucucuugcgauccggacaaguguuaccaauucgcucuggggcagggaaccacacuuaauaacgugcauagcaauaacaccguucgggaucgcacgcccuauagaacacugcucaugaaugaacugggcgugccuuuucaccuggggaccaagcaggucugcaucgccugguccucuagcuccugucaugacggaaaagccuggcuccacgugugcauuacaggcgaugacaagaacgcuaccgccagcuucaucuacaauggccggcugguugauucuguggucuccuggagcaaagagauucuucgcacccaggaaucugagugugugugcaucaacgggacauguacgguggucaugaccgacggauccgcuagcggcaaggccgauacaaaaauucuguuuaucgaggaagggaagaucguucauaccuccacacucucuggaagcgcgcaacacguggaggaaugcuccugcuaucccagauacccuggcgugcggugugucugccgcgacaacuggaaggggagcaauagacccauuguggauaucaacauuaaagaccacucuaucguuuccagcuacguguguucuggacuggucggcgacaccccgcggaagaaugauagcuccucuagcucccauugccuugacccuaacaaugaggaaggcgggcacggagugaaaggcugggccuucgaugacgggaacgauguuuggaugggacgcacgauuaaugagacaagcagacugggcuaugagaccuuuaaggugaucgaaggguggucuaaccccaaauccaagcuccagaucaaucggcaggucauuguggaccgcggagauagaagcggcuacucuggcaucuucuccgucgaggggaaaagcuguauuaaccggugcuuuuauguggaacugaucagaggacgcaaggaggaaaccgagguucuguggacauccaauucuauuguggucuucuguggcaccagcgggacauacggaacgggcuccuggccugacggggcugaucucaaccugaugcccaucuga

SEQ ID NO: 214271 - RNA, 1410 nt, Artificial Sequence
  derived and/or modified CDS sequence (opt5) from neuraminidase__InfluenzaA__AFJ05635
augaaccccaaucagaagaucauuaccaucggcagcgugugcaugacaauugggauggccaaccugauccuccaaauuggaaauaucaucuccauuuggaucucucacagcauucagcugagaaaccagucccagaucgagacguguaaucaaucugucauuaccuacgaaaacaauacauggguuaaccagaccuaugugaauaucagcaacacaaauuucgcugccggccaguccguggucucuaugaaacuugcggggaacagcucccugugcccugugagcggaugggcuauuuacucuaaggacaauuccauccggaucggcagcaaaggggauguuuuugugauucgcgagccguucaucucuuguucuccccucgaaugcagaaccuuuuuccugacacagggagcccuucugaacgacaagcauagcaauggcaccauuaaagaucggucuccuuaucgcacgcucauguccugucccaucggcgaggucccuagccccuacaacuccagauuugaaucuguggccuggagcgcuuccgccugccacgacgggauuaacuggcugaccaucggaaucagcggcccugauaauggggcuguugccgugcugaaguauaacggaauuaucacagacaccauuaagucuuggcggaauaacauccuccgcacacaagaguccgagugugcgugcgucaauggcagcuguuucaccauuaugacggaugggccgucugacggacaggccagcuacaaaaucuuuagaaucgaaaagggcaaaauugugaaguccguggagaugaacgcucccaauuaucauuacgaagagugcucuuguuacccugauagcuccgagaucacaugcgucugccgggacaacuggcacggcagcaaucgccccuggguuucuuucaaccagaaucuggaauaucagauuggguacaucuguuccggaauuuuuggcgauaacccuagacccaaugacaaaaccgggagcugcggaccggugucuuccaacggcgccaauggggugaagggauucagcuuuaaguauggcaacggcgucuggaucgggcggacaaaauccauuucuagccgcaagggauucgagaugaucugggauccuaacggcuggaccgggaccgacaauaacuuuuccaucaaacaagacauugugggaaucaaugaauggucuggcuacagcggguccuucguucagcaucccgagcuuacaggccuggauuguauuagaccuugcuucuggguggaacucauccggggacgccccaaggagaacacgauuuggaccagcggcuccuccaucagcuuuuguggggucaauucugacacagugggaugguccuggcccgauggcgcugagcugccuuucaccaucgacaaauga

SEQ ID NO: 214272 - RNA, 1410 nt, Artificial Sequence
  derived and/or modified CDS sequence (opt5) from neuraminidase__InfluenzaA__AFJ11709
augaaccccaaucagaagaucauuaccaucggcagcgugucccugacaauuucuacgaucugcuucuuuaugcaaauugccauccucaucaccacagucacccugcacuucaaacaguacgaguuuaacagcccuccgaauaaccagguuaugcuuugugaacccacaauuaucgagagaaauauuaccgaaaucguguaucugacaaacaccacgauugagaaggaaaucugcccuaaacucgcugaguaccggaauugguccaagccccagugugacauuaccggguucgccccuuuuucuaaagauaacagcauccgccuguccgcgggaggcgacaucugggugacaagagagcccuaugucucuugcgauccugacaaguguuaccaauucgcucuugggcagggaaccacacugaauaacgugcauagcaauaacaccguucgggaucgcacgccguauagaacacuccugaugaaugaacugggcgugcccuuucaccucgggaccaagcaggucugcauugccugguccucuagcuccugucaugacggaaaagccuggcugcacgugugcaucacaggcgaugacaagaacgcuaccgccagcuucauuuacaauggccggcuuguugauucuguggucuccuggagcaaagagauccugcgcacccaggaaucugagugugugugcauuaacgggacauguacgguggucaugaccgacggauccgcuagcggcaaggccgauacaaaaauccucuuuaucgaggaagggaagauuguucauaccuccacacugucuggaagcgcgcaacacguggaggaaugcuccugcuauccuagauaccccggcgugcggugugucugccgcgacaacuggaaggggagcaauagaccuaucguggauauuaacaucaaagaccacucuauuguuuccagcuacguguguucuggacuugucggcgacacgccccggaagaaugauagcuccucuagcucccauugccuggacccgaacaaugaggaaggcgggcacggagugaaaggcugggccuucgaugacgggaacgauguuuggaugggacgcaccaucaaugagacaagcagacucggcuaugagaccuuuaaggugaucgaaggguggucuaacccuaaauccaagcugcagauuaaucggcaggucaucguggaccgcggaaacagaagcggcuacucuggcauuuucuccgucgaggggaaaagcuguaucaaucggugcuuuuauguggaacugauuagaggacgcaaggaggaaaccgagguucucuggacauccaacucuaucguggucuucuguggcaccagcgggacauacggaacgggcuccuggcccgauggggcugaccugaaucuuaugcugauuuga

SEQ ID NO: 214273 - RNA, 1410 nt, Artificial Sequence
  derived and/or modified CDS sequence (opt5) from neuraminidase__InfluenzaA__AFJ11720
augaaccccaaucagaagaucauuaccaucggcagcgugucccugacaauuucuacgaucugcuucuuuaugcaaauugccauccucaucaccacagucacccugcacuucaaacaguacgaguuuaacagcccuccgaauaaccagguuaugcuuugugaacccacaauuaucgagagaaauauuaccgaaaucguguaucugacaaacaccacgauugagaaggaaaucugcccuaaacucgcugaguaccggaauugguccaagccccagugugacauuaccggguucgccccuuuuucuaaagauaacagcauccgccuguccgcgggaggcgacaucugggugacaagagagcccuaugucucuugcgauccugacaaguguuaccaauucgcucuugggcagggaaccacacugaauaacgugcauagcaauaacaccguucgggaucgcacgccguauagaacacuccugaugaaugaacugggcgugcccuuucaccucgggaccaagcaggucugcauugccugguccagcagcuccugucaugacggaaaagccuggcugcacgugugcaucacaggcgaugacaagaacgcuaccgccagcuucauuuacaauggccggcuuaucgauucuguuguguccuggagcaaagagauucugcgcacccaggaaucugagugugucugcaucaacgggacauguacgguggugaugaccgacggauccgcuagcggcaaggccgauacaaaaauccucuuuauugaggaagggaagaucguccauaccuccacacugucuggaagcgcgcaacacguugaggaaugcuccugcuauccuagauaccccggcgugcggugugugugccgcgacaacuggaaggggagcaauagaccuauugucgauaucaacauuaaagaccacucuaucguguccagcuacguuuguucuggacuugugggcgacacgccccggaagaaugauagcuccucuagcucccauugccuggacccgaacaaugaggaaggcgggcacggagucaaaggcugggccuucgaugacgggaacgauguguggaugggacgcaccaucaaugagacaagcagacucggcuaugagaccuuuaagguuauugaaggguggucuaacccuaaauccaagcugcagaucaaucgccaggugauugucgacaaaggaaaccggagcggcuacucuggcaucuucuccguggaggggaagucuuguauuaauagaugcuuuuaugucgaacugauccggggaagaaaggaggaaaccgaggugcucuggacauccaacucuauuguuguguucuguggcaccagcgggacauacggaacgggcuccuggcccgauggggcugaccugaaucuuaugccuaucuga

SEQ ID NO: 214274 - RNA, 1410 nt, Artificial Sequence; identical to SEQ ID NO: 213215
  derived and/or modified CDS sequence (opt5) from neuraminidase__InfluenzaA__AFJ11731

SEQ ID NO: 214275 - RNA, 1410 nt, Artificial Sequence
  derived and/or modified CDS sequence (opt5) from neuraminidase__InfluenzaA__AFJ19845
augaaccccaaucagaagaucauuaccaucggcagcgugucccugacaauuucuacgaucugcuucuuuaugcaaauugccauccucaucaccacagucacccugcacuucaaacaguacgaguuuaacagcccuccgaauaaccagguuaugcuuugugaacccacaauuaucgagagaaauauuaccgaaaucguguaucugacaaacaccacgauugagaaggaaaucugcccuaaacucgcugaguaccggaauugguccaagccccagugugacauuaccggguucgccccuuuuucuaaagauaacagcauccgccuguccgcgggaggcgacaucugggugacaagagagcccuaugucucuugcgauccugacaaguguuaccaauucgcucuugggcagggaaccacacugaauaacgugcauagcaauaacaccguucgggaucgcacgccguauagaacacuccugaugaaugaacugggcgugcccuuucaccucgggaccaagcaggucugcauugccugguccucuagcuccugucaugacggaaaagccuggcugcacgugugcaucacaggcgaugacaagaacgcuaccgccagcuucauuuacaauggccggcuuguugauucuguggucuccuggagcaaagagauccugcgcacccaggaaucugagugugugugcauuaacgggacauguacgguggucaugaccgacggauccgcuagcggcaaggccgauacaaaaauccucuuuaucgaggaagggaagauuguucauaccuccacacugucuggaagcgcgcaacacguggaggaaugcuccugcuauccuagauaccccgacgugcggugugucugccgcgauaacuggaagggcagcaauagaccuaucguggacauuaacaucaaagaccacucuauuguuuccagcuacguguguucugggcuugucggagauacgccccggaagaaugacagcuccucuagcucccauugccuggauccgaacaaugaggaaggcggccacggggugaaaggaugggccuucgacgauggcaacgacguuuggauggggcgcaccaucaaugagacaagcagacucggauaugagaccuuuaaggugaucgaaggcuggucuaacccuaaauccaagcugcagauuaaucggcaggucaucguggauaaagggaaccgcagcggauacucuggcauuuucuccgucgagggcaagagcuguaucaauagaugcuuuuauguggaacugauucgggggagaaaggaggaaaccgagguucucuggacauccaacucuaucguggucuucuguggaaccagcggcacauacgggacgggauccuggcccgacggcgcugaucugaaucuuaugccuauuuga

SEQ ID NO: 214276 - RNA, 1410 nt, Artificial Sequence; identical to SEQ ID NO: 208810
  derived and/or modified CDS sequence (opt5) from neuraminidase__InfluenzaA__AFJ44697

SEQ ID NO: 214277 - RNA, 1410 nt, Artificial Sequence; identical to SEQ ID NO: 212329
  derived and/or modified CDS sequence (opt5) from neuraminidase__InfluenzaA__AFJ69989

SEQ ID NO: 214278 - RNA, 1410 nt, Artificial Sequence
  derived and/or modified CDS sequence (opt5) from neuraminidase__InfluenzaA__AFJ69990
augaaccccaaucagaagaucauuaccaucggcagcgugugcaugacaauugggauggccaaccugauccuccaaauuggaaauaucacguccaucuggauuucucacagcauccagcugggcaaccagaaucagauugagaccuguaaccaauccgucaucacauacgaaaauaacaccuggguuaaucagacauaugugaacauuucuaauaccaacuucgcugccgggcagagcguggucuccgugaaacuugcgggaaauucuagccugugcccuguuuccggcugggcuaucuacagcaaggacaacucuauuagaaucggguccaaaggagauguguuugucauccgggagccguucauuagcuguucuccccucgaaugccgcacauuuuuccugacccagggcgcccuucugaaugacaagcauuccaacggcacgaucaaagauagaagcccuuaucggacccucaugucuugucccauuggggaggugccuucccccuacaacagccgcuuugaauccguugccuggucugcuagcgccugccacgacggaaucaauuggcugacaauuggcaucuccgggccugauaacggagcuguggccguccugaaguauaauggcaucauuaccgacacaaucaagagcuggagaaacaauauucuccggacccaagagucugagugugcgugcgugaacggguccuguuucacggugaugacagauggaccgagcgacggccaggccucuuacaaaaucuuucgcauugaaaagggcaaaaucgucaagagcguugagaugaaugcucccaacuaucauuacgaagagugcuccuguuacccugauucuagcgagauuaccugcgugugcagagacaauuggcacggguccaaccggcccugggugagcuucaaucagaaccuggaauaucgcaucggauacaucuguucuggcauuuuuggggauaauccuagacccaacgacaaaacaggauccugcggcccggucagcucuaauggggccaacggagugaagggcuucuccuuuaaguauggcaacgggguuuggaucggacggaccaaaagcauuuccucucgcaauggcuucgagaugaucugggauccuaacggguggaccggaacagacaauaacuuuagcauuaagcaggacaucaucggcauuaaugaaugguccggguacucuggcagcuucgugcaacaucccgagcuuacgggacuggauuguaucagaccuugcuucugggucgaacucauucggggccgccccaaagagaacaccaucuggacauccgggagcucuauuuccuuuuguggagugaauagcgacaccguuggcuggucuuggcccgauggggcugagcugccuuucacaaucgacaaguga

SEQ ID NO: 214279 - RNA, 1410 nt, Artificial Sequence
  derived and/or modified CDS sequence (opt5) from neuraminidase__InfluenzaA__AFJ69991
augaaccccaaucagaagaucauuaccaucggcagcgugugcaugacaauugggauggccaaccugauccuccaaauuggaaauaucaucuccauuuggaucucucacagcauucagcugggcaaccagucccagaucgagacguguaaucaaucugucauuaccuacgaaaacaauacauggguuaaccagaccuaugugaauaucagcaacacaaauuucgcugccgggcaguccguggucucugugaaacuugcgggaaacagcucccugugcccuguuagcggcugggcuauuuacucuaaggacaauuccaucagaaucgggagcaaaggagauguguuugucauucgggagccguucaucucuuguagcccccucgaaugccgcaccuuuuuccugacacagggcgcccuucugaacgacaagcauuccaauggcaccauuaaagauagaucuccuuaucggacgcucauguccugucccaucggggaggugccuagccccuacaaccaagaccugucccacucugccuggagcgcuuccgccugccaugauggaauuaacuggcugaccaucggcaucagcgggccugacaauggagcuguugccgugcucaaguauaacggcauuaucacagauaccauuaagucuuggcgcaauaacauccugagaacacaggaauccgagugugcgugcgucaaugggagcuguuuuaccauuaugacggacggaccgucugauggccaggccagcuacaaaaucuuccggaucgagaagggcaaaauugugaaguccguggaaaugaacgcucccaauuaucacuacgaggaaugcucuuguuacccugacagcuccgagaucacaugcgucugccgcgauaacuggcaugggagcaauagacccuggguuucuuuuaaccagaaucuugaguaucaaauuggauacaucuguuccggcauuuucggggacaacccucggcccaaugauaaaaccggaagcugcggcccggugucuuccaacggggccaauggagugaagggcuuuagcuucaaguauggcaacggggucuggaucggacgcacaaaauccauuucuagcagaaagggcuuugaaaugaucugggacccuaacggguggaccggaaccgacaauaacuucuccaucaaacaggauauugugggcaucaaugaguggucuggguacagcggcuccuuuguucagcaccccgaacugacaggacucgacuguauucggccuugcuucuggguggagcugauccgcggcagacccaaggaaaacacgauuuggaccagcgggucuuccaucagcuucuguggagucaauucugauacagugggcugguccuggcccgacggggcugagcuuccuuuuaccaucgauaaauga

SEQ ID NO: 214280 - RNA, 1410 nt, Artificial Sequence; identical to SEQ ID NO: 209636
  derived and/or modified CDS sequence (opt5) from neuraminidase__InfluenzaA__AFJ69992

SEQ ID NO: 214281 - RNA, 1410 nt, Artificial Sequence
  derived and/or modified CDS sequence (opt5) from neuraminidase__InfluenzaA__AFJ69993
augaaccccaaucagaagaucauuaccaucggcagcgugucccugacaauuucuacgaucugcuucuuuaugcaaauugccauccucaucaccacagucacccugcacuucaaacaguacgaguuuaacagcccuccgaauaaccagguuaugcuuugugaacccacaauuaucgagagaaauauuaccgaaaucguguaucugacaaacaccacgauugagaaggaaaucugcccuaaacucgcugaguaccggaauugguccaagccccagugugacauuaccggguucgccccuuuuucuaaagauaacagcauccgccuguccgcgggaggcgacaucugggugacaagagagcccuaugucucuugcgauccugacaaguguuaccaauucgcucuugggcagggaaccacacugaauaacgugcauagcaauaacaccguucgggaucgcacgccguauagaacacuccugaugaaugaacugggcgugcccuuucaccucgggaccaagcaggucugcauugccugguccucuagcuccugucaugacggaaaagccuggcugcacgugugcaucacaggcgaugacaagaacgcuaccgccagcuucauuuacaauggccggcuuguugauucuguggucuccuggagcaaagagauccugcgcacccaggaaucugagugugugugcauuaacgggacauguacgguggucaugaccgacggauccgcuagcggcaaggccgauacaaaaauccucuuuaucgaggaagggaagauuguucauaccuccacacugucuggaagcgcgcaacacguggaggaaugcuccugcuauccuagauaccccggcgugcggugugucugccgcgacaacuggaaggggagcaauagaccuaucguggauauuaacaucaaagaccacucuauuguuuccagcuacguguguucuggacuugucggcgacacgccccggaagaaugauagcuccucuagcucccauugccuggacccgaacaaugaggaaggcgggcacggagugaaaggcugggccuucgaugacgggaacgauguuuggaugggacgcaccaucaaugagacaagcagacucggcuaugagaccuuuaaggugaucgaaggguggucuaacccuaaauccaagcugcagauuaaucggcaggucaucgugggacgcggcaacagaagcggcuacucugggauuuucuccgucgagggaaaaagcuguaucaaucggugcuuuuauguggaacugauuagaggccgcaaggaggaaaccgagguucucuggacauccaacucuaucguggucuucugugggaccagcggaacauacggcacgggguccuggcccgacggcgcuaaucugaaccuuaugccuauuuga

SEQ ID NO: 214282 - RNA, 1410 nt, Artificial Sequence; identical to SEQ ID NO: 211590
  derived and/or modified CDS sequence (opt5) from neuraminidase__InfluenzaA__AFJ69994

SEQ ID NO: 214283 - RNA, 1413 nt, Artificial Sequence
  derived and/or modified CDS sequence (opt5) from neuraminidase__InfluenzaA__AFJ74389
augaaccccaaucagaagaucauuaccaucggcagcauuuccaucgccauugggaucaucucucugauucuccaaaucggaaacauuaucagcauuugggcuucccacucuauccagacaggcagccagaaucauacgggggugugcaaccagagaauuaucaccuacgagaauagcacaugggucaaccaaaccuauguuaauaucaacaauacaaacgugguggccggaaaagacaagaccucuaugacacuggcgggcaauagcucccuuuguccuauucgggggugggcuaucuacaccaaagauaacagcauucgcaucggaucuaagggcgacgucuucgugauuagagaaccguuuaucuccugcagccaccuggagugucggacguucuuucucacccagggcgcccugcuuaaugauaaacauucuaacgggacaguuaaggaccgcucccccuauagagcccugaugagcugcccucucggagaagcucccucuccuuacaauucccgguucgagagcguggccugguccgcuucugccugucacgauggccugggguggcugaccaucggaauuagcggccccgacaacggggcggucgccgugcucaaguauaacggaaucauuacagaaaccaucaaauccuggaagaaacgcauucugagaacgcaggagagcgagugcguuuguaugaauggcucuugcuuuacaaucaugaccgauggcccuuccaacggggcugccagcuaccggaucuucaagauugaaaaaggacgcgugacaaagucuaucgagcuugacgcuccgaauuaucauuacgaagaguguagcugcuaccccgauaccggcaccgucaugugugugugcagagacaacuggcacggguccaaucggccuugggugucuuuuaaccagaaucuggauuaucaaauuggauacaucugcagcggcgucuucggggacaacccccgcccuaaggauggagagggcuccuguaaucccguuacaguggacggcgccgacggggugaaaggauuuagcuauagauacggcaacggggucuggauuggacggacgaagucuaaucgccucagaaaaggcuucgaaaugaucugggauccgaacggguggaccgacacagauuccgacuuuagcaugaagcaggauauuguggcgaugaccgacuggucuggcuauuccggauccuucguucagcacccugagcugacaggccuugauugcaugcggcccuguuuuuggguggaacuggucagagggcucccucgcgagaauaccacgaucuggacauccggaucuagcaucuccuucugcggcgugaacucugacaccgccaauuggagcuggcccgauggggcugaacugcccuucaccauugacaaauga

SEQ ID NO: 214284 - RNA, 1410 nt, Artificial Sequence
  derived and/or modified CDS sequence (opt5) from neuraminidase__InfluenzaA__AFJ74399
augaaccccaaucagaagaucauuaccaucggcagcgugucccugacaauugccacgaucugcuuccucaugcaaauugcuauccuggucaucacccuuacacugcacuuuaaacaguacgaguguaacucuccuccgaauaaccagguuaugcucugcgaacccaccauuaucgagagaaauauuacagaaaucguguaucugaccaacacaaccauugagaaggaaaucuguccuaaacuugccgaguaccggaauuggagcaagccccagugcaaaauuacgggguucgcgccuuuuuccaaggacaacucuauccgccugagcgcuggaggcgauaucugggugaccagagagcccuaugucuccugugacccugggaagugcuaccaauucgcccucggacagggcacaacccugaauaaccggcauucuaaugauacagugcacgaccgcaccccguauagaacgcugcucaugaacgaacuggggguucccuuucaucuuggaacaaaacagguguguauugccuggagcuccagcucuugccacgauggcaaggcuuggcugcaugucugugugaccggccacaaugagaacgccacagcuuccuucaucuacgacgggcggcucguugauagcauuggaucuugguccaaaaauauccugcgcacccaggaaagcgagugcguguguauuaacggaaccugcacagucgugaugacggacgggucugccuccggcagagcggauaccaagauccuuuuuaucgaggaaggcaaaauugugcacaucagcccucuguccgggucugcccaacaugucgaggaaugcagcuguuauccccgguacccuggaguucgcugcguguguagagacaacuggaagggcuccaaucggcccauuguggauaucaacgucaaggacuucagcauugugucuuccuacguuugcagcggccucgugggggauacaccgcgcaaaaaugacucuagcuccucuagccacugucugaacccuaauaacgaggaaggaggccauggggucaagggaugggcuuuugacgauggcaaugacguguggauggggagaaccaucuccgagaaacugcggagcggauaugagacauucaagguuaucggcggcuggucuaaacccaacuccaagcuccagauuaaucgccaggugaucgucgauagagggaaccggagcggauacucuggcaucuuuuccguggaagggaaaagcugcauuaauagauguuucuaugucgagcugauucgcggacggaagcaggaaaccgaggugugguggacguccaacucuaucguuguguuuugcggcacaagcgggaccuacggcaccggauccuggccugacggcgccgauauuaaucuuaugcccaucuga

SEQ ID NO: 214285 - RNA, 1410 nt, Artificial Sequence
  derived and/or modified CDS sequence (opt5) from neuraminidase__InfluenzaA__AFJ74410
augaaccccaaucagaagaucauuaccaucggcagcgugucccugacaauugccacgaucugcuuccucaugcaaauugcuauccuggucaugaccguuacacuucacuuuaaacaguacgaguguaacucuccuccgaauaaccaggugaugcugugcgaacccaccaucauugagagaaauaucacagaaauuguguaucucaccaacacaaccaucgagaaggaaauuuguccuaaacuggccgaguaccggaauuggagcaagccccagugcaaaaucacgggguucgcgccuuuuuccaaggacaacucuauucgccuuagcgcuggaggcgauaucugggucaccagagagcccuauguguccugugacccugggaagugcuaccaauucgcccugggacagggcacaacccucaauaaccggcauucuaaugauacaguucacgaccgcaccccguauagaacgcugcugaugaacgaacucggggugcccuuucaucugggaacaaaacaggucuguaucgccuggagcuccagcucuugccacgauggcaaggcuuggcuucauguguguguuaccggccacaaugagaacgccacagcuuccuucauuuacgacgggcggcugguggauagcaucggaucuugguccaaaaauauucuccgcacccaggaaagcgagugcgucuguaucaacggaaccugcacaguggugaugacggacgggucugccuccggcagagcggauaccaagauucuguuuaucgaggaaggcaaaaucguccacauuagcccucuuuccgggucugcccaacauguugaggaaugcagcuguuauccccgguacccuggagugcgcugcguguguagagacaacuggaagggcuccaaucggcccaucgucgauauuaacgugaaggacuacagcaucauuucuuccuauguuugcagcggccuggugggggauacaccgcgcaaaaaugacucuagcuccucuagccacugucucaacccuaauaacgaggaaggaggccauggggucaagggaugggcuuucgacgauggcaaugacguguggauggggagaaccaucuccgagaaacugcggagcggauacgagacauuuaagguuaucggcggcuggucuaaacccaacuccaagcugcagauuaaucgccaggugaucgucgauagagggaaccggagcggauauucuggcauuuucuccguggaagggaaaagcugcaucaauagauguuuuuacgucgagcucauucgcggacggaagcaggaaaccgaggugugguggacguccaacucuaucguuguguucugcggcacaagcgggaccuauggcaccggauccuggccugacggcgccgauauuaaucugaugcccaucuga

SEQ ID NO: 214286 - RNA, 1410 nt, Artificial Sequence; identical to SEQ ID NO: 206387
  derived and/or modified CDS sequence (opt5) from neuraminidase__InfluenzaA__AFJ74451

SEQ ID NO: 214287 - RNA, 1413 nt, Artificial Sequence
  derived and/or modified CDS sequence (opt5) from neuraminidase__InfluenzaA__AFJ74462
augaaccccaaucagaagaucauuaccaucggcagcauuuccguggccaucgggauuaucucucugauccuccaaauuggaaacaucauuagcaucugggcuucccacucuauucagacaggcagccagaauuacacggggaucugcaaccagagaauuaucaccuaugaaaauuccacaugggucaaccaaaccuacguuaauaucaacaauacaaacgugguggccggaaaagacaagaccucuaugacacuggcgggcaauagcucccuuuguccuauucgggggugggcuaucuauaccaaagauaacagcauucgcaucggaucuaagggcgacgucuucgugauuagagagccguuuaucuccugcagccaucuggagugucggacguucuuucucacccagggcgcccugcuuaaugauaaacacucuaacgggacaguuaaggaccgcucccccuacagagcccugaugagcugcccucucggagaagcucccucuccuuauaauucccgguucgagagcguggccugguccgcuucugccugucaugauggccugggguggcugaccaucggaauuagcggccccgacaacggggcggucgccgugcucaaguacaacggaaucauuacagaaaccaucaaauccuggaagaaacagauucugcgcacgcaggagagcgagugcguuugugugaauggcucuugcuuuacaaucaugaccgauggcccuuccaacagagcugccagcuaucggaucuucaagauugaaaaagggcgcgucacaaagucuaucgagcuugacgcuccgaauuaccacuacgaagaguguagcugcuaucccgauaccggaaccgugaugugugugugcagagacaacuggcauggcuccaaucggccuugggucucuuuuaaccaaaaucuggauuaccagauuggguauaucugcagcggaguuuucggcgacaacccccgcccuaaggauggggagggauccuguaaucccgugacaguggacggcgccgacggcgucaaaggguuuagcuacagauauggaaacggcguguggauugggcggacgaagucuaaucgccucagaaaaggauucgaaaugaucugggauccgaacggcuggaccgacacagauuccgacuuuagcaugaagcaggauguuguggcgaugaccgacuggucuggguacuccggcagcuucguccagcacccugagcugacaggacuugauugcaugcggcccuguuuuuggguggaacugguuagaggccucccucgcgagaauaccacgauuuggacauccgggucuagcaucuccuucugcggagugaacucugaaaccgccaauuggagcuggcccgacggcgcugagcugcccuucaccaucgauaaauga

SEQ ID NO: 214288 - RNA, 1410 nt, Artificial Sequence
  derived and/or modified CDS sequence (opt5) from neuraminidase__InfluenzaA__AFJ74517
augaaccccaaucagaagaucauuaccaucggcagcgugucccugacaauugccacgaucugcuuccucaugcaaauugcuauccuggucaccacaguuacccuucacuuuaaacaguacgaguguaacucuccuccgaauaaccaggugaugcugugcgaacccacaaucauugagagaaauaucaccgaaauuguguauaugacaaacaccacgaucgagaaggaaauuuguccuaaacucgccgaguaccggaauuggagcaagccccagugcaaaaucaccggguucgcgccuuuuuccaaggacaacucuauucgccugagcgcuggaggcgauaucugggucacaagagagcccuauguguccugugacccugauaagugcuaccaauucgcccuugggcagggaaccacacugaauaaccggcauucuaaugacaccguucacgaucgcacgccguauagaacacuccugaugaacgaacugggcgugcccuuucaucucgggaccaaacaggucuguaucgccuggagcuccagcucuugccacgacggaaaggcuuggcugcauguguguguuacaggccacgaugagaaugccaccgcuuccuucauuuacgacggccggcuuguggauagcaucgggucuugguccaaaaagauucugcgcacccaggaaagcgagugcgucuguaucaacggaacaugcacgguggugaugaccgacggcucugccuccgggagagcggauacaaaaauucucuuuaucgaggaaggaaagaucguccacauuagccaacuguccggcucugcccagcauguugaggaaugcagcuguuauccucgguaccccggggugcgcugcguguguagagacaauuggaagggauccaaccggccuaucgucgauauuaacgugaaagacuacagcaucguuucuuccuaugugugcagcggccuugucggcgacacaccccgcaagaaugauucuagcuccucuagccacugucugaacccgaauaacgaggaagggggacauggcgugaaagggugggcuuucgacgauggaaaugacguuuggaugggcagaaccauuuccgagaagcuccggagcggguacgagaccuuuaaagugaucgaaggauggucuaagccuaacuccaaacugcagaucaaucgccaggucauuguggauagaggcaaccggagcggcuauucugggaucuucuccgucgagggaaagagcugcauuaauagauguuuuuacguggaacugauccgcggccggaagcaagagaacgaaguuugguggacguccaauucuauuguggucuucugcgggacaagcggaaccuauggcaccggguccuggcccgacggcgccgauaucaaccucaugccuauuuga

SEQ ID NO: 214289 - RNA, 1410 nt, Artificial Sequence
  derived and/or modified CDS sequence (opt5) from neuraminidase__InfluenzaA__AFJ74564
augaaccccaaucagaagaucauuaccaucggcagcgugucccugacaauugccacgaucugcuuccucaugcaaauugcuauccuggucaccacaguuacccuucacuuuaaacaguacgaguguaacucuccuccgaauaaccaggugaugcugugcgaacccacaaucauugagagaaauaucaccgaaauuguguaucucacaaacaccacgaccgagaaggaaaucuguccuaaacuggccgaguaccggaauuggagcaagccccagugcaacauuacaggguucgcgccuuuuuccaaagacaauucuauccgccuuagcgcuggaggcgauauuugggucaccagagagcccuauguguccugugacccugauaagugcuaccaauucgcccuggggcagggaacaacccucaacaauggccauucuaacgacacgguucacgaucggacaccguaucgcacccugcugaugaaugaacucggggugcccuuucaucugggaacaagacaggucuguaucgccuggagcuccagcucuugccacgacggcaaggcuuggcuucauguguguguuaccggcgaugacgagaacgccaccgcuuccuucaucuacaaugggcggcugguggauagcauuggaucuugguccaaaaagauccuccgcacacaggaaagcgagugcgucuguauuaacggcacgugcaccguggugaugacagacgggucugccuccggaaaagcggauaccaagauccuguuuauugaggaaggcaaaaucguccacaucagcacacuuuccgggucugcccaacacguugaggaaugcagcuguuauccuagauaccccggagugcggugcgugugucgcgacaacuggaagggcuccaauagaccuauugucgauaucaacgugaaggacuacagcauuguuucuuccuaugugugcagcggccuggucggggacacgccccggaaaaaugauucuuucagcuccucucauugucucgacccgaacaaugaggaaggaggccacggggugaagggaugggcuuuugaugacggcaacgauguuuggauggggcgcaccaucagcgagacacugagauccggauacgagaccuucaaagugauugaaggcuggagcaagccuaauucuaaacugcagaucaaccggcaggucaucguggagcgcggcaauagauccggguauagcggaaucuuuucugucgaaggcaaguccugcauuaaccgguguuucuacguggagcucauuagagggcgcaaagaagagaccgagguuugguggacaagcaauuccaucguggucuuuugcggaaccucuggcacauaugggacgggcagcuggcccgacggagccgauauuaaccugaugccuaucuga

SEQ ID NO: 214290 - RNA, 1413 nt, Artificial Sequence
  derived and/or modified CDS sequence (opt5) from neuraminidase__InfluenzaA__AFJ74639
augaaccccaaucagaagaucauuaccaucggcagcauuuccaucgccauugggaucaucucucugaugcuccaaauuggaaacaucauuagcaucugggcuucccacucuauucagacaggcagccagaaucauacggggaucugcaaccagagaauuaucaccuacgagaauaacacaugggugaaucacaccuaugucaacaucaauaacacaaauguuguggccggaaaagacaagaccuccgugacacuggcgggcaacucuagccuuuguuccauuagcgggugggcuaucuacaccaaagauaauucuauucggaucggauccaagggcgacgucuucgugauucgcgaaccuuuuaucagcugcucucaucuggaguguagaacguucuuucucacccaaggcgcccugcuuaacgauaaacacuccaaugggacaguuaaggaccggagcccguaucgcgcccugaugucuugcccccucggagaagcuccuucccccuacaacagcaaguucgaguccguggccuggucugcuagcgccugucaugauggcaugggguggcugaccaucggaauuuccggcccugacaacggggcggucgccgugcugaaauauaauggaaucauuacagaaaccaucaagagcuggaaaaagcggauucucagaacgcaggagucugagugcguuuguaugaacggcuccugcuuuacaaucaugaccgauggccccagcaauggggcugccucuuacaaaaucuucaagauugaaaagggaaaagugacaaagagcaucgagcugaacgcuccuuccuuucacuaugaagaguguucuugcuacccggacaccggcaccgucaugugugugugccgcgauaauuggcacgggagcaacagacccuggguguccuucaaucagaaccuugacuaccagauuggauauaucugcagcggcgucuuuggggauaauccucggcccaaagacggagagggcucuuguaacccuguuacaguggauggcgccgacggggugaagggauucuccuacaaauauggcaauggggucuggauuggacgcaccaagagcaacagacugcggaaaggcuuugaaaugaucugggaccccaauggguggacgaacacagauucugacuucuccgugaagcaagauguuguggcgauuaccgacuggagcggcuacuccggaucuuuuguccagcauccggagcucacaggccuggauugcauccgcccuuguuucuggguggaacuuguuagagggcugccccgggagaauaccacgaucuggacaagcggauccucuauuagcuucugcggcgugaacuccgacaccgccaacuggagcuggccugauggggcugaacuccccuuuaccaucgacaaguga

SEQ ID NO: 214291 - RNA, 1410 nt, Artificial Sequence
  derived and/or modified CDS sequence (opt5) from neuraminidase__InfluenzaA__AFJ74640
augaaccccaaucagaagaucauuaccaucggcagcgugucccugacaauuucuacgaucugcuucuuuaugcaaauugccauccucaucaccacagucacccugcacuucaaacaguacgaguuuaacagcccuccgaauaaccagguuaugcuuugugaacccacaauuaucgagagaaauauuaccgaaaucguguaucugacaaacaccacgauugagaaggaaaucugcccuaaacucgcuggguaccggaauugguccaagccccaguguaacauuaccggauucgccccuuuuucuaaagacaauagcauccgccuguccgcgggcggggauaucugggugacaagagagcccuaugucucuugcgacccugauaaguguuaccaauucgcucuuggacagggcaccacacugaacaaugugcauagcaacgacaccguucacgaucggacgccguaucgcacacuccugaugaaugagcugggggugcccuuucaucucggaaccaagcaggucugcauugccugguccucuagcuccugucacgacggcaaagccuggcugcaugugugcguuacaggcgaugacgaaaacgcuaccgccagcuucaucuacaaugggagacuuguggauucuauugucuccuggagcaagaaaauccugcggacccaggagucugaaugugugugcauuaacggaacauguacgguggucaugaccgacggcuccgcuagcgggaaggccgauacaaaaauccucuuuaucgaggagggaaagauuguucacaccuccacacugucuggcagcgcgcaacacguggaagagugcuccugcuauccucgcuaccccggggugagaugugucugccgggacaacuggaagggaagcaaucgcccuaucguggauauuaacaucaaagacuacucuauuguuuccagcuauguguguucuggccuugucggcgacacccccagaaagaaugauagcuccucuagcucccauugccuggacccgaacaaugaagaagggggacacggcgugaaagggugggccuucgaugacggaaacgauguuuggaugggccggacgaucagcgagaagcuccgcucuggguacgagacauuuaaagugaucgagggaugguccaauccuaacagcaagcugcagauuaauagacaggucaucguggacaaaggcaaccggucuggcuauuccgggauuuucagcgucgaaggaaaguccuguaucaaucgcugcuuuuacguggagcugauuagaggccggaagcaggaaaccgagguucucuggaccucuaacagcaucguggucuucugugggacauccggaaccuauggcacagggucuuggcccgauggcgcugacauuaaucugaugccuaucuga

SEQ ID NO: 214292 - RNA, 1413 nt, Artificial Sequence; identical to SEQ ID NO: 214290
  derived and/or modified CDS sequence (opt5) from neuraminidase__InfluenzaA__AFJ74659

SEQ ID NO: 214293 - RNA, 1413 nt, Artificial Sequence
  derived and/or modified CDS sequence (opt5) from neuraminidase__InfluenzaA__AFJ74679
augaaccccaaucagaagaucauuaccaucggcagcauuuccaucgccauugggaucaucucucugaugcuccaaauuggaaacaucauuagcaucugggcuucccacucuauucagacaggcagccagaaucauacggggaucugcaaccagagaauuaucaccuacgagaauaacacaugggugaaucacaccuaugucaacaucaauaacacaaauguuguggccggaaaagacaagaccuccgugacacuggcgggcaacucuagccuuuguuccauuagcgggugggcuaucuacaccaaagauaauucuauucggaucggauccaagggcgacgucuucgugauucgcgaaccuuuuaucagcugcucucaucuggaguguagaacguucuuucucacccaaggcgcccugcuuaacgauaaacacuccaaugggacaguuaaggaccggagcccguaucgcgcccugaugucuugcccccucggagaagcuccuucccccuacaacagcaaguucgaguccguggccuggucugcuagcgccugucaugauggcaugggguggcugaccaucggaauuuccggcccugacaacggggcggucgccgugcugaaauauaauggaaucauuacagaaaccaucaagagcuggaaaaagcggauucucagaacgcaggagucugagugcguuuguaugaacggcuccugcuuuacaaucaugaccgauggccccagcaauggggcugccucuuacaaaaucuucaagauugaaaagggaaaagugacaaagagcaucgagcugaacgcuccuuccuuucacuaugaagaguguucuugcuacccggacaccggcaccgucaugugugugugccgcgauaauuggcacgggagcaacagacccuggguguccuucaaucagaaccuugacuaccagauuggauauaucugcagcggcgucuuuggggauaauccucggcccaaagacggagagggcucuuguaacccuguuacaguggauggcgccgacggggugaagggauucuccuacaaauaugacaauggcgucuggauugggcgcaccaagagcaacagacugcggaaaggauuugaaaugaucugggaucccaauggcuggacgaacacagacucugauuucuccgugaagcaagacguuguggcgauuaccgauuggagcggguacuccggcucuuuuguccagcauccggagcucacaggacuggacugcauccgcccuuguuucuggguggaacuuguuagaggccugccccgggagaauaccacgaucuggacaagcggguccucuauuagcuucugcggagugaacuccgauaccgccaacuggagcuggccugacggcgcugaacuccccuuuaccaucgauaaguga

SEQ ID NO: 214294 - RNA, 1410 nt, Artificial Sequence
  derived and/or modified CDS sequence (opt5) from neuraminidase__InfluenzaA__AFJ74680
augaaccccaaucagaagaucauuaccaucggcagcgugucccugacaauuucuacgaucugcuucuuuaugcaaauugccauccucaucaccacagucacccugcacuucaaacaguacgaguuuaacagcccuccgaauaaccagguuauucuuugugaacccacaaucauugagagaaauaucaccgaaauuguguaucugacaaacaccacgaucgagaaggaaauuugcccuaaacucgcugaguaccggaauugguccaagccccaguguaacaucaccggguucgccccuuuuucuaaagacaauagcauccgccuguccgcgggaggcgauauuugggugacaagagagcccuaugucucuugcgacccugauaaguguuaccaauucgcucuugggcagggaaccacacugaacaaugugcauagcaacgacaccguucacgaucggacgccguaucgcacacuccugaugaaugaacugggcgugcccuuucaucucgggaccaagcaggucugcaucgccugguccucuagcuccugucacgacggaaaagccuggcugcaugugugcguuacaggcgaugacgagaacgcuaccgccagcuucauuuacaauggcagacuuguggauucuaucgucuccuggagcaagaaaauucugcggacccaggaaucugagugugugugcaucaacgggacauguacgguggucaugaccgacggauccgcuagcggcaaggccgauacaaaaauccucuuuauuaaggaggggaagaucguucacaccuccacacugucuggaagcgcgcaacacguggaagagugcuccugcuauccucgcuaccccggcgugagaugugucugccgggacaacuggaaagggagcaaucgcccuauuguggauaucaacauuaaggacuacucuaucguuuccagcuauguguguucuggacuugucggcgacacccccagaaagaaugauagcuccucuagcucccauugccuggacccgaacaaugaagagggcgggcacggagugaaaggcugggccuucgaugacgggaacgauguuuggaugggacggacgaucagcgaaaaacuccgcucuggcuacgagacauuuaaggugauugaggggugguccaauccuaacagcaaacugcagaucaauagacaggucauuguggaccggggaaaccgcucuggcuauuccggcaucuucagcgucgaagggaaguccuguauuaauagaugcuuuuacguggagcugauccggggaagaaagcaggaaaccgagguucucuggaccucuaacagcauuguggucuucuguggcacauccgggaccuauggaacaggcucuuggcccgauggggcugacaucaaucugaugccuaucuga

SEQ ID NO: 214295 - RNA, 1410 nt, Artificial Sequence
  derived and/or modified CDS sequence (opt5) from neuraminidase__InfluenzaA__AFJ74701
augaaccccaaucagaagaucauuaccaucggcagcgugucccugacaauugccacgaucugcuuccucaugcaaauugcuauccuggucaccacaguuacccuucacuuuaaccaguacgaguguaauucuccuccgaacaaucaggugaugcugugcgaacccacaaucauugagagaaacaucaccgaaauuguguaucucacaaauaccacgaucgagaaagaaauuuguccuaagcuggccgaguaccggaucuggagcaaaccccagugcaacauuaccggguucgcgccuuuuuccaaggacaauucuauccgccuuagcgcuggaggcgauaucugggucacaagagagcccuauguguccugugacccugauaaaugcuaccaauucgcccuggggcagggaaccacacucaacaauggccauucuaacgacaccguucacgaucggacgccguaucgcacacugcugaugaaugaacucggggugcccuuucaucugggaaccagacaggucuguauggccuggagcuccagcucuugccacgacggcaaggcuuggcuucauguguguguuacaggcgaugacgagaacgccaccgcuuccuucauuuacaaugggcggcugguggauagcaucggaucuugguccaagaaaauucuccgcacccaggaaagcgagugcgucuguaucaacggcacaugcacgguggugaugaccgacgggucugccuccggaaaggcggauacaaaaauucuguuuaucgaggaaggcaagaucguccacauuagcacccuuuccgggucugcccaacacguugaggaaugcagcuguuauccuagauaccccggagugcggugcgugugucgcgacaacuggaaaggcuccaauagaccuaucgucgauauuaacgugaaggacuacagcaucguuucuuccuaugugugcagcggccuggucggggacacaccccggaagaaugauucuuucagcuccucucauugucucgacccgaacaaugaggaaggaggccacggggugaaaggaugggcuuuugaugacggcaacgauguuuggauggggcgcaccauuagcgagaagcugagauccggauacgagacguucaaagugaucgaaggcuggagcaagccuaauucuaaacugcaggucaaccgccaggugaucgucgagcggggcaauagauccggguauagcggaaucuuuucuguggaaggcaaguccugcauuaaccgguguuucuacguugagcucauuagagggcgcaaagaagagacagaggugugguggaccagcaauuccaucgucguguuuugcggaaccucuggcacauaugggaccggcagcuggcccgacggagccgauauuaaccugaugccuaucuga

SEQ ID NO: 214296 - RNA, 1410 nt, Artificial Sequence
  derived and/or modified CDS sequence (opt5) from neuraminidase__InfluenzaA__AFJ74731
augaaccccaaucagaagaucauuaccaucggcagcgugucccugacaauuucuacgaucugcuucuuuaugcaaauugccauccucaucaccacagucacccugcacuucaaacaguacgaguuuaacagcccuccgaauaaccagguuaugcuuugugaacccacaauuaucgagagaaauauuaccgaaaucguguaucugacaaacaccacgauugagaaggaaaucugcccuaaacucgcugaguaccggaauugguccaagccccaguguaacauuaccggguucgccccuuuuucuaaagacaauagcauccgccuguccgcgggaggcgauaucugggugacaagagagcccuaugucucuugcgacccugauaaguguuaccaauucgcucuugggcagggaaccacacugaacaaugugcauagcaacgacaccguucacgaucggacgccguaucgcacacuccugaugaaugaacugggcgugcccuuucaucucgggaccaagcaggucugcauugccugguccucuagcuccugucacgacggaaaagccuggcugcaugugugcguuacaggcgaugacgagaacgcuaccgccagcuucaucuacaauggcagacuuguggauucuauugucuccuggagcaagaaaauccugcggacccaggaaucugagugugugugcauuaacgggacauguacgguggucaugaccgacggauccgcuagcggcaaggccgauacaaaaauccucuuuaucgaggaagggaagauuguucacaccuccacacugucuggaagcgcgcaacacguggaggaaugcuccugcuauccucgcuaccccggcgugagaugugucugccgggacaacuggaaggggagcaaucgcccuaucguggauauuaacaucaaagacuacucuauuguuuccagcuauguguguucuggacuugucggcgacacccccagaaagacggauagcuccucuagcucccauugccuggacccgaauaacgaggaaggcgggcacggagugaaaggcugggccuucgaugacgggaaugauguuuggaugggacggacaaucagcgagaagcuccgcucuggcuacgagaccuuuaaagugaucgaagggugguccaacccuaauagcaagcugcagauuaacagacaggucaucguggaccggggaaaucgcucuggcuauuccggcauuuucagcgucgaggggaaauccuguaucaacagaugcuuuuacguggaacugauucggggaagaaaucaggagaccgaaguucucuggacaucuaacagcaucguggucuucuguggcaccuccgggacauauggaacgggcucuuggcccgauggggcugagauuaaucugaugccuaucuga

SEQ ID NO: 214297 - RNA, 1413 nt, Artificial Sequence; identical to SEQ ID NO: 214290
  derived and/or modified CDS sequence (opt5) from neuraminidase__InfluenzaA__AFJ74766

SEQ ID NO: 214298 - RNA, 1410 nt, Artificial Sequence
  derived and/or modified CDS sequence (opt5) from neuraminidase__InfluenzaA__AFJ74767
augaaccccaaucagaagaucauuaccaucggcagcgugucccugacaauuucuacgaucugcuucuuuaugcaaauugccauccucaucaccacagucacccugcacuucaaacaguacgaguuuaacagcccuccgaauaaccagguuaugcuuugugaacccacaauuaucgagagaaauauuaccgaaaucguguaucugacaaacaccacgauugagaaggaaaucugcccuaaacucgcugaguaccggaauugguccaagccccaguguaacauuaccggguucgccccuuuuucuaaagacaauagcauccgccuguccgcgggaggcgauaucugggugacaagagagcccuaugucucuugcgacccugauaaguguuaccaauucgcucuugggcagggaaccacacugaacaaugugcauagcaacgacaccguucacgaucggacgccguaucgcacacuccugaugaaugaacugggcgugcccuuucaucucgggaccaagcaggucugcauugccugguccucuagcuccugucacgacggaaaagccuggcugcaugugugcguuacaggcgaugacgagaacgcuaccgccagcuucaucuacaauggcagacuuguggauucuauugucuccuggagcaagaaaauccugcggacccaggaaucugagugugugugcauuaacgggacauguacgguggucaugaccgacggauccgcuagcggcaaggccgauacaaaaauccucuuuaucgaggaagggaagauuguucacaccuccacacugucuggaagcgcgcaacacguggaggaaugcuccugcuauccucgcuaccccggcgugagaugugucugccgggacaacuggaaggggagcaaucgcccuaucguggauauuaacaucaaagacuacucuauuguuuccagcuauguguguucuggacuugucggcgacacccccagaaagaaugauagcuccucuagcucccauugccuggacccgaacaaugaggaaggcgggcacggagugaaaggcugggccuucgaugacgggaacgauguuuggaugggacggacgaucagcgagaagcuccgcucuggcuacgagacauuuaaagugaucgaagggugguccaauccuaacagcaagcugcagauuaauagacaggucaucguggaccggggaaaccgcucuggcuauuccggcauuuucagcgucgaggggaaauccuguaucaauagaugcuuuuacguggaacugauucggggaagaaaccaggagaccgaaguucucuggaccucuaauagcaucguggucuucuguggcacauccgggaccuauggaacaggcucuuggcccgauggggcugacauuaaccugaugccuaucuga

SEQ ID NO: 214299 - RNA, 1410 nt, Artificial Sequence; identical to SEQ ID NO: 214298
  derived and/or modified CDS sequence (opt5) from neuraminidase__InfluenzaA__AFJ74783

SEQ ID NO: 214300 - RNA, 1410 nt, Artificial Sequence; identical to SEQ ID NO: 206217
  derived and/or modified CDS sequence (opt5) from neuraminidase__InfluenzaA__AFJ74807

SEQ ID NO: 214301 - RNA, 1410 nt, Artificial Sequence; identical to SEQ ID NO: 206217
  derived and/or modified CDS sequence (opt5) from neuraminidase__InfluenzaA__AFJ74822

SEQ ID NO: 214302 - RNA, 1410 nt, Artificial Sequence; identical to SEQ ID NO: 206786
  derived and/or modified CDS sequence (opt5) from neuraminidase__InfluenzaA__AFJ74834

SEQ ID NO: 214303 - RNA, 1410 nt, Artificial Sequence; identical to SEQ ID NO: 206217
  derived and/or modified CDS sequence (opt5) from neuraminidase__InfluenzaA__AFJ74845

SEQ ID NO: 214304 - RNA, 1413 nt, Artificial Sequence
  derived and/or modified CDS sequence (opt5) from neuraminidase__InfluenzaA__AFJ75039
augaaccccaaucagaagaucauuaccaucggcagcauuuccaucgccauugggaucaucucucugaugcuccaaauuggaaacaucauuagcaucugggcuucccacucuauucagacaggcagccagaaucauacggggaucugcaaccagagaauuaucaccuacgagaauagcacaugggugaacaauaccuaugucaacaucaauaacacaucuguuguggccgaaaaagacaagaccagcgugacacuggcgggaaauuccagccuuuguucuauuuccggcugggcuaucuacaccaaagauaacagcauucggaucgggucuaagggagacgucuucgugauucgcgagccuuuuaucuccugcagccaccuggaauguagaacguucuuucucacccaaggcgcccugcuuaaugauaaacauucuaacggcacaguuaaggaccgguccccguaucgcgcccugaugagcugcccccucggggaggcuccuucccccuacaauucuaaguucgaaagcguggccugguccgcuagcgccugucacgauggaaugggcuggcugaccaucgggauuucuggaccugacaacggcgcggucgccgugcugaaauauaacgggaucauuacagagaccaucaaguccuggaaaaagcggauucucagaacgcaggagagcgaaugcguuuguaugaauggaucuugcuuuacaaucaugaccgauggccccagcaacggcggggcuuccuacaaaaucuucaagauugagaagggaaaagugacaaagucuaucgaacugaaugccccuaacuuucauuaugaggaguguagcugcuacccggacaccggcaccgucaugugugugugccgcgauaauuggcacggguccaacagacccugggugagcuucaaucagaaccuugacuaccagauuggauauaucugcucuggcgucuuuggggauaauccucggcccaaagacggagaaggcuccuguaacccuguuacaauugauggcgcugacggggugaagggauucagcuacaaauauggcaaugggguguggaucggacgcacgaagucuaacagacugcggaaaggcuuugagaugauuugggaccccaauggguggaccaacacagauuccgacuucagcgucaagcaagaugugguugccaucaccgacugguccggcuacucuggauccuuugugcagcacccggaacucacaggccuggauugcauccgcccuuguuucugggucgagcuugugagagggcugccccgggaaaauaccacgauuuggacauccggaucuagcaucuccuucugcggcguuaacagcgacaccgcgaacuggucuuggccugauggggccgagcuccccuuuaccauugacaaguga

SEQ ID NO: 214305 - RNA, 1410 nt, Artificial Sequence
  derived and/or modified CDS sequence (opt5) from neuraminidase__InfluenzaA__AFJ75050
augaaccccaaucagaagaucauuaccaucggcagcgugucccugacaauuucuacgaucugcuucuuuaugcaaauugccauccucaucaccacagucacccugcacuucaaacaguacgaguuuaacagcccuccgaauaaccagguuaugcuuugugaacccacaauuaucgagagaaauauuaccgaaaucguguaucugacaaacaccacgauugagaaggaaaucugcccuaaacucgcugaguaccggaauugguccaagccccaguguaacauuaccggguucgccccuuuuucuaaagacaauagcgugcgccuguccgcgggaggcgauaucugggucacaagagagcccuaugugucuugcgacccugauaaguguuaccaauucgcucuugggcagggaaccacacugaacaauguucauagcaacgacaccgugcacgaucggacgccguaucgcacacuccugaugaaugaacugggcguccccuuucaucucgggaccaaacaggugugcaucgccugguccucuagcuccugucacgacggaaaggccuggcugcauguuugcgugacaggcgaugacaagaacgcuaccgccagcuucauuuacaauggcagacuugucgauucuaucguguccuggagcaaagagauucugcggacccaggaaucugagugugugugcaucaacgggacauguacggucguuaugaccgacggauccgcuagcggcaaggccgauacaaaaauucucuuuaucguggaggggaagaucgugcacaccuccgcgcugucuggaagcgcccaacacgucgaagagugcuccugcuauccucgcuaccccggcgugagauguguuugccgggacaacuggaaggggagcaaucgcccuauuguggauaucaacauuaaagacuacucuaucgucuccagcuauguguguucuggacuuguuggcgacacacccagaaagaaugauagcuccucuagcucccauugccuggacccgaacaaugaagagggcgggcacggagugaaaggcugggcuuucgaugacgggaacgaugucuggaugggacggaccauuagcgaaaagcuccgcucuggcuacgagacguuuaaagugaucgaggggugguccaauccuaacagcaagcugcagaucaauagacaggucauuguggaccggggaaaccgcucuggcuauuccggcaucuucagcguugaagggaaauccuguauuaauagaugcuuuuacguggagcugauccggggaagaaaggaagagacagaaguccucuggaccucuaacagcauugugguuuucuguggcaccuccgggacauauggaaccggcucuuggcccgauggggccgacaucaaucugaugccuauuuga

SEQ ID NO: 214306 - RNA, 1410 nt, Artificial Sequence
  derived and/or modified CDS sequence (opt5) from neuraminidase__InfluenzaA__AFJ75094
augaaccccaaucagaagaucauuaccaucggcagcgugucccugacaauuucuacgaucugcuucuuuaugcaaauugccauccucaucaccacagucacccugcacuucaaacaguacgaguuuaacagcccuccgaauaaccagguuaugcuuugugaacccacaauuaucgagaagaauauuaccgaaaucguguaucugacaaacaccacgauugagaaagaaaucugcccuaagcucgcugaguacagaaauugguccaaaccccagugugacauuaccggguucgccccuuuuucuaaggauaacagcauccggcuguccgcgggaggcgacaucugggugacacgcgagcccuaugucucuugcgauccugacaaguguuaccaauucgcucuugggcagggaaccacacugaauaacgugcauagcaaugauaccguuagagaccggacgccguaucgcacacuccugaugaacgaacugggcgugcccuuucaccucgggaccaaacaggucugcauugccugguccucuagcuccugucaugauggaaaggccuggcugcacgugugcaucacaggcgacgauaaaaaugcuaccgccagcuucauuuacaacggcagacuuguugacucuaucguguccuggagcaaggagauucugcggacccaggaaucugagugugucugcaucaaugggacauguacgguggugaugaccgauggauccgcuagcggcaaagccgacacaaagauccucuuuauugaggaagggaagaucguccauaccuccacacugucuggaagcgcgcaacacguugaggaaugcuccugcuauccucgcuaccccggcgugagaugugugugccgggauaacuggaaagggagcaaccgcccuauugucgacaucaauauuaaggaccacucuaucguguccagcuacguuuguucuggacuugugggcgauacccccagaaagaacgacagcuccucuagcuccaauugccuggauccgaacaaugaggaaggcgggcauggagucaaaggcugggccuucgacgaugggaacgacguguggaugggacggacgaucagcgagaaaucucgccucggcuaugagacauuuaagguuauugaagggugguccaauccuaacagcaaacugcagaucaauagacaggugauugucgaucggggaaaccgcucuggcuacuccggcaucuucagcguggaggggaaguccuguauuaauagaugcuuuuaugucgaacugauccggggaagaaaggaggaaauugaggugcucuggaccucuaacagcaucguuguguucuguggcaccuccgggacauacggaaccggcucuuggcccgacggggcugauaucaauauuaugccuaucuga

SEQ ID NO: 214307 - RNA, 1413 nt, Artificial Sequence
  derived and/or modified CDS sequence (opt5) from neuraminidase__InfluenzaA__AFJ75104
augaaccccaaucagaagaucauuaccaucggcagcauuuccaucgccauugggaucaucucucugaugcuccaaauuggaaacaucauuagcaucugggcuucccacucuauucagacaggcagccagaaucauacggggaucugcaaccagagaauuaucaccuacgaaaauuccacaugggugaaccacaccuaugucaauaucaacaauacaaacguuguggccggaaaagacaagaccccugugacacuggcgggcaauucuagccuuuguuccauuagcgggugggcuauccauaccaaagauaacucuauucggaucggauccaagggcgacgucuucgugauucgcgagccguuuaucagcugcucucaccuggaguguaaaacguucuuucucacccaaggcgcccugcuuaaugauaagcauuccaacgggacaguuaaggacagaagccccuaccgggcccugaugucuugcccucucggagaagcucccuccccuuauaauagcaaauucgaguccguggccuggucugcuagcgccugucacgauggcaucggguggcugaccauuggaaucuccggccccgacaacggggcggucgccgugcugaaguacaacggaauuaucacaggcaccauuaaaagcuggaagaaacagauccuccgcacgcaggaaucugagugcguuuguaugaauggcuccugcuuuacaaucaugaccgaugggccuagcaacggagcugccucuuauaagauuuucaagaucgagaaaggcaaggugacaaaaagcauggaacugaaugcuccgaacuuucacuacgaggaauguuccugcuaucccgacaccgggaccgucaugugugugugcagagauaauuggcauggaucuaaccggccuugggugagcuucaaucagaaccuugacuaccaaauuggcuacaucugcuccggggucuuuggagauaauccccgcccugaggacggcgagggcagcuguaaccccguuacaguggauggggccaauggagugaagggcuucucuuauaaauacgggaacggagucuggauuggcagaacgaaguccaaucggauccgcaaaggguuugaaaugauuugggacccgaacggcuggaccaauacagacagcgauuucucugugaagcaggacaucguugcgaucaccgauugguccggauauagcggcuccuuugugcagcacccugagcugacagggcucgacugcauuagacccuguuucugggucgaacuggugcggggacuuccucgcgagaacaccacgaucuggacaucuggcagcuccauuucuuucugcgggguuaacagcgauaucgccaauugguccuggcccgacggagcugaacugcccuuuaccauugauaaguga

SEQ ID NO: 214308 - RNA, 1410 nt, Artificial Sequence; identical to SEQ ID NO: 207956
  derived and/or modified CDS sequence (opt5) from neuraminidase__InfluenzaA__AFJ75114

SEQ ID NO: 214309 - RNA, 1410 nt, Artificial Sequence; identical to SEQ ID NO: 207956
  derived and/or modified CDS sequence (opt5) from neuraminidase__InfluenzaA__AFJ75452

SEQ ID NO: 214310 - RNA, 1410 nt, Artificial Sequence; identical to SEQ ID NO: 207956
  derived and/or modified CDS sequence (opt5) from neuraminidase__InfluenzaA__AFJ75463

SEQ ID NO: 214311 - RNA, 1413 nt, Artificial Sequence; identical to SEQ ID NO: 214307
  derived and/or modified CDS sequence (opt5) from neuraminidase__InfluenzaA__AFJ75552

SEQ ID NO: 214312 - RNA, 1413 nt, Artificial Sequence
  derived and/or modified CDS sequence (opt5) from neuraminidase__InfluenzaA__AFJ75574
augaaccccaaucagaagaucauuaccaucggcagcauuuccaucgccauugggaucaucucucugaugcuccaaauuggaaacaucauuagcaucugggcuucccacucuauucagacaggcagccagaaucauacggggaucugcaaccagagaauuaucaccuacgaaaauuccacaugggugaaccacaccuaugucaauaucaacaauacaaacguuguggccggaaaagacaagaccccugugacacuggcgggcaauucuagccuuuguuccauuagcgggugggcuauccauaccaaagauaacucuauucggaucggauccaagggcgacgucuucgugauucgcgagccguuuaucagcugcucucaccuggaguguaaaacguucuuucucacccaaggcgcccugcuuaaugauaagcauuccaacgggacaguuaaggacagaagccccuaccgggcccugaugucuugcccucucggagaagcucccuccccuuauaauagcaaauucgaguccguggccuggucugcuagcgccugucacgauggcaucggguggcugaccauuggaaucuccggccccgacaacggggcggucgccgugcugaaguacaacggaauuaucacaggcaccauuaaaagcuggaagggccagauccuccgcacgcaggaaucugagugcguuuguaugaauggguccugcuuuacaaucaugaccgauggaccuagcaacggcgcugccucuuauaaaauuuucaagaucgagaaggggaaagugacaaagagcauggaacugaaugcuccgaacuuucacuacgaggaauguuccugcuaucccgacaccggaaccgucaugugugugugcagagauaauuggcauggcucuaaccggccuugggugagcuucaaucagaaccuugacuaccaaauuggguacaucugcuccggagucuuuggcgauaauccccgcccugaggacggcgaggggagcuguaaccccguuacaguggauggagccaauggcgugaaaggguucucuuauaaguacggaaacggcgucuggauugggagaacgaaauccaaucggauccgcaagggcuuugaaaugauuugggacccgaacggauggaccaauacagacagcgauuucucugugaaacaggacaucguugcgaucaccgauugguccggcuauagcggguccuuugugcagcacccugagcugacaggacucgacugcauuagacccuguuucugggucgaacuggugcggggccuuccucgcgagaacaccacgaucuggacaucugggagcuccauuucuuucugcggaguuaacagcgauaucgccaauugguccuggcccgacggcgcugaacugcccuuuaccauugauaaguga

SEQ ID NO: 214313 - RNA, 1410 nt, Artificial Sequence; identical to SEQ ID NO: 207956
  derived and/or modified CDS sequence (opt5) from neuraminidase__InfluenzaA__AFJ75585

SEQ ID NO: 214314 - RNA, 1410 nt, Artificial Sequence
  derived and/or modified CDS sequence (opt5) from neuraminidase__InfluenzaA__AFJ75596
augaaccccaaucagaagaucauuaccaucggcagcgugucccugacaauuucuacgaucugcuucuuuaugcaaaccgccauucucaucacaaccgucacacugcacuucaaacaguacgaguuuaacagcccuccgaauaaccagguuaugcuuugugaacccaccaucauugagagaaauaucacagaaauuguguaucugaccaacacgaccaucgagaaggaaauuugcccuaaacucgcugaguaccggaauugguccaagccccagugugggaucacaggauucgccccuuuuucuaaagacaacagcauucgccuguccgcgggcggggauaucugggugaccagagagcccuaugucucuugcgacccugauaaguguuaccaauucgcucuuggacagggcacaacccugaauaacgugcauagcaauaacacgguucgggaccgcacaccguauagaacccuccugaugaaugaacugggggugcccuuucaccucggaacaaagcaggucugcaucgccugguccucuagcuccugucaugauggcaaagccuggcugcacgugugcauuaccggcgacgauaagaacgcuaccgccagcuucaucuacaaugggcggcuuguugacucuauuguguccuggagcaaagagauccugcgcacacaggaaucugagugugucugcauuaacggaacguguaccguggugaugacagauggcuccgcuagcgggaaggccgacaccaaaauccucuuuaucgaggaaggaaagauuguccauacauccacccugucuggcagcgcgcaacacguugaggaaugcuccugcuauccuagauaccccggggugcggugugugugccgcgauaacuggaagggaagcaauagaccuaucgucgacauuaacaucaaagaucacucuauuguguccagcuacguuuguucuggccuugugggcgacacgccccggaagaaugacagcuccucuagcucccauugccuggauccgaacaaugaggaagggggacacggcgucaaagggugggccuucgacgauggaaacgacguguggaugggccgcacaaucagcgagaagucuagacucggguaugagaccuuuaaaguuaucgaaggaugguccaauccuaagagcaaacugcagauuaaccgccaggugaucgucgaucggggcaauagaucuggcuacuccgggauuuucagcguggagggaaaguccuguaucaaccggugcuuuuaugucgaacugauuagaggccgcaaggaggaaaccgaggugcucuggacaucuaauagcaucguuguguucugugggaccuccggaacauacggcacggggucuuggcccgacggcgcugauauuaaccugaugccuaucuga

SEQ ID NO: 214315 - RNA, 1410 nt, Artificial Sequence
  derived and/or modified CDS sequence (opt5) from neuraminidase__InfluenzaA__AFJ75607
augaaccccacccagaagaucauuacaaucggcagcgugucccugacgauuucuaccaucugcuucuuuaugcaaacagccauucucaucaccacagucacccugcacuucaaacaguacgaguuuaauagcccuccgaacaaucagguuaugcuuugugaacccacaaucauugagagaaacaucaccgaaauuguguaucugacgaauaccacaaucgagaaggaaauuugcccuaaacucgcugaguaccggaacugguccaagccccagugugacaucaccggguucgccccuuuuucuaaagauaauagcauucgccuguccgcgggaggcgacaucugggugacaagagagcccuaugucucuugcgauccugaaaaguguuaccaauucgcucuugggcagggaaccacgcugaacaaugugcauagcaacaauacaguucgggaccgcaccccguauagaacacuccugaugaacgagcugggcgugcccuuucaccucgggaccaagcaggucugcaucgccugguccucuagcuccugucaugauggaaaagccuggcugcacgugugcauuaccggcgacgauaagaaugcuacagccagcuucaucuacaacggccggcuuguugacucuauuguguccuggagcaaagaaauccugcgcacgcaggagucugagugugucugcauuaaugggaccuguacaguggugaugaccgauggauccgcuagcggcaaggccgacacaaaaauccucuuuaucgaagaggggaagauuguccauaccuccaagcugucuggaagcgcgcaacacguugaagagugcuccugcuauccuagauaccccggcgugcggugugugugccgcgauaacuggaaagggagcaacagaccuaucgucgacauuaauaucaaggaucacucuauuguguccagcuacguuuguucuggacuugugggcgacacgccccggaaaaacgacagcuccggcucuagccauugccuggauccgaauaacgaagaagggggacacggcgucaaggggugggccuucgacgauggaaaugacguguggaugggccgcacaaucuccgagaaaagcagacucggguaugagaccuuuaagguuaucgagggauggucuaacccuaaauccaagcugcagauuaaucgccaggugaucgucgaucggggcaacagaagcggcuacucugggauuuucuccguggaaggaaagagcuguaucaaucggugcuuuuaugucgagcugauuagaggccgcaaagaagagaccgaggugcucuggacauccaacucuaucguuguguucugugggaccagcggaacauacggcacgggguccuggcccgacggcgcugauauuaaucugaugccuaucuga

SEQ ID NO: 214316 - RNA, 1410 nt, Artificial Sequence
  derived and/or modified CDS sequence (opt5) from neuraminidase__InfluenzaA__AFJ75633
augaaccccaaucagaagaucauuaccaucggcagcgugucccugacaauuucuacgaucugcuucuuuaugcaaauugccauccucaucaccacagucacccugcacuucaaacaguacgaguuuaacagcccuccgaauaaccagguuaugcuuugugaacccacaauuaucgagagaaauauuaccgaaaucguguaucugacaaacaccacgauugagaaggaaaucugcccuaaacucgcugaguaccggaauugguccaagccccagugugacauuaccggguucgccccuuuuucuaaagauaacagcauccgccuguccgcgggaggcgacaucugggugacaagagagcccuaugucucuugcgauccugacaaguguuaccaauucgcucuugggcagggaaccacacugaauaacgugcauagcaaugauaccguucgggaccgcacgccguauagaacacuccugaugaacgaacugggcgugcccuuucaccucgggaccaagcaggucugcauugccugguccucuagcuccugucaugauggaaaagccuggcugcacgugugcaucacaggcgacgauaagaaugcuaccgccagcuucauuuacaacggccggcuuguugacucuguggucuccuggagcaaagauauccugcgcacccaggagucugaaugugugugcauuaaugggacauguacgguggucaugaccgacggauccgcuagcggcaaggccgauacaaaaauccucuuuaucgaggaggggaagauuguucauaccuccacacugucuggaagcgcgcaacacguggaagagugcuccugcuauccuagauaccccggcgugcggugugucugccgcgacaacuggaaggggagcaacagaccuaucguggacauuaauaucaaaaaccacucuauuguuuccagcuacguguguucuggacuugucggcgauacgccccggaagaaugacagcuccucuagcucccauugccuggauccgaacaaugaagagggcgggcacggagugaaaggcugggccuucgacgaugggaacgacguuuggaugggacgcaccaucagcgaaaagucuagacucggcuaugagacauuuaaagugaucgaggggugguccaauccuaagagcaaacugcagauuaaccggcaggucaucguggaucgcggaaauagaucuggcuacuccggcauuuucagcgucgaagggaaguccuguaucaaccggugcuuuuauguggagcugauuagaggacgcaaggaagagaccgaaguucucuggaccucuaauagcaucguggucuucuguggcacauccgggaccuacggaacaggcucuuggcccgacggggcugauauuaaccugaugccuaucuga

SEQ ID NO: 214317 - RNA, 1413 nt, Artificial Sequence; identical to SEQ ID NO: 209533
  derived and/or modified CDS sequence (opt5) from neuraminidase__InfluenzaA__AFJ75654

SEQ ID NO: 214318 - RNA, 1410 nt, Artificial Sequence; identical to SEQ ID NO: 207956
  derived and/or modified CDS sequence (opt5) from neuraminidase__InfluenzaA__AFJ75665

SEQ ID NO: 214319 - RNA, 1413 nt, Artificial Sequence
  derived and/or modified CDS sequence (opt5) from neuraminidase__InfluenzaA__AFJ75676
augaaccccaaucagaagaucauuaccaucggcagcauuuccaucgccauugggaucaucucucugaugcuccaaauuggaaacaucauuagcaucugggcuucccacucuauucagacaggcagccagaaucauacggggaucugcaaccagagaauuaucaccuacgaaaauuccacaugggugaaccacaccuaugucaauaucaacaauacaaacguuguggccggaaaagacaagaccccugugacacuggcgggcaauucuagccuuuguuccauuagcgggugggcuauccauaccaaagauaacucuauucggaucggauccaagggcgacgucuucgugauucgcgagccguuuaucagcugcucucaccuggaguguaaaacguucuuucucacccaaggcgcccugcuuaaugauaagcauuccaacgggacaguuaaggacagaagccccuaccgggcccugaugucuugcccucucggagaagcucccuccccuuauaauagcaaauucgaguccguggccuggucugcuagcgccugucacgauggcaucggguggcugaccauuggaaucuccggccccgacaacggggcggucgccgugcugaaguacaacggaauuaucacaggcaccauuaaaagcuggaagaaacagauccuccgcacgcaggaaucugagugcguuuguaugaauggcuccugcuuuacaaucaugaccgaugggccuagcaacggagcugccucuuauaagauuuucaagaucgagaaaggcaaggugacaaaaagcauggaacugaaugcuccgaacuuucacuacgaggaauguuccugcuaucccgacaccgggaccgucaugugugugugcagagauaauuggcauggaucuaaccggccuugggugagcuucaaucagaaccuugacuaccaaauuggcuacaucugcuccggggucuuuggagauaauccccgcccuaaggacggcgagggcagcuguaaccccguuacaguggauggggccaauggagugaaaggcuucucuuauaaguacgggaacggagucuggauuggcagaacgaaauccaaucggauccgcaagggguuugagaugauuugggacccgaacggcuggaccaauacagacagcgauuucucugugaagcaggacaucguugcgaucaccgauugguccggauauagcggcuccuuugugcagcacccugaacugacagggcucgacugcauuagacccuguuucugggucgagcuggugcggggacuuccucgcgaaaacaccacgaucuggacaucuggcagcuccauuucuuucugcgggguuaacagcgauaucgccaauugguccuggcccgacggagcugagcugcccuuuaccauugauaaauga

SEQ ID NO: 214320 - RNA, 1413 nt, Artificial Sequence; identical to SEQ ID NO: 209533
  derived and/or modified CDS sequence (opt5) from neuraminidase__InfluenzaA__AFJ75687

SEQ ID NO: 214321 - RNA, 1410 nt, Artificial Sequence; identical to SEQ ID NO: 208810
  derived and/or modified CDS sequence (opt5) from neuraminidase__InfluenzaA__AFJ76122

SEQ ID NO: 214322 - RNA, 1410 nt, Artificial Sequence; identical to SEQ ID NO: 213388
  derived and/or modified CDS sequence (opt5) from neuraminidase__InfluenzaA__AFJ76134

SEQ ID NO: 214323 - RNA, 1410 nt, Artificial Sequence; identical to SEQ ID NO: 208810
  derived and/or modified CDS sequence (opt5) from neuraminidase__InfluenzaA__AFJ76146

SEQ ID NO: 214324 - RNA, 1410 nt, Artificial Sequence; identical to SEQ ID NO: 208810
  derived and/or modified CDS sequence (opt5) from neuraminidase__InfluenzaA__AFJ76159

SEQ ID NO: 214325 - RNA, 1410 nt, Artificial Sequence; identical to SEQ ID NO: 208810
  derived and/or modified CDS sequence (opt5) from neuraminidase__InfluenzaA__AFJ76173

SEQ ID NO: 214326 - RNA, 1410 nt, Artificial Sequence; identical to SEQ ID NO: 208810
  derived and/or modified CDS sequence (opt5) from neuraminidase__InfluenzaA__AFJ76191

SEQ ID NO: 214327 - RNA, 1413 nt, Artificial Sequence
  derived and/or modified CDS sequence (opt5) from neuraminidase__InfluenzaA__AFJ76192
augaaccccaaucagaagaucauuaccaucggcagcauuuccaucgccauugggaucaucucucugauggugcaaauuggaaacaucauuagcaucugggcuucccacucuauucagacaggcauccagaauaacacggggauuugcaaucagagaaucaucaccuacgagaacagcacaugggucaaucauaccuauguuaacauuaauaacacaaaugugguggccggagaagacaaaaccuccgucacacucgcgggcaacucuagccuguguuccaucagcgggugggcuauuuacaccaaggauaauucuauccggauuggauccaaaggcgacguguucguuauccgcgagccuuuuaucagcugcucucaccuugaauguagaacguucuuucugacccaaggcgcccuccugaacgauaagcauuccaaugggacagugaaagaccggagcccguaucgcgcccuuaugucuugcccccugggagaggcuccuucccccuacaacagcaaguucgaauccgucgccuggucugcuagcgccugucacgauggcaugggguggcucaccauuggaaucuccggcccugacaacggggcgguggccguucugaaguauaauggaauuaucacaggcaccauuaaaagcuggaagaaacagauccugagaacgcaggagucugagugcguguguaugaacggcuccugcuuuacaaucaugaccgaugggcccagcaauaaggcugccucuuacaaaauuuucaagaucgaaaagggaaaagucacaaagagcauugagcucaacgcuccuaauuuuuauuacgaagaguguuccugcuacccggacaccggcaucgugaugugugugugccgggauaacuggcaugggucuaaucgccccugggucagcuucaaccagaaucuggacuaucaaauuggauacaucugcuccggcguuuuuggggauaacccuagacccgaggacggagaaggcagcuguaauccugugaccguggauggcgccaacggggucaaaggauucucuuauaaguacggcaaugggguguggauuggacggacaaaauccaaccgccuuagaaagggcuuugagaugaucugggaccccaauggguggacgaacaccgacagcgauuucucuguuaaacaggacguggucgcgaucacagauugguccggcuauagcggauccuuugugcagcacccggaacugaccggccucgacugcauucggccuuguuucuggguugagcuggugcgcgggcuucccagagaaaacacaaccaucuggacgucuggaagcuccauuucuuucugcggcgucaauagcgauacagccaacugguccuggccugacggggcugagcugcccuuuaccaucgauaaguga

SEQ ID NO: 214328 - RNA, 1410 nt, Artificial Sequence; identical to SEQ ID NO: 208810
  derived and/or modified CDS sequence (opt5) from neuraminidase__InfluenzaA__AFJ76206

SEQ ID NO: 214329 - RNA, 1410 nt, Artificial Sequence
  derived and/or modified CDS sequence (opt5) from neuraminidase__InfluenzaA__AFJ76216
augaaccccaaucagaagaucauuaccaucggcagcgugucccugacaauugccacgaucugcuuccucaugcaaauugcuauccuggucaccacaguuacccuucacuuuaaacagcaugaguguaacucuccuccgaauaaccaggugaugcugugcgaacccacaaucauuaagagaaauaucaccgagauuguguaccucacaaacaccacgaucgaaaaagagauuuguccuaagcuggccgaauaucggaauuggagcaaaccccagugcaacaucaccggguucgcgccuuuuuccaaggacaauucuauucgccuuagcgcuggaggcgauaucugggucacaagagagcccuacguguccugugacccugauaagugcuaucaauucgcccuggggcagggaaccacacucaacaauggccacucuaacgacaccguucaugaucggacgccguaccgcacacugcugaugaaugagcucggggugcccuuucaccugggaaccagacaggucuguaucgccuggagcuccagcucuugccaugacggcaaggcuuggcuucacguguguguuacaggcgaugacaaaaacgccaccgcuuccuucauuuauaaugggcggcugguggauagcaucggaucuugguccaaaaagauucuccgcacccaggaaagcgagugcgucuguaucaacggcacaugcacgguggugaugaccgacgggucugccuccggaaaagcggauacaaagauucuguuuaucgaagagggcaagaucguccacauuagcacccuuuccgggucugcccaacauguugaggaaugcagcuguuacccuagauaucccggagugcggugcgugugucgcgacaacuggaaaggcuccaauagaccuaucgucgauauuaacgugaaggacuacagcaucguuucuuccuacgugugcagcggccuggucggggacacaccccggaaaaaugauucuuucagcuccucucacugucucgacccgaacaaugaggaaggaggccauggggugaagggaugggcuuuugaugacggcaacgauguuuggauggggcgcaccauuagcgagaaacugagauccggauaugaaacguucaaggugaucgagggcuggagcaaaccuaauucuaagcugcagaucaaccggcaggucauuguggagcgcggcaauagauccggguacagcggaaucuuuucugucgaaggcaaguccugcauuaaccgguguuucuauguggagcucaucagagggcgcaaagaagagacagaaguuugguggaccagcaauuccauuguggucuuuugcggaaccucuggcacauacgggaccggcagcuggcccgacggagccgauaucaaccugaugccuauuuga

SEQ ID NO: 214330 - RNA, 1410 nt, Artificial Sequence
  derived and/or modified CDS sequence (opt5) from neuraminidase__InfluenzaA__AFJ77411
augaaccccaaucagaagaucauuaccaucggcagcgugucccugacaauugccacgaucugcuuccucaugcaaauugucauccugguuaccacagugacccuucacuuuaaacaguacgaguguaacucuccuccgaauaaccaggugaugcugugcgaacccacaaucauugagagaaauaucaccgaaauugucuaucucacaaacaccacgaucgagaaggaaauuuguccuaaacuggcugaguaccggaauuggagcaagccccagugcaaaaucaccggguucgccccuuuuuccaaggacaacucuauucgccuuagcgcgggaggcgauaucugggugacaagagagcccuauguuuccugugacccugggaagugcuaccaauucgcucugggacagggcaccacacucaauaaccggcauucuaaugauaccgugcacgaccgcacgccguauagaacacugcugaugaacgaacucgggguccccuuucaucugggaaccaaacagguguguaucgccuggagcuccagcucuugccacgauggcaaggccuggcuucauguuugugugacaggccacgacgagaaugcuaccgccuccuucauuuacgaugggcggcuggucgacagcaucggaucuugguccaaaaacauucuccgcacccaggaaagcgagugcguguguaucaauggcacaugcacgguggucaugaccgaugggucugcuuccgagagagccgacacaaagauucuguuuaucgaagagggaaaaaucguucacauuagcccucuuuccggcucugcgcaacauguggaagagugcagcuguuauccccgguacccuggggugcgcugcgucuguagagauaacuggaagggauccaaccggcccaucguggacauuaauguuaaggauuacagcaucgugucuuccuaugucugcagcggccuggugggcgacaccccgcgcaaaaacgacucuagcuccucuagcuacugucucaauccuaacaaugaagaagggggacacggcguuaaggggugggccuucgaugacggaaacgauguguggaugggcagaacaauuuccgagaaacugcggagcggguaugagaccuuuaaggucaucggaggcuggucuaaacccaauuccaagcugcagaucaaccgccaggugauugucgacagaggcaaucggagcggguacucuggaaucuucuccguggagggcaaaagcugcguuaacagauguuuuuauguggaacucauucgcgggcggaagcaggagacggaagucugguggacauccaauucuaucgugguuuucugcggaaccagcggcaccuacgggacaggcuccuggccugauggagcugacauuaaccugaugcccaucuga

SEQ ID NO: 214331 - RNA, 1410 nt, Artificial Sequence
  derived and/or modified CDS sequence (opt5) from neuraminidase__InfluenzaA__AFJ77422
augaaccccaaucagaagaucauuaccaucggcagcgugucccugacaauugccacgaucugcuuccucaugcaaauugcuauccuggucaucaccguuacacuucacuuuaaacaguacgaguguaacucuccuccgaauaaccaggugaugcugugcgaacccaccauuaucgagagaaauauuacagaaaucguguaucucaccaacacaaccauugagaaggaaaucuguccuaaacuggccgaguaccggaauuggagcaagccccagugcaaaauuacgggguucgcgccuuuuuccaaggacaacucuauccgccuuagcgcuggaggcgauaucugggucaccagagagcccuauguguccugugacccugauaagugcuaccaauucgcccuggggcagggaacaacccucaauaaccggcauucuaaugacacaguucacgaucgcaccccguauagaacgcugcugaugaacgaacucggcgugcccuuucaucuggggacaaaacaggucuguauugccuggagcuccagcucuugccacgacggaaaggcuuggcuucauguguguguuaccggccacgaugagaaugccacagcuuccuucaucuacgacggccggcugguggauagcauugggucuugguccaaaaagauccuccgcacccaggaaagcgagugcgucuguauuaacggaaccugcacaguggugaugacggacggcucugccuccgggagagcggauaccaaaauccuguuuaucgaggaaggaaagauuguccacaucagcccucuuuccggcucugcccaacauguugaggaaugcagcuguuauccccgguacuccggggugcgcugcguguguagagacaauuggaagggaagcaaccggccuauugucgauaucaacgugaaagacuacucuauuguuuccagcuucgugugcucuggccuggucggcgacacaccccgcaagaaugauagcuccucuagcucccacugucucaacccgaauaacgaggaagggggacauggcgugaaagggugggcuuuugacgauggaaaugacguuuggaugggcagaaccaucagcgagaagcugcggucuggguaugagacauucaaagugaucggaggcugguccaagccuaacagcaaacugcagauuaaucgccaggucaucguggauagaggcaaccggucuggguacuccggaauuuuuagcgucgaaggcaaguccugcaucaauagauguuucuauguggagcucauucgcgggcggaagcaggaaaccgagguuugguggacgucuaacagcaucguggucuuuugcggaacauccggcaccuacgggaccggcucuuggcccgacggagccgauauuaaucugaugccuaucuga

SEQ ID NO: 214332 - RNA, 1410 nt, Artificial Sequence
  derived and/or modified CDS sequence (opt5) from neuraminidase__InfluenzaA__AFJ77433
augaaccccaaucagaagaucauuaccaucggcagcgugucccugacaauugccacgaucugcuuccucaugcaaauugucauccugguuaccacagugacccuucacuuuaaacaguacgaguguaacucuccuccgaauaaccaggugaugcugugcgaacccacaaucauugagagaaauaucaccgaaauugucuaucucacaaacaccacgaucgagaaggaaauuuguccuaaacuggcugaguaccggaauuggagcaagccccagugcaaaaucaccggguucgccccuuuuuccaaggacaacucuauucgccuuagcgcgggaggcgauaucugggugacaagagagcccuauguuuccugugacccugggaagugcuaccaauucgcucugggacagggcaccacacucaauaaccggcauucuaaugauaccgugcacgaccgcacgccguauagaacacugcugaugaacgaacucgggguccccuuucaucugggaaccaaacagguguguaucgccuggagcuccagcucuugccacgauggcaaggccuggcuucauguuugugugacaggccacgacgagaaugcuaccgccuccuucauuuacgaugggcggcuggucgacagcaucggaucuugguccaaaaacauucuccgcacccaggaaagcgagugcguguguaucaauggcacaugcacgguggucaugaccgaugggucugcuuccgagagagccgacacaaagauucuguuuaucgaagagggaaaaaucguucacauuagcccucuuuccggcucugcgcaacauguggaagagugcagcuguuauccccgguacccuggggugcgcugcgucuguagagauaacuggaagggauccaaccggcccaucguggacauuaauguuaaggauuacagcaucgugucuuccuaugucugcagcggccuggugggcgacaccccgcgcaaaacagacucuagcuccucuagcgauugucucaacccuaauaacgaagaagggggacacggcguuaaggggugggccuucgacgauggaaaugacguguggaugggcagaaccauuuccgagaaacugcggagcggguacgagacguuuaaggucaucggaggcuggucuaaacccaacuccaagcugcagaucaaucgccaggugauugucgauagaggcaaccggagcggguauucuggaaucuucuccguggagggcaaaagcugcguuaauagauguuuuuacguggaacucauucgcgggcggaagcaggagacagaagucugguggaccuccaacucuaucgugguuuucugcggaaccagcggcacauaugggaccggcuccuggccugacggagcugauauuaaucugaugcccaucuga

SEQ ID NO: 214333 - RNA, 1410 nt, Artificial Sequence
  derived and/or modified CDS sequence (opt5) from neuraminidase__InfluenzaA__AFJ77443
augaaccccaaucagaagaucauuaccaucggcagcgugucccugacaauugccacgaucugcuuccucaugcaaauugcuauccuggucaucacccuuacacugcacuuuaaacaguacgaguguaacucuccuccgaauaaccagguuaugcucugcgaacccaccauuaucgagagaaauauuacagaaaucguguaucugaccaacacaaccauugagaaggaaaucuguccuaaacuugccgaguaccggaauuggagcaagccccagugcaaaauuacgggguucgcgccuuuuuccaaggacaacucuauccgccugagcgcuggaggcgauaucugggugaccagagagcccuaugucuccugugacccugggaagugcuaccaauucgcccucggacagggcacaacccugaauaaccggcauucuaaugauacagugcacgaccgcaccccguauagaacgcugcucaugaacgaacuggggguucccuuucaucuuggaacaaaacagguguguauugccuggagcuccagcucuugccacgauggcaaggcuuggcugcaugucugugugaccggccacaaugagaacgccacagcuuccuucaucuacgacgggcggcucguugauagcauuggaucuugguccaaaaauauccugcgcacccaggaaagcgagugcguguguauuaacggaaccugcacagucgugaugacggacgggucugccuccggcagagcggauaccaagauccuuuuuaucgaggaaggcaaaauugugcacaucagcccucuguccgggucugcccaacaugucgaggaaugcagcuguuauccccgguacccuggaguucgcugcguguguagagacaacuggaagggcuccaaucggcccauuguggauaucaacgucaaggacuucagcauugugucuuccuacguuugcagcggccucgugggggauacaccgcgcaaaaaugacucuagcuccucuagccacugucugaacccuaauaacgaggaaggaggcaauggggucaagggaugggcuuuugacgauggcaacgacguguggauggggagaaccaucuccgagaaacugcggagcggauaugagacauucaagguuaucggcggcuggucuaaacccaauuccaagcuccagauuaaccgccaggugaucgucgauagagggaaucggagcggauacucuggcaucuuuuccguggaagggaaaagcugcauuaacagauguuucuaugucgagcugauucgcggacggaagcaggaaaccgaggugugguggacguccaauucuaucguuguguuuugcggcacaagcgggaccuacggcaccggauccuggccugacggcgccgauauuaaccuuaugcccaucuga

SEQ ID NO: 214334 - RNA, 1410 nt, Artificial Sequence
  derived and/or modified CDS sequence (opt5) from neuraminidase__InfluenzaA__AFJ77465
augaaccccaaucagaagaucauuaccaucggcagcgugucccugacaauugccacgaucugcuuccucaugcaaauugcuauccuggucaccacaguuacccuucacuuuaaacaguacgaguguaacccuccgcccaauaaccaggugaugcugugcgaaccuacaaucauugagagaaauaucaccgaaauuguguaucucacaaacaccacgaucgagaaggaaauuugucccaaacuggccgaguaccggaauuggucuaagccucagugcaaaaucaccggguucgcgcccuuuagcaaggacaacuccauucgccuuucugcuggaggcgauaucugggucacaagagagccuuaugugagcugugacccggauaagugcuaccaauucgcccuggggcagggaaccacacucaauaaccggcauuccaaugacaccguucacgaucgcacgcccuauagaacacugcugaugaacgaacucggcgugccuuuucaucuggggaccaaacaggucuguaucgccuggucuagcuccagcugccacgacggaaaggcuuggcuucauguguguguuacaggccacgaugagaaugccaccgcuucuuucauuuacgacggccggcugguggauuccaucgggagcuggucuaaaaagauucuccgcacccaggaauccgagugcgucuguaucaacggaacaugcacgguggugaugaccgacggcagcgccucugggagagcggauacaaaaauucuguuuaucgaggaaggaaagaucguccacauuagcccccuuuccggcuccgcccaacauguugaggaaugcucuuguuauccucgguaccccggggugcgcugcguguguagagacaauuggaagggaagcaaccggccgaucgucgauauuaacgugaaaaauuacuccaucguuagcucuuaugugugcuccggccuggucggcgacaccccucgcaagaacgacagcucuagcuccucucacugucucaaucccaacaaugaggaagggggacauggcgugaaagggugggcuuucgaugacggaaacgauguuuggaugggcagaacaauuagcgagaagcugcgguccggguacgagaccuuuaaagugaucgaaggauggagcaagccuaauucuaaacugcagaucaaccgccaggucauuguggacagaggcaaucgguccggcuauagcgggaucuucucugucgagggaaaguccugcauuaacagauguuuuuacguggaacucauccgcggccggaagcaggagacggaaguuugguggacaagcaauuccauuguggucuucugcgggaccucuggaaccuauggcacagggagcuggcccgauggcgccgacaucaaccugaugcccauuuga

SEQ ID NO: 214335 - RNA, 1410 nt, Artificial Sequence
  derived and/or modified CDS sequence (opt5) from neuraminidase__InfluenzaA__AFJ77476
augaaccccaaucagaagaucauuaccaucggcagcguuucccugacaauugccacgaucugcuuccucaugcaaauugcuauccuggucaccacaguuacccuucacuuuaaacaguacgaguguaacucucugccuaauaaccaggugaugcucugcgaaccgacaaucauugagagaaauaucaccgaaauuguguaucugacaaacaccacgaucgagaaggaaauuugucccaaacuugccgaguaccggaauuggagcaagccucagugcaaaaucaccggguucgcgcccuuuuccaaggacaacucuauucgccugagcgcuggaggcgauaucugggucacaagagagccuuauguguccugugaccccgauaagugcuaccaauucgcccucgggcagggaaccacacugaauaaccggcauucuaaugacaccguucacgaucgcacgccuuauagaacacugcucaugaacgaacugggcgugccguuucaucuugggaccaaacaggucuguaucgccuggagcuccagcucuugccacgacggaaaggcuuggcugcauguguguguuacaggccacgaugagaaugccaccgcuuccuucauuuacggcgggcggcucguggacagcaucggaucuugguccaaaaagauucugcgcacccaggaaagcgagugcgucuguaucaacggcacaugcacgguggugaugaccgaugggucugccuccggcagagcggacacaaaaauucuuuuuaucgaggaaggaaagaucauucacaucagccaacuguccgggucugcccagcaugucgaggaaugcagcuguuauccccgguacccuggaguucgcugcguguguagagauaauuggaagggcuccaaccggcccauuguggacaucaacgucaaagauuacagcauugugucuuccuauguuugcagcggccucgugggggacaccccucgcaagaaugacucuagcuccucuagccacugucuggaucccaacaaugaggaaggaggccauggggucaaaggaugggcuuucgacgauggcaacgacguguggauggggagaacaaucuccgagaaguuucggagcggauacgagaccuucaaaguuaucgaaggcuggucuaagccuaauuccaaacugcagauuaaccgccagaucauuguggauagagacaaucggagcggcuauucugggaucuuuuccgucgagggaaagagcugcauuaacagauguuucuacguggaacucauccgcggccggaagcaagagacggaagucugguggacauccaauucuauugugguguuuugcgggaccagcggaaccuauggcacaggguccuggccggauggcgccgacaucaaccugaugcccaucuga

SEQ ID NO: 214336 - RNA, 1410 nt, Artificial Sequence; identical to SEQ ID NO: 206387
  derived and/or modified CDS sequence (opt5) from neuraminidase__InfluenzaA__AFJ77487

SEQ ID NO: 214337 - RNA, 1410 nt, Artificial Sequence
  derived and/or modified CDS sequence (opt5) from neuraminidase__InfluenzaA__AFJ77498
augaaccccaaucagaagaucauuaccaucggcagcgugucccugacaauugccacgaucugcuuccucaugcaaauugcuauccuggucaccacaguuacccuucacuuuaaacaguacgaguguaacucuccuccgaauaaccaggugaugcugugcgaacccacaaucauugagagaaauaucaccgaaauuguguaucucacaaacaccacgaucgagaaggaaauuuguccuaaacuggccgaguaccggaauuggagcaagccccagugcaaaaucaccggguucgcgccuuuuuccaaggacaacucuauucgccuuagcgcuggaggcgauaucugggucacaagagagcccuauguguccugugacccugauaagugcuaccaauucgcccuggggcagggaaccacacucaauaaccggcauucuaaugacaccguucacgaucgcacgccguauagaacacugcugaugaacgaacucggcgugcccuuucaucuggggaccaaacaggucuguaucgccuggagcuccagcucuugccacgacggaaaggcuuggcuucauguguguguuacaggccacgaugagaaugccaccgcuuccuucauuuacgacggccggcugguggauagcaucgggucuugguccaaaaagauucuccgcacccaggaaagcgagugcgucuguaucaacggaacaugcacgguggugaugaccgacggcucugccuccgggagagcggauacaaaaauucuguuuaucgaggaaggaaagaucguccacaccagcaaacuuuccggcucugcccaacauguugaggaaugcagcuguuauccucgguaccccggggugcgcugcguguguagagacaauuggaagggauccaaccggccuauugucgauaucaacgugaaggacuacagcauuaucucuuccuauguuugcagcggccuggugggcgacacaccccgcaaaaaugauucuagcuccucuagccacugucucgacccgaacaaugaggaagggggacauggcgucaaggggugggcuuucgaugacggaaacgauguguggaugggcagaaccauuuccgagaaaagccggucuggguacgagacguuuaagguuaucgaaggaugguccaaaccuaauagcaagcugcagaucaaccgccaggugauugucgagagaggcaauaugucuggcuauuccgggaucuucagcguggaaggaaaguccugcauuaaccgguguuuuuacgucgagcugaucagaggccgcaaacaggaaacagaggugugguggaccucuaauagcauuguuguguucugcgggaccuccggaacauauggcaccgggucuuggcccgacggcgccgauaucaaccucaugccuauuuga

SEQ ID NO: 214338 - RNA, 1410 nt, Artificial Sequence; identical to SEQ ID NO: 206387
  derived and/or modified CDS sequence (opt5) from neuraminidase__InfluenzaA__AFJ77509

SEQ ID NO: 214339 - RNA, 1410 nt, Artificial Sequence
  derived and/or modified CDS sequence (opt5) from neuraminidase__InfluenzaA__AFJ77520
augaaccccaaucagaagaucauuaccaucggcagcgugucccugacaauugccacgaucugcuuccucaugcaaauugcuauccuggucaccacaguuacccuucacuuuaaacaguacgaguguaacucuccuccgaauaaccaggugaugcugugcgaacccacaaucauugagagaaauaucaccgaaauuguguaucucacaaacaccacgaucgagaaggaaauuuguccuaaacuggccgaguaccggaauuggagcaagccccagugcaacaucaccggguucgcgccuuuuuccaaagacaauucuauucgccuuagcgcuggaggcgauaucugggucacaagagagcccuauguguccugugacccugauaagugcuaccaauucgcccuggggcagggaaccacacucaacaauggccauucuaacgacaccguucacgaucggacgccguaucgcacacugcugaugaaugaacucggggugcccuuucaucugggaaccaagcaggucuguaucgccuggagcuccagcucuugccacgacggcaaagccuggcuucauguguguguuacaggcgaugacgagaacgcuaccgcuuccuucauuuacaaugggagacugguggauagcaucggaucuugguccaagaaaauucuccggacccaggaaagcgagugcgucuguaucaacggcacaugcacgguggugaugaccgacgggucugccuccggaaaggcggauacaaaaauucuguuuaucgaggaaggcaagaucguccacaccagcucccuuucugggagcgcccaacacguugaggaaugcuccuguuauccucgcuaccccggagugagaugcgugugucgggacaacuggaagggcagcaaucgcccuauugucgauaucaacgugaaagacuacucuauuguuuccagcuaugugugcucuggccuggucggggacacacccagaaagaaugauagcuccucuagcucccauugucucgacccgaacaaugaggaaggaggccacggggugaaaggaugggcuuucgaugacggcaacgauguuuggauggggcggaccaucagcgagaagcugcgcucuggauacgagacguuuaaagugauugaaggcugguccaagccuaauagcaaacugcagaucaacagacaggucaucguggaccggggcaaucgcucuggguauuccggaauuuucagcgucgagggcaaguccugcaucaacagauguuuuuacguggaacucauucgggggagaaagcaggagaucgaaguucuguggacaucuaauagcauuguggucuucugcggaaccuccggcaccuaugggacaggcucuuggcccgauggagccgacaucaaccuuaugccuauuuga

SEQ ID NO: 214340 - RNA, 1410 nt, Artificial Sequence
  derived and/or modified CDS sequence (opt5) from neuraminidase__InfluenzaA__AFJ77531
augaaccccaaucagaagaucauuaccaucggcagcgugucccugacaauuacgaccaucugcuuccucaugcaaauugccauccuggucaucacaguuacccuucacuuuaaacagugugagugcaacucuccuccgaauaaccaggugaugcugugugaacccacaauuaucgagagaaauauuaccgaaaucguguaccucacaaacaccacgauugagaaggaaaucugcccuaaacuggcugaguaucggaauuggagcaagccccaguguaaagucaccggguucgccccuuuuuccaaggacaacucuauucgccuuagcgcgggaggcgauaucugggugacaagagagcccuacguuuccugcgacccugggaaguguuaucaauucgcucugggacagggcaccacacucaauaaccggcauucuaaugauaccgugcacgaccgcacgccguacagaacacugcugaugaacgaacucgggguccccuuucaucugggaaccaaacaggugugcaucgccuggagcuccagcucuugucacgauggcaaggccuggcuucauguuugcgugacaggccacaaugagaacgcuaccgccuccuucauuuaugacgggcggcuggucgauagcaucggaucuugguccaaaaauauucuccgcacccaggaaagcgagugugugugcaucaacggcacaugcacgguggucaugaccgacgggucugcuuccggcagagccgauacaaagauucuguuuaucgaggaaggaaaaaucguucacauuagcccucuuuccgggucugcgcaacauguggaggaauguagcugcuacccccgguauccuggagugcgcugugucugcagagacaacuggaagggcuccaaucggcccaucguggauauuaacguuaaggacuacagcaucgugucuuccuacgucuguagcggccuggugggggauaccccgcgcaaaaaugacucuagcuccucuagcuauugccucgacccuaacaaugaggaaggaggccacgggguuaagggaugggccuucgaugacggcaacgauguguggauggggagaacaauuuccgagaaacugcggagcggauacgagaccuuuaaggucaucggcggcuggucuaaacccaauuccaagcugcagaucaaccgccaggugauugucgacagagggaaucggagcggauauucuggcaucuucuccguggaagggaaaagcuguauuaacagaugcuuuuacguugagcucauccgcggacggaagcaggaaacggaggugugguggacauccaauucuauugucguguucuguggcaccagcgggaccuauggcacaggauccuggccugauggcgcugacaucaaccugaugcccauuuga

SEQ ID NO: 214341 - RNA, 1410 nt, Artificial Sequence
  derived and/or modified CDS sequence (opt5) from neuraminidase__InfluenzaA__AFJ77542
augaaccccaaucagaagaucauuaccaucggcagcgugucccugacaauuucuacgaucugcuuccucaugcaaauugccauccuggucaccacaguuacccuucacuuuaaacaguacgaguguaacagcccuccgaauaaccaggugaugcugugcgaacccacaaucauugagagaaauaucaccgaaauuguguaucucacaaacaccacgaucgagaaggaaauuuguccuaaacuggcugaguaccggaauugguccaagccccagugcaacaucaccggguucgccccuuuuucuaaagacaauagcauucgccuuuccgcgggaggcgauaucugggucacaagagagcccuaugugucuugugacccugauaagugcuaccaauucgcucuggggcagggaaccacacucaacaauggccauagcaacgacaccguucacgaucggacgccguaucgcacacugcugaugaaugaacucggggugcccuuucaucugggaaccaagcaggucuguaucgccugguccucuagcuccugccacgacggcaaagccuggcuucauguguguguuacaggcgaugacgagaacgcuaccgccagcuucauuuacaaugggagacugguggauucuaucggauccuggagcaagaaaauucuccggacccaggaaucugagugcgucuguaucaacggcacaugcacgguggugaugaccgacggguccgcuagcggaaaggccgauacaaaaauucuguuuaucgaggaaggcaagaucguccacaccuccacacuuucugggagcgcgcaacacguugaggaaugcuccuguuauccucgcuaccccggagugagaugcgugugucgggacaacuggaagggcagcaaucgcccuauugucgauaucaacauuaaagacuacucuaucguguccagcuauguuugcucuggccuggugggggacacccccagaaagaaugauagcuccucuagcucccauugucucgacccgaacaaugaggaaggaggccacggggucaaaggaugggccuucgaugacggcaacgauguguggauggggcggacgauuagcgagaagcugcgcucuggauacgagacauuuaaaguuaucgaaggcugguccaagccuaauagcaaacugcagaucaacagacaggugauugucgaccggggcaaucgcucuggguauuccggaaucuucagcguggagggcaaguccugcauuaacagauguuuuuacgucgaacucauccgggggagaaagcaggagaccgaagugcuguggaccucuaauagcauuguuguguucugcggaacauccggcaccuaugggacaggcucuuggcccgauggagcugacaucaaccuuaugccuauuuga

SEQ ID NO: 214342 - RNA, 1410 nt, Artificial Sequence; identical to SEQ ID NO: 206325
  derived and/or modified CDS sequence (opt5) from neuraminidase__InfluenzaA__AFJ77553

SEQ ID NO: 214343 - RNA, 1410 nt, Artificial Sequence
  derived and/or modified CDS sequence (opt5) from neuraminidase__InfluenzaA__AFJ77564
augaaccccaaucagaagaucauuaccaucggcagcgugucccugacaauugccacgaucugcuuccucaugcaaauugcuauccuggucaccacaguuacccuucacuuuaaacaguacgaguguaacucuccuccgaauaaccaggugaugcugugcgaacccacaaucauugagagaaauaucaccgaaauuguguaucucacaaacaccacgaucgagaaggaaauuuguccuaaacuggccgaguaccggaauuggagcaagccccagugcaaaaucaccggguucgcgccuuuuuccaaggacaacucuauucgccuuagcgcuggaggcgauaucugggucacaagagagcccuauguguccugugacccugauaagugcuaccaauucgcccuggggcagggaaccacacucaauaaccggcauucuaaugacaccguucacgaucgcacgccguauagaacacugcugaugaacgaacucggcgugcccuuucaucuggggaccaaacaggucuguaucgccuggagcuccagcucuugccacgacggaaaggcuuggcuucauguguguguuacaggccacgaugagaaugccaccgcuuccuucauuuacgacggccggcugguggauagcaucgggucuugguccaaaaagauucuccgcacccaggaaagcgagugcgucuguaucaacggaacaugcacgguggugaugaccgacggcucugccuccgggagagcggauacaaaaauucuguuuaucgaggaaggaaagaucguccacauuagccaacuuuccggcucugcccagcauguugaggaaugcagcuguuauccucgguaccccggggugcgcugcguguguagagacaauuggaagggauccaaccggccuaucgucgauauuaacgugaaagacuacagcaucguuucuuccuaugugugcagcggccuggucggcgacacaccccgcaagaaugauucuagcuccucuagccacugucucaacccgaauaacgaggaagggggacauggcgugaaagggugggcuuucgacgauggaaaugacguuuggaugggcagaaccauuuccgagaagcugcggagcggguacgagaccuuuaaagugaucgaaggauggucuaagccuaacuccaaacugcagaucaaucgccaggucauuguggauagaggcaaccggagcggcuauucugggaucuucuccgucgagggaaagagcugcauuaauagauguuuuuacguggaacucauccgcggccggaagcaagagaacgaaguuugguggacguccaauucuauuguggucuucugcgggacaagcggaaccuauggcaccggguccuggcccgacggcgccgauaucaaccugaugccuauuuga

SEQ ID NO: 214344 - RNA, 1329 nt, Artificial Sequence
  derived and/or modified CDS sequence (opt5) from neuraminidase__InfluenzaA__AFJ77575
augaaccccaaucagaagaucauuaccaucggcagcguuucccugacaauugccacgaucugcuuccucaugcaaauugcuauccuggucaucgagagaaacauuaccgaaaucguuuaccuuacaaauaccacaauugagaaagaaaucuguccuaagcuggccgaguaucggaacuggucuaaaccgcagugcaauauuaccggguuugcgcccuucagcaaggacaacuccauccgccucucugcuggaggcgauauuugggugacaagagaaccuuacgugagcugugaccccgauaaaugcuaucaguuugcccuggggcagggaaccacgcuuaauaacggccacuccaaugacaccguccaugaucggacaccuuaccgcacccugcucaugaacgagcugggggugcccuuccaccugggaacaaagcaaguuuguaucgccuggucuagcuccagcugccaugacggcaaggcuuggcuccacgugugugucaccggcgaugacgagaaugccacggcuucuuuuaucuauaacgggagacugguggauuccauuggaagcuggucuaaaaagauccuucggacacaggaauccgagugcguuuguauuaaugggaccugcacaguggucaugaccgacggcagcgccucuggaaaagcggauaccaagauccuguucauugaagagggcaaaaucgugcauacauccagccucuccgggucugcccagcacguggaggaauguagcugcuacccucgcuauccgggagucagaugcguuugucgggacaacuggaagggcuccaaucgccccaucguggauauuaacgugaaggacuacagcaucgucucuuccuacgugugcagcggccugguuggggacacgccucggaaaaacgauucuagcuccucuagccacugucuugaccccaauaacgaggaaggaggccauggggugaagggaugggcuuuugaugacggcaaugaugucuggauggggagaaccauuuccgagaaacugcgcagcggauaugaaacauucaaggugaucgagggcuggucuaaaccuaacuccaagcuccagauuaauagacaaguuaucguggaccggggcaaccgcagcggguacucuggaaucuuuuccgucgagggcaaaagcugcauuaauagauguuucuauguggaacugauccgggggagaaagcaggagaccgaaguccuguggacauccaacucuauugugguguuuugcggaaccagcggcacguacgggacaggcuccuggcccgauggagccgacaucaaucucaugccgauuuga

SEQ ID NO: 214345 - RNA, 1410 nt, Artificial Sequence
  derived and/or modified CDS sequence (opt5) from neuraminidase__InfluenzaA__AFJ77597
augaaccccaaucagaagaucauuaccaucggcagcgugucccugacaauugccacgaucugcuuccucaugcaaauugcuauccuggucaccacaguuacccuucacuuuaaacaguacgaguguaacucuccuccgaauaaccaggugaugcugugcgaacccacaaucauugagagaaauaucaccgaaauuguguaucucacaaacaccacgaucgagaaggaaauuuguccuaaacuggccgaguaccggaauuggagcaagccccagugcaacaucaccggguucgcgccuuuuuccaaagacaauucuauucgccuuagcgcuggaggcgauaucugggucacaagagagcccuauguguccugugacccugauaagugcuaccaauucgcccuggggcagggaaccacacucaacaauggccauucuaacgacaccguucacgaucggacgccguaucgcacacugcugaugaaugaacucggggugcccuuucaucugggaaccaagcaggucuguaucgccuggagcuccagcucuugccacgacggcaaagccuggcuucauguguguguuacaggcgaugacgagaacgcuaccgcuuccuucauuuacaaugggagacugguggauagcaucggaucuugguccaagaaaauucuccggacccaggaaagcgagugcgucuguaucaacggcacaugcacgguggugaugaccgacgggucugccuccggaaaggcggauacaaaaauucuguuuaucgaggaaggcaagaucguccacacccgcccucuuagcggguccgcccaacacguugaggaaugcucuuguuaucccagauacccuggagugcggugcgugugucgcgacaacuggaagggcagcaauagacccauugucgauaucaacgugaaagacuacuccauuguuagcucuuaugugugcuccggccuggucggggacacaccgcggaagaaugauagcucuagcuccucucauugucucgacccuaacaaugaggaaggaggccacggggugaaaggaugggcuuucgaugacggcaacgauguuuggauggggcgcaccaucagcgagaagcugagauccggauacgagacguuuaaagugauugaaggcuggagcaagcccaauucuaaacugcagaucaaccggcaggucaucguggaccgcggcaauagauccggguauagcggaauuuucucugucgagggcaaguccugcaucaaccgguguuuuuacguggaacucauuagagggcgcaagcaggagacagaaguucuguggaccagcaauuccaucguggucuucugcggaaccucuggcacauaugggaccggcagcuggccugauggagccgacauuaaccuuaugcccaucuga

SEQ ID NO: 214346 - RNA, 1410 nt, Artificial Sequence
  derived and/or modified CDS sequence (opt5) from neuraminidase__InfluenzaA__AFJ77608
augaaccccaaucagaagaucauuaccaucggcagcgugucccugacaauugccacgaucugcuuccucaugcaaaccgcuauucuggucacaaccguuacacuucacuuuaaacaguacgaguguaacucuccuccgaauaaccaggugaugcugugcgaacccaccaucaucgagagaaauaugacagaaauuguguaucucaccaacacgaccaucgagaaggaaauuuguccuaaacuggccgaguaccggaauuggagcaagccccagugcaacaucacaggguucgcgccuuuuuccaaagacaauucuauucgccuuagcgcuggaggcgaucugugggucaccagagagcccuauguguccugugacccugauaagugcuaccaauucgcccucgggcagggaacaacccugaacaauggccauucuaacgacacgguucacgaucggacaccguaucgcacccugcucaugaaugaacugggggugcccuuucaucuuggaacaaagcaggucuguaucgccuggagcuccagcucuugccacgacggcaaagccuggcugcauguguguguuaccggcgaugacgagaacgcuaccgcuuccuucauuuacaaugggagacucguggauagcaucggaucuugguccaagaaaauccugcggacacaggaaagcgagugcgucuguauuaacggcacgugcaccguggugaugacagacgggucugccuccggaaaggcggauaccaaaauccuuuuuauugaggaaggcaagaucguccacacaagcucccugucugggagcgcccaacacguugaggaaugcuccuguuauccucgcuaccccggagugagaugcgugugucgggacaacuggaagggcagcaaucgcccuauugucgauaucaacgugaaagacuacucuaucguuuccagcuaugugugcucuggccucgucggggacacccccagaaagaaugauagcuccucuagcucccauugucuggacccgaacaaugaggaaggaggccacggggugaaaggaugggcuuucgaugacggcaacgauguuuggauggggcggacgauuagcgagaagcugcgcucuggauacgagacauuuaaagugaucgaaggcugguccaagccuaauagcaaacuccagauuaacagacaggucaucguggaccggggcaaucgcucuggguauuccggaauuuucagcgucgagggcaaguccugcaucaacagauguuuuuacguggaacugauccgggggagaaagcaggagaccgaaguucuuuggaccucuaauagcauuguggucuucugcggaacauccggcaccuaugggacaggcucuuggcccgauggagccgacaucaaccugaugccuauuuga

SEQ ID NO: 214347 - RNA, 1410 nt, Artificial Sequence; identical to SEQ ID NO: 214345
  derived and/or modified CDS sequence (opt5) from neuraminidase__InfluenzaA__AFJ77619

SEQ ID NO: 214348 - RNA, 1410 nt, Artificial Sequence; identical to SEQ ID NO: 214345
  derived and/or modified CDS sequence (opt5) from neuraminidase__InfluenzaA__AFJ77630

SEQ ID NO: 214349 - RNA, 1410 nt, Artificial Sequence; identical to SEQ ID NO: 214341
  derived and/or modified CDS sequence (opt5) from neuraminidase__InfluenzaA__AFJ77641

SEQ ID NO: 214350 - RNA, 1410 nt, Artificial Sequence; identical to SEQ ID NO: 214341
  derived and/or modified CDS sequence (opt5) from neuraminidase__InfluenzaA__AFJ77652

SEQ ID NO: 214351 - RNA, 1410 nt, Artificial Sequence; identical to SEQ ID NO: 206112
  derived and/or modified CDS sequence (opt5) from neuraminidase__InfluenzaA__AFJ77663

SEQ ID NO: 214352 - RNA, 1410 nt, Artificial Sequence; identical to SEQ ID NO: 206112
  derived and/or modified CDS sequence (opt5) from neuraminidase__InfluenzaA__AFJ77674

SEQ ID NO: 214353 - RNA, 1410 nt, Artificial Sequence; identical to SEQ ID NO: 206112
  derived and/or modified CDS sequence (opt5) from neuraminidase__InfluenzaA__AFJ77685

SEQ ID NO: 214354 - RNA, 1410 nt, Artificial Sequence
  derived and/or modified CDS sequence (opt5) from neuraminidase__InfluenzaA__AFJ77696
augaaccccaaucagaagaucauuaccaucggcagcgugucccugacaauugccacgaucugcuuccucaugcaaauugcuauccuggucaccacaguuacccuucacuuuaaacaguacgaguguaacucuccuccgaauaaccaggugaugcugugcgaacccacaaucauugagagaaauaucaccgaaauuguguaucucacaaacaccacgaucgagaaggaaauuuguccuaaacuggccgaguaccggaauuggagcaagccccagugcaacaucaccggguucgcgccuuuuuccaaagacaauucuauucgccuuagcgcuggaggcgauaucugggucacaagagagcccuauguguccugugacccugauaagugcuaccaauucgcccuggggcagggaaccacacucaacaauggccauucuaacgacaccguucacgaucggacgccguaucgcacacugcugaugaaugaacucggggugcccuuucaucugggaaccaagcaggucuguaucgccuggagcuccagcucuugccacgacggcaaagccuggcuucauguguguguuacaggcgaugacgagaacgcuaccgcuuccuucauuuacaaugggagacugguggauagcaucggaucuugguccaagaaaauucuccggacccaggaaagcgagugcgucuguaucaacggcacaugcacgguggugaugaccgacgggucugccuccgagaaggcggauacaaaaauucuguuuaucgaagagggaaagaucguccacaccagccuucuguccggcucugcccaacacguugaagagugcagcuguuauccucgcuaccccggggugagaugcgugugucgggacaacuggaagggauccaaucgcccuauugucgauaucaacgugaaagacuacagcauuguuucuuccuaugugugcagcggccucgucggcgacacacccagaaagaaugauucuagcuccucuagccauugucuggacccgaacaaugaagaagggggacacggcgugaaagggugggcuuucgaugacggaaacgauguuuggaugggccggaccaucuccgagaagcugcgcagcggguacgagacguuuaaagugauugagggauggucuaagccuaauuccaaacuccagaucaacagacaggucaucguggaccggggcaaucgcagcggcuauucugggauuuucuccgucgaaggaaagagcugcaucaacagauguuuuuacguggagcugauucggggcagaaagcaggaaacagagguucuuuggaccuccaauucuaucguggucuucugcgggaccagcggaacauauggcaccggguccuggcccgauggcgccgacauuaaccugaugccuaucuga

SEQ ID NO: 214355 - RNA, 1410 nt, Artificial Sequence; identical to SEQ ID NO: 206112
  derived and/or modified CDS sequence (opt5) from neuraminidase__InfluenzaA__AFJ77707

SEQ ID NO: 214356 - RNA, 1410 nt, Artificial Sequence; identical to SEQ ID NO: 206133
  derived and/or modified CDS sequence (opt5) from neuraminidase__InfluenzaA__AFJ77718

SEQ ID NO: 214357 - RNA, 1410 nt, Artificial Sequence; identical to SEQ ID NO: 206133
  derived and/or modified CDS sequence (opt5) from neuraminidase__InfluenzaA__AFJ77729

SEQ ID NO: 214358 - RNA, 1410 nt, Artificial Sequence
  derived and/or modified CDS sequence (opt5) from neuraminidase__InfluenzaA__AFJ77740
augaaccccaaucagaagaucauuaccaucggcagcgugucccugacaauuucuacgaucugcuucuuuaugcaaauugccauccucaucaccacagucacccugcacuucaaacaguacgaguuuaacagcccuccgaauaaccagguuaugcuuugugaacccacaauuaucgagagaaauauuaccgaaaucguguaucugacaaacaccacgauugagaaggaaaucugcccuaaacucgcugaguaccggaauugguccaagccccaguguaacauuaccggguucgccccuuuuucuaaagacaauagcauccgccuguccgcgggaggcgauaucugggugacaagagagcccuaugucucuugcgacccugauaaguguuaccaauucgcucuugggcagggaaccacacugaacaaugugcauagcaacgacaccguucacgaucggacgccguaucgcacacuccugaugaaugaacugggcgugcccuuucaucucgggaccaagcaggucugcauugccugguccucuagcuccugucacgacggaaaagccuggcugcaugugugcguuacaggcgaugacgagaacgcuaccgccagcuucaucuacaauggcagacuuguggauucuauugucuccuggagcaagaaaauccugcggacccaggaaucugagugugugugcauuaacgggacauguaucguggucaugacggacggauccgcuagcggcaaggccgauaccaaaauccucuuuauugaggaagggaagaucguucacacauccacccugucuggaagcgcgcaacacguggaggaaugcuccugcuauccucgcuaccccggcgugagaugugucugccgggacaacuggaaggggagcaaucgcccuauuguggauaucaacauuaaagacuacucuaucguuuccagcuauguguguucuggacuugucggcgacacacccagaaagaaugauagcuccucuagcucccauugccuggacccgaacaaugaggaaggcgggcacggagugaaaggcugggccuucgaugacgggaacgauguuuggaugggacggaccaucagcgagaagcuccgcucuggcuacgagacguuuaaagugauugaagggugguccaauccuaacagcaagcugcagaucaauagacaggucauuguggaccggggaaaccgcucuggcuauuccggcaucuucagcgucgaggggaaauccuguauuaauagaugcuuuuacguggaacugauccggggaagaaagcaggagacagaaguucucuggaccucuaacagcauuguggucuucuguggcaccuccgggacauauggaaccggcucuuggcccgauggggcugacaucaaucugaugccuaucuga

SEQ ID NO: 214359 - RNA, 1410 nt, Artificial Sequence
  derived and/or modified CDS sequence (opt5) from neuraminidase__InfluenzaA__AFJ77751
augaaccccaaucagaagaucauuaccaucggcagcgugucccugacaauugccacgaucugcuuccucaugcaaauugcuauccuggucaccacaguuacccuucacuuuaaacagcaugaguguaacucuccuccgaauaaccaggugaugcugugcgaacccacaaucauugagagaaauaucaccgaaauuguguaccucacaaacaccacgaucgagaaggaaauuuguccuaaacuggccgaguaucggaauuggagcaagccccagugcaacaucaccggguucgcgccuuuuuccaaagacaauucuauucgccuuagcgcuggaggcgauaucugggucacaagagagcccuacguguccugugacccugauaagugcuaucaauucgcccuggggcagggaaccacacucaacaauggccacucuaacgacaccguucgggaucgcacgccguacagaacacugcugaugaaugaacucggggugcccuuucaucugggaacccggcaggucuguaucgccuggagcuccagcucuugccacgacggcaaggcuuggcuucauguguguguuacaggcgaugacaaaaacgccaccgcuuccuucauuuauaaugggcgccugguggauagcaucggaucuugguccaagaaaauucucagaacccaggagagcgaaugcgucuguaucaacggcacaugcacgguggugaugaccgacgggucugccuccggaaaggcggauacaaaaauucuguuuaucgaggagggcaagaucguccacauuagcacccuuuccgggucugcccaacacguugaagagugcagcuguuacccucgguaucccggagugcgcugcguguguagagacaacuggaagggcuccaaucggccuaucgucgauauuaacgugaaagacuacagcaucuucucuuccuacguuugcagcggccuggugggggacacaccccgcaagaaugauucuuuuagcuccucucauugucucgacccgaacaaugaagagggaggccacggggucaaaggaugggcuuucgaugacggcaacgauguguggauggggagaaccauuagcgaaaagcugcgguccggauaugagacguuuaaaguuaucgagggcuggagcaagccuaauucuaaacugcagaucaaccgccaggugauugucgaaagaggcaaucgguccggguacagcggaaucuucucuguggagggcaaguccugcauuaacagauguuuuuaugucgaacucauccgcgggcggaaggaggaaacagaggugugguggaccagcaauuccauuguuguguucugcggaaccucuggcacauacgggaccggcagcuggcccgacggagccgauaucaaccugaugccuauuuga

SEQ ID NO: 214360 - RNA, 1410 nt, Artificial Sequence; identical to SEQ ID NO: 206217
  derived and/or modified CDS sequence (opt5) from neuraminidase__InfluenzaA__AFJ77762

SEQ ID NO: 214361 - RNA, 1410 nt, Artificial Sequence; identical to SEQ ID NO: 206217
  derived and/or modified CDS sequence (opt5) from neuraminidase__InfluenzaA__AFJ77773

SEQ ID NO: 214362 - RNA, 1410 nt, Artificial Sequence; identical to SEQ ID NO: 206217
  derived and/or modified CDS sequence (opt5) from neuraminidase__InfluenzaA__AFJ77784

SEQ ID NO: 214363 - RNA, 1410 nt, Artificial Sequence; identical to SEQ ID NO: 206786
  derived and/or modified CDS sequence (opt5) from neuraminidase__InfluenzaA__AFJ77795

SEQ ID NO: 214364 - RNA, 1410 nt, Artificial Sequence; identical to SEQ ID NO: 206786
  derived and/or modified CDS sequence (opt5) from neuraminidase__InfluenzaA__AFJ77806

SEQ ID NO: 214365 - RNA, 1410 nt, Artificial Sequence; identical to SEQ ID NO: 206786
  derived and/or modified CDS sequence (opt5) from neuraminidase__InfluenzaA__AFJ77817

SEQ ID NO: 214366 - RNA, 1410 nt, Artificial Sequence; identical to SEQ ID NO: 206786
  derived and/or modified CDS sequence (opt5) from neuraminidase__InfluenzaA__AFJ77828

SEQ ID NO: 214367 - RNA, 1410 nt, Artificial Sequence
  derived and/or modified CDS sequence (opt5) from neuraminidase__InfluenzaA__AFJ77839
augaaccccaaucagaagaucauuaccaucggcagcgugucccugacaauuucuacgaucugcuucuuuaugcaaauugccauccucaucaccacagucacccugcacuucaaacaguacgaguuuaacagcccuccgaauaaccagguuaugcuuugugaacccacaauuaucgagagaaauauuaccgaaaucguguaucugacaaacaccacgauugagaaggaaaucugcccuaaacucgcugaguaccggaauugguccaagccccagugugacauuaccggguucgccccuuuuucuaaagauaacagcauccgccuguccgcgggaggcgacaucugggugacaagagagcccuaugucucuugcgauccugacaaguguuaccaauucgcucuugggcagggaaccacacugaauaacgugcauagcaaugauaccguucacgaccggacgccguaucgcacacuccugaugaacgaacugggcgugcccuuucaucucgggaccaagcaggucugcauugccugguccucuagcuccugucacgauggaaaagccuggcugcaugugugcguuacaggcgacgauaagaaugcuaccgccagcuucaucuacaacggcagacuuguggacucuauugucuccuggagcaaaaagauccugcggacccaggagucugaaugugugugcauuaaugggacauguacgguggucaugaccgauggauccgcuagcggcaaagccgacacaaagauccucuuuaucgaggaggggaagauuauccacaccuccacacugucuggaagcgcgcaacacguugaagagugcuccugcuauccucgcuaccccggcgugagaugugugugccgggauaacuggaaagggagcaaccgcccuauugucgacaucaauauuaaggacuacucuaucguguccagcuauguuuguucuggacuugugggcgauacccccagaaagaacgacagcuccucuagcucccauugccuggauccgaauaacgaagagggcgggcacggagucaaaggcugggccuucgacgaugggaaugacguguggaugggacggacgaucagcgaaaaacuccgcucuggcuacgagacauuuaagguuauugaggggugguccaacccuaauagcaaacugcagaucaacagacaggugauugucgaucggggaaaucgcucuggcuauuccggcaucuucagcguggaagggaaguccuguauuaacagaugcuuuuacgucgagcugauccggggaagaaaggaagagaccgaagugcucuggaccucuaauagcauuguuguguucuguggcacauccgggaccuauggaacaggcucuuggcccgacggggcugauaucaaccugaugccuaucuga

SEQ ID NO: 214368 - RNA, 1410 nt, Artificial Sequence
  derived and/or modified CDS sequence (opt5) from neuraminidase__InfluenzaA__AFJ77850
augaaccccaaucagaagaucauuaccaucggcagcgugucccugacaauuucuacgaucugcuucuuuaugcaaauugccauccucaucaccacagucacccugcacuucaaacaguacgaguuuaacagcccuccgaauaaccagguuaugcuuugugaacccacaauuaucgagagaaauauuaccgaaaucguguaucugacaaacaccacgauugagaaggaaaucugcccuaaacucgcuaaguaccggaauugguccaaaccccagugugacauuaccggguucgccccuuuuucuaaggauaacagcauccgccuguccgcgggaggcgacaucugggugacaagagagcccuaugucucuugcgauccugacaaguguuaccaauucgcucuugggcagggaaccacacugaauaacgugcauagcaaugauaccguucacgaccggacgccguaucgcacacuccugaugaacgagcugggcgugcccuuucaucucgggaccaaacaggucugcauugccugguccucuagcuccugucacgauggaaaggccuggcugcaugugugcguuacaggcgacgauaaaaaugcuaccgccagcuucaucuacaacggcagacuuguggacucuauugucuccuggagcaagaaaauccugcggacccaggaaucugagugugugugcauuaaugggacauguacgguggucaugaccgauggauccgcuagcggcaaggccgacacaaagauccucuuuaucgaagaggggaaaauuguucacaccuccacacugucuggaagcgcgcaacacguggaggaaugcuccugcuauccucgcuaccccggcgugagaugugucugccgggauaacuggaaggggagcaaccgcccuaucguggacauuaauaucaaagacuacucuauuguuuccagcuauguguguucuggacuugucggcgauacccccagaaagaacgacagcuccucuagcucccauugccuggauccgaauaacgaggaaggcgggcacggagugaaaggcugggccuucgacgaugggaaugacguuuggaugggacggacgaucagcgagaagcuccgcucuggcuacgaaacauuuaaagugaucgaggggugguccaacccuaauagcaagcugcagauuaacagacaggucaucguggaucggggaaaucgcucuggcuauuccggcauuuucagcgucgaggggaaguccuguaucaacagaugcuuuuacguggaacugauucggggaagaaaagaggaaaccgagguucucuggaccucuaauagcaucguggucuucuguggcacauccgggaccuauggaacaggcucuuggcccgacggggcugauauuaaccugaugccuaucuga

SEQ ID NO: 214369 - RNA, 1410 nt, Artificial Sequence; identical to SEQ ID NO: 206786
  derived and/or modified CDS sequence (opt5) from neuraminidase__InfluenzaA__AFJ77861

SEQ ID NO: 214370 - RNA, 1410 nt, Artificial Sequence; identical to SEQ ID NO: 206786
  derived and/or modified CDS sequence (opt5) from neuraminidase__InfluenzaA__AFJ77872

SEQ ID NO: 214371 - RNA, 1410 nt, Artificial Sequence; identical to SEQ ID NO: 207252
  derived and/or modified CDS sequence (opt5) from neuraminidase__InfluenzaA__AFJ77883

SEQ ID NO: 214372 - RNA, 1410 nt, Artificial Sequence; identical to SEQ ID NO: 206786
  derived and/or modified CDS sequence (opt5) from neuraminidase__InfluenzaA__AFJ77894

SEQ ID NO: 214373 - RNA, 1410 nt, Artificial Sequence; identical to SEQ ID NO: 206786
  derived and/or modified CDS sequence (opt5) from neuraminidase__InfluenzaA__AFJ77905

SEQ ID NO: 214374 - RNA, 1410 nt, Artificial Sequence
  derived and/or modified CDS sequence (opt5) from neuraminidase__InfluenzaA__AFJ77916
augaaccccaaucagaagaucauuaccaucggcagcgugucccugacaauuucuacgaucugcuucuuuaugcaaauugccauccucaucaccacagucacccugcacuucaaacaguacgaguuuaacagcccuccgaauaaccagguuaugcuuugugaacccacaauuaucgagagaaauauuaccgaaaucguguaucugacaaacaccacgauugagaaggaaaucugcccuaaacucgcugaguaccggaauugguccaagccccagugugacauuaccggguucgccccuuuuucuaaagauaacagcauccgccuguccgcgggaggcgacaucugggugacaagagagcccuaugucucuugcgauccugacaaguguuaccaauucgcucuugggcagggaaccacacugaauaacgugcauagcaaugauaccguucacgaccggacgccguaucgcacacuccugaugaacgaacugggcgugcccuuucaucucgggaccaagcaggucugcauugccugguccucuagcuccugucacgauggaaaagccuggcugcaugugugcguuacaggcgacgauaagaaugcuaccgccagcuucaucuacaacggcagacuuguggacucuauugucuccuggagcaaaaagauccugcggacccaggagucugaaugugugugcauuaaugggacauguacgguggucaugaccgauggauccgcuagcggcaaagccgacacaaagauccucuuuaucgaggaggggaagauuguucacaccuccacacugucuggaagcgcgcaacacguggaagagugcuccugcuauccucgcuaccccggcgugagaugugucugccgggauaacuggaaagggagcaaccgcccuaucguggacauuaauaucaaggacuacucuauuguuuccagcuauguguguucuggacuugucggcgauacccccagaaagaacgacagcuccucuagcucccauugccuggauccgaauaacgaagagggcgggcacggagugaaaggcugggccuucgacgaugggaaugacguuuggaugggacggacgaucagcgaaaaacuccgcucuggcuacgagacauuuaaggugaucgaggggugguccaacccuaauagcaaacugcagauuaacagacaggucaucguggaucggggaaaucgcucuggcuauuccggcauuuucagcgucgaagggaaguccuguaucaacagaugcuuuuacguggagcugauucggggaagaaaggaagagaccgaaguucucuggaccucuaauagcaucauuguguucuguggcacauccgggaccuauggaacaggcucuuggcccgacggggcugauaucaaccugaugccuaucuga

SEQ ID NO: 214375 - RNA, 1410 nt, Artificial Sequence; identical to SEQ ID NO: 206808
  derived and/or modified CDS sequence (opt5) from neuraminidase__InfluenzaA__AFJ77927

SEQ ID NO: 214376 - RNA, 1410 nt, Artificial Sequence; identical to SEQ ID NO: 206808
  derived and/or modified CDS sequence (opt5) from neuraminidase__InfluenzaA__AFJ77938

SEQ ID NO: 214377 - RNA, 1410 nt, Artificial Sequence; identical to SEQ ID NO: 206786
  derived and/or modified CDS sequence (opt5) from neuraminidase__InfluenzaA__AFJ77949

SEQ ID NO: 214378 - RNA, 1410 nt, Artificial Sequence; identical to SEQ ID NO: 206786
  derived and/or modified CDS sequence (opt5) from neuraminidase__InfluenzaA__AFJ77960

SEQ ID NO: 214379 - RNA, 1410 nt, Artificial Sequence
  derived and/or modified CDS sequence (opt5) from neuraminidase__InfluenzaA__AFJ77971
augaaccccaaucagaagaucauuaccaucggcagcgugucccugacaauuucuacgaucugcuucuuuaugcaaauugccauccucaucaccacagucacccugcacuucaaacaguacgaguuuaacagcccuccgaauaaccagguuaugcuuugugaacccacaauuaucgagagaaauauuaccgaaaucguguaucugacaaacaccacgauugagaaggaaaucugcccuaaacucgcugaguaccggaauugguccaagccccaguguaacauuaccggguucgccccuuuuucuaaagacaauagcauccgccuguccgcgggaggcgauaucugggugacaagagagcccuaugucucuugcgacccugauaaguguuaccaauucgcucuugggcagggaaccacacugaacaaugugcauagcaacgacaccguucacgaucggacgccguaucgcacacuccugaugaaugaacugggcgugcccuuucaucucgggaccaagcaggucugcauugccugguccucuagcuccugucacgacggaaaagccuggcugcaugugugcguuacaggcgaugacaagaacgcuaccgccagcuucaucuacaauggcagacuuguggauucuauugucuccuggagcaaagagauccugcggacccaggaaucugagugugugugcauuaacgggacauguacgguggucaugaccgacggauccgcuagcggcaaggccgauacaaaaauccucuuuaucgaggaagggaagauuguucacaccuccacacugucuggaagcgcgcaacacguggaggaaugcuccugcuauccucgcuaccccggcgugagaugugucugccgggacaacuggaaggggagcaaucgcccuaucguggauauuaacaucaaagacuacucuauuguuuccagcuauguguguucuggacuugucggcgacacccccagaaagaaugauagcuccucuagcucccauugccuggacccgaacaaugaggaaggcgggcacggagugaaaggcugggccuucgaugacgggaacgauguuuggaugggacggacgaucagcgagaagcuccgcucuggcuacgagacauuuaaagugaucgaagggugguccaauccuaacagcaagcugcagauuaauagacaggucaucguggaccggggaaaccgcucuggcuauuccggcauuuucagcgucgaggggaaauccuguaucaauagaugcuuuuacguggaacugauucggggaagaaaggaugagaccgaaguucucuggaccucuaacagcaucguggucuucuguggcacauccgggaccuauggaacaggcucuuggcccgacggggcugauauuaaucugaugccuaucuga

SEQ ID NO: 214380 - RNA, 1410 nt, Artificial Sequence
  derived and/or modified CDS sequence (opt5) from neuraminidase__InfluenzaA__AFJ77982
augaaccccaaucagaagaucauuaccaucggcuucgugagccugacaauuuccacgaucugcuuuuucaugcaaauugccauccucaucaccacagucccucugcacuuuaaacaguacgaguucaacucuccgcccaauaaccagguuaugcuuugugaaccuaccauuaucgagagaaauauuacagaaaucguguaucugaccaacacaaccauugagaaggaaaucugccccaaacucgcugaguaccggaauuggagcaagccucaguguaacauuacgggguuugcccccuucuccaaagacaauucuauccgccugagcgcgggaggcgauaucugggugaccagagagccuuaugucuccugcgacccggauaaguguuaccaauuugcucuugggcagggaacaacccugaacaaugugcauucuaacgacacaguucacgaucggacccccuaucgcacgcuccugaugaaugaacugggcgugccuuuccaucucgggacaaagcaggucugcauugccuggagcuccagcucuugucacgacggaaaagccuggcugcaugugugcguuaccggcgaugacaagaacgcuacagccuccuuuaucuacaauggcagacuuguggauagcauugucucuugguccaaagagauccugcggacccaggaaagcgagugugugugcauuaacgggaccuguacaguggucaugacggacggaucugcuuccggcaaggccgauaccaaaauccucuucaucgaggaagggaagauuguucacacaagcacccuguccggaucugcgcaacacguggaggaaugcagcugcuauccccgcuacccuggcgugagaugugucugccgggacaacuggaagggguccaaucgccccaucguggauauuaacaucaaagacuacagcauuguuucuuccuauguguguagcggaaucgucggcgacacaccgagaaagaaugauucuagcuccucuagccauugccuugacccuaacaaugaggaaggcgggcacggagugaaaggcugggccuuugaugacgggaacgauguuuggaugggacggaccaucuccgagaagcugcgcagcggcuacgagacguucaaagugauugaaggguggucuaaucccaacuccaagcuccagaucaauagacaggucauuguggaccggggaaaccgcagcggcuauucuggcaucuuuuccgucgaggggaaaagcuguauuaauagaugcuucuacguggaacugauccggggaagaaaggaggaaacagagguucuguggaccuccaacucuauuguggucuucuguggcaccagcgggacauauggaaccggcuccuggccugauggggcugacaucaaucucaugcccaucuga

SEQ ID NO: 214381 - RNA, 1410 nt, Artificial Sequence; identical to SEQ ID NO: 206784
  derived and/or modified CDS sequence (opt5) from neuraminidase__InfluenzaA__AFJ77993

SEQ ID NO: 214382 - RNA, 1410 nt, Artificial Sequence
  derived and/or modified CDS sequence (opt5) from neuraminidase__InfluenzaA__AFJ78004
augaaccccaaucagaagaucauuaccaucggcagcgugucccugacaauuucuacgaucugcuucuuuaugcaaauugccauccucaucaccacagucacccugcacuucaaacaguacgaguuuaacagcccuccgaauaaccagguuaugcuuugugaacccacaauuaucgagaagaauauuaccgaaaucguguaucugacaaacaccacgauugagaaagaaaucugcccuaagcucgcugaguacagaaauugguccaaaccccaguguaacauuaccggguucgccccuuuuucuaaggacaauagcauccggcuguccgcgggaggcgauaucugggugacacgcgagcccuaugucucuugcgacccugauaaguguuaccaauucgcucuugggcagggaaccacacugaacaaugugcauagcaacgacaccguucacgauagaacgccguaucggacacuccugaugaaugaacugggcgugcccuuucaucucgggaccaaacaggucugcauugccugguccucuagcuccugucacgacggaaaggccuggcugcaugugugcguuacaggcgaugacaaaaacgcuaccgccagcuucaucuacaauggccgccuuguggauucuauugucuccuggagcaaggagauccugagaacccaggaaucugagugugugugcauuaacgggacauguacgguggucaugaccgacggauccgcuagcggcaaagccgauacaaagauccucuuuaucgaggaagggaagauuguucacaccuccacacugucuggaagcgcgcaacacguggaggaaugcuccugcuauccucgguaccccggcgugcgcugugucugcagagacaacuggaaagggagcaaucggccuaucguggauauuaacaucaaggacuacucuauuguuuccagcuauguguguucuggacuugucggcgacacgccccgcaaaaaugauagcuccucuagcucccauugccuggacccgaacaaugaggaaggcgggcacggagugaagggcugggccuucgaugacgggaacgauguuuggaugggaagaaccaucagcgagaaacuccggucuggcuacgagacauuuaaggugaucgaagggugguccaauccuaacagcaaacugcagauuaaucgccaggucaucguggacagaggaaaccggucuggcuauuccggcauuuucagcgucgaggggaaguccuguaucaaucgcugcuuuuacguggaacugauuagaggacggaaggaggaaaccgagguucucuggaccucuaacagcaucguggucuucuguggcacauccgggaccuauggaacaggcucuuggcccgauggggcugacauuaaucugaugccuaucuga

SEQ ID NO: 214383 - RNA, 1410 nt, Artificial Sequence; identical to SEQ ID NO: 206784
  derived and/or modified CDS sequence (opt5) from neuraminidase__InfluenzaA__AFJ78015

SEQ ID NO: 214384 - RNA, 1410 nt, Artificial Sequence; identical to SEQ ID NO: 213641
  derived and/or modified CDS sequence (opt5) from neuraminidase__InfluenzaA__AFJ78026

SEQ ID NO: 214385 - RNA, 1410 nt, Artificial Sequence; identical to SEQ ID NO: 213641
  derived and/or modified CDS sequence (opt5) from neuraminidase__InfluenzaA__AFJ78037

SEQ ID NO: 214386 - RNA, 1410 nt, Artificial Sequence
  derived and/or modified CDS sequence (opt5) from neuraminidase__InfluenzaA__AFJ78048
augaaccccaaucagaagaucauuaccaucggcagcgugucccugacaauuucuacgaucugcuucuuuaugcaaauugccauccucaucaccacagucacccugcacuucaaacaguacgaguuuaacagcccuccgaauaaccagguuaugcuuugugaacccacaauuaucgagagaaauauuaccgaaaucguguaucugacaaacaccacgauugagaaggaaaucugcccuaaacucgcugaguaccggaauugguccaagccccaguguaacauuaccggguucgccccuuuuucuaaagacaauagcauccgccuguccgcgggaggcgauaucugggugacaagagagcccuaugucucuugcgacccugauaaguguuaccaauucgcucuugggcagggaaccacacugaacaaugugcauagcaacgacaccguucacgaucggacgccguaucgcacacuccugaugaaugaacugggcgugcccuuucaucucgggaccaagcaggucugcauugccugguccucuagcuccugucacgacggaaaagccuggcugcaugugugcguuacaggcgaugacaagaacgcuaccgccagcuucaucuacaauggcagacuuguggauucuauugucuccuggagcaaagagauccugcggacccaggaaucugagugugugugcauuaacgggacauguacgguggucaugaccgacggaaacgcuuccggcaaggccgauacaaaaauccucuuuaucgaggaagggaagauuguucacaccagcacacuguccggaucugcgcaacacguggaggaaugcagcugcuauccucgcuaccccggcgugagaugugucugccgggacaauuggaagggguccaaccgcccuaucguggauauuaauaucaaagacuacagcauuguuucuuccuauguguguagcggacuugucggcgacacccccagaaagaacgauucuagcuccucuagccauugccuggacccgaauaacgaggaaggcgggcacggagugaaaggcugggccuucgaugacgggaaugauguuuggaugggacggacgaucuccgagaagcuccgcagcggcuacgagacauuuaaagugaucgaaggguggucuaacccuaauuccaagcugcagauuaacagacaggucaucguggaccggggaaaucgcagcggcuauucuggcauuuucuccgucgaggggaaaagcuguaucaacagaugcuuuuacguggaacugauucggggaagaaaggaggaaaccgagguucucuggaccuccaauucuaucguggucuucuguggcacaagcgggaccuauggaacaggcuccuggcccgauggggcugacauuaaccugaugccuaucuga

SEQ ID NO: 214387 - RNA, 1410 nt, Artificial Sequence
  derived and/or modified CDS sequence (opt5) from neuraminidase__InfluenzaA__AFJ78059
augaaccccaaucagaagaucauuaccaucggcagcgugucccugacaauuucuacgaucugcuucuuuaugcaaauugccauccucaucaccacagucacccugcacuucaaacaguacgaguuuaacccuccgcccaauaaccagguuaugcuuugugaaccuacaauuaucgagagaaauauuaccgaaaucguguaucugacaaacaccacgauugagaaggaaaucugccccaaacucgcugaguaccggaauuggagcaagccucaguguaacauuaccggguucgcccccuuuuccaaagacaauucuauccgccugagcgcgggaggcgauaucugggugacaagagagccuuaugucuccugcgacccggauaaguguuaccaauucgcucuugggcagggaaccacacugaacaaugugcauucuaacgacaccguucacgaucggacgcccuaucgcacacuccugaugaaugaacugggcgugccuuuucaucucgggaccaagcaggucugcauugccuggagcuccagcucuugucacgacggaaaagccuggcugcaugugugcguuacaggcgaugacaagaacgcuaccgccuccuucaucuacaauggcagacuuguggauagcauugucucuugguccaaagagauccugcggacccaggaaagcgagugugugugcauuaacgggacauguacgguggucaugaccgacggaucugcuuccggcaaggccgauacaaaaauccucuuuaucgaggaagggaagauuguucacaccagcacacuguccggaucugcgcaacacguggaggaaugcagcugcuauccccgcuacccuggcgugagaugugucugccgggacaacuggaagggguccaaucgccccaucguggauauuaacaucaaagacuacagcauuguuucuuccuauguguguagcggacuugucggcgacaccccgagaaagaaugauucuagcuccucuagccauugccuggacccuaacaaugaggaaggcgggcacggagugaaaggcugggccuucgaugacgggaacgauguuuggaugggacggacgaucuccgagaagcuccgcagcggcuacgagacauuuaaagugaucgaaggguggucuaaucccaacuccaagcugcagauuaauagacaggucaucguggaccggggaaaccgcagcggcuauucuggcauuuucuccgucgaggggaaaagcuguaucaauagaugcuuuuacguggaacugauucggggaagaaaggaugagaccgaaguucucuggaccuccaacucuaucguggucuucuguggcacaagcgggaccuauggaacaggcuccuggccugacggggcugauauuaaucugaugcccaucuga

SEQ ID NO: 214388 - RNA, 1410 nt, Artificial Sequence
  derived and/or modified CDS sequence (opt5) from neuraminidase__InfluenzaA__AFJ78070
augaaccccaaucagaagaucauuaccaucggcagcgugucccugacaauuucuacgaucugcuucuuuaugcaaauugccauccucaucaccacagucacccugcacuucaaacaguacgaguuuaacagcccuccgaauaaccagguuaugcuuugugaacccacaauuaucgagagaaauauuaccgaaaucguguaucugacaaacaccacgauugagaaggaaaucugcccuaaacucgcugaguaccggaagugguccaaaccccaguguaauauuaccggguucgccccuuuuucuaaggacaacagcauccgccuguccgcgggaggcgauaucugggugacaagagagcccuaugucucuugcgacccugauaaguguuaccaauucgcucuugggcagggaaccacacugaauaacgugcauagcaaugacaccguucgggaucgcacgccguauagaacacuccugaugaacgaacugggcgugcccuuucaccucgggaccaaacaggucugcauugccugguccucuagcuccugucaugacggaaaggccuggcugcacgugugcguuacaggcgaugacaaaaaugcuaccgccagcuucaucuacaacggccggcuuguggauucuauugucuccuggagcaaggagauccugcgcacccaggaaucugagugugugugcauuaaugggacauguacgguggucaugaccgacggauccgcuagcggcaaagccgauacaaagauccucuuuaucgaggaagggaagauuguucauaccuccacacugucuggaagcgcgcaacacguggaggaaugcuccugcuauccuagauaccccggcgugcggugugucugccgcgacaacuggaaagggagcaacagaccuaucguggauauuaauaucaaggacuacucuauuguuuccagcuauguguguucuggacuugucggcgacacgccccggaaaaacgauagcuccucuagcggccacugccuggacccgaauaacgaggaagggggacauggcgugaaggggugggccuucgaugacggaaaugauguuuggaugggccgcaccaucuccgagaaaagcagaucuggguacgagacauuuaaggugaucgaaggaugguccaacccuaauagcaaacuccagauuaaccggcaggucaucguggaccgcggcaauagaucuggcuauuccgggauuuucagcgucgagggaaaguccuguaucaaccggugcuuuuacguggaacugauuagaggccgcaaggaggaaaccgagguucuguggaccucuaauagcaucguggucuucugugggacauccggaaccuauggcacagggucuuggcccgauggcgcugacauuaaccucaugccuaucuga

SEQ ID NO: 214389 - RNA, 1410 nt, Artificial Sequence
  derived and/or modified CDS sequence (opt5) from neuraminidase__InfluenzaA__AFJ78081
augaaccccaaucagaagaucauuaccaucggcagcgugucccugacaauuucuacgaucugcuucuuuaugcaaauugccauccucaucaccacagucacccugcacuucaaacaguacgaguuuaacagcccuccgaauaaccagguuaugcuuugugaacccacaauuaucgagagaaauauuaccgaaaucguguaucugacaaacaccacgauugagaaggaaaucugcccuaaacucgcugaguaccggaauugguccaagccccagugugacauuaccggguucgccccuuuuucuaaagauaacagcauccgccuguccgcgggaggcgacaucugggugacaagagagcccuaugucucuugcgauccugacaaguguuaccaauucgcucuugggcagggaaccacacugaauaacgugcauagcaaugauaccguucgggaccgcacgccguauagaacacuccugaugaacgaacugggcgugcccuuucaccucgggaccaagcaggucugcauugccugguccagcagcuccugucaugauggaaaagccuggcugcacgugugcaucacaggcgacgauaagaaugcuaccgccagcuucauuuacaacggccggcuuguugacucuaucguguccuggagcaaagagauucugcgcacccaggaaucugagugugucugcaucaaugggacauguacgguggugaugaccgauggauccgcuagcggcaaggccgacacaaaaauccucuuuauugaggaagggaagaucguccauaccuccacacugucuggaagcgcgcaacacguugaggaaugcuccugcuauccuagauaccccggcgugcggugugugugccgcgauaacuggaaggggagcaacagaccuauugucgacaucaauauuaaagaccacucuaucguguccagcuacguuuguucuggacuugugggcgauacgccccggaagaacgacaauagcuccucuagccauugccuggauccgaacaaugaggaaggcgggcacggagucaaaggcugggccuucgacgaugggaacgacguguggaugggacgcaccaucuccgagaagucuagacucggcuaugagacauuuaaaguuauugaaggguggucuaauccuaacuccaagcugcagaugaaucgccaggugaucgucgaucggggaaacagaagcggcuacucuggcauuuucuccguggaggggaaaagcuguaucaaucggugcuuuuaugucgaacugauuagaggacgcaaggaggaaaccgaggugcucuggaccuccaacucuaucguuguguucuguggcacaagcgggaccuacggaacaggcuccuggcccgacggggcugauauuaaucugaugccuaucuga

SEQ ID NO: 214390 - RNA, 1410 nt, Artificial Sequence; identical to SEQ ID NO: 214306
  derived and/or modified CDS sequence (opt5) from neuraminidase__InfluenzaA__AFJ78092

SEQ ID NO: 214391 - RNA, 1410 nt, Artificial Sequence
  derived and/or modified CDS sequence (opt5) from neuraminidase__InfluenzaA__AFJ78103
augaaccccaaucagaagaucauuaccaucggcagcgugucccugacaauuucuacgaucugcuucuuuaugcaaauugccauccucaucaccacagucacccugcacuucaaacaguacgaguuuaacagcccuccgaauaaccagguuaugcuuugugaacccacaauuaucgagagaaauauuaccgaaaucguguaucugacaaacaccacgauugagaaggaaaucugcccuaaacucgcugaguaccggaauugguccaagccccagugugacauuaccggguucgccccuuuuucuaaagauaacagcauccgccuguccgcgggaggcgacaucugggugacaagagagcccuaugucucuugcgauccugacaaguguuaccaauucgcucuugggcagggaaccacacugaauaacgugcauagcaaugauaccguucgggaccgcacgccguauagaacacuccugaugaacgaacugggcgugcccuuucaccucgggaccaagcaggucugcauugccugguccucuagcuccugucaugauggaaaagccuggcugcacgugugcaucacaggcgacgauaagaaugcuaccgccagcuucauuuacaacggccggcuuguugacucuaucguguccuggagcaaagagauucugcgcacccaggaaucugagugugucugcaucaaugggacauguacgguggugaugaccgauggauccgcuagcggcaaggccgacacaaaaauccucuuuauugaggaagggaagaucguccauaccuccacacugcuuggaucugcgcaacacguugaggaaugcagcugcuauccuagauaccccggcgugcggugugugugccgcgauaacuggaagggguccaacagaccuauugucgacaucaauauuaaagaccacagcaucgugucuuccuacguuuguagcggacuggugggcgauacgccccggaagaacgacucuagcuccucuggccauugccucgauccgaauaacgaggaagggggacacggcgucaaagggugggccuucgacgauggaaaugacguguggaugggccgcaccaucagcgagaaguccagacugggguaugagacauuuaaaguuauugaaggauggagcaacccuucuuccaagcugcagaucaaucgccaggugauugucgaucggggcaacagaagcggcuacucugggaucuucuccguggagggaaaaagcuguauuaaucggugcuuuuaugucgaacucaucagaggccgcaaggaggaaaccgaggugcuguggaccuccaacucuauuguuguguucugugggacaagcggaaccuacggcacaggguccuggcccgacggcgcugauaucaaucuuaugccuaucuga

SEQ ID NO: 214392 - RNA, 1410 nt, Artificial Sequence
  derived and/or modified CDS sequence (opt5) from neuraminidase__InfluenzaA__AFJ78114
augaaccccaaucagaagaucauuaccaucggcagcgugucccugacaauuucuacgaucugcuucuuuaugcaaauugccauccucaucaccacagucacccugcacuucaaacaguacgagcuuaacagcccuccgaauaaccagguuaugcugugugaacccacaauuaucgagagaaauauuaccgaaaucguguaucucacaaacaccacgauugagaaggaaaucugcccuaaacuggcugaguaccggaauugguccaagccccagugugacauuaccggguuugccccuuucucuaaagauaacagcauccgccuuuccgcgggaggcgacaucugggugacaagagagcccuaugucucuugcgauccugacaaguguuaccaauuugcucuggggcagggaaccacacucaauaacgugcauagcaaugauaccguucgggaccgcacgccguauagaacacugcugaugaacgaacucggcgugcccuuccaccuggggaccaagcaggucugcauugccugguccucuagcuccugucaugauggaaaagccuggcuucacgugugcaucacaggcgacgauaagaaugcuaccgccagcuuuauuuacaacggccggcugguugacucuaucguguccuggagcaaagagauucuccgcacccaggaaucugagugugucugcaucaaugggacauguacgguggugaugaccgauggauccgcuagcggcaaggccgacacaaaaauccuguucauugaggaagggaagaucguccauaccuccacacuuucuggaagcgcgcaacacguugaggaaugcuccugcuauccuagauaccccggcgugcggugugugugccgcgauaacuggaaggggagcaacagaccuauugucgacaucaauauuaaagaccacucuaucguguccagcuacguuuguucuggacuggugggcgauacgccccggaagaacgacagcuccucuagcucccauugccucgauccgaauaacgaggaaggcgggcacggagucaaaggcugggccuuugacgaugggaaugacguguggaugggacgcaccaucagcgagaagucuagacugggcuaugagacauucaaaguuauugaagggugguccaacccuaauagcaagcugcagaucaaccgccaggugauugucgaucggucuaauagauccggauacagcggcaucuuuuccguggagggcaaaucuuguauuaaccggugcuucuaugucgaacucaucagagggcgcaaggaggaaaccgaggugcuguggaccagcaauuccauuguuguguuuuguggaacaucuggcaccuacgggacaggaagcuggcccgacggcgcugauaucaaccuuaugccuaucuga

SEQ ID NO: 214393 - RNA, 1410 nt, Artificial Sequence
  derived and/or modified CDS sequence (opt5) from neuraminidase__InfluenzaA__AFJ78125
augaaccccaaucagaagaucauuaccaucggcagcgugucccugacaauuucuacgaucugcuucuuuaugcaaauugccauccucaucaccacagucacccugcacuucaaacaguacgaguuuaacagcccuccgaauaaccagguuaugcuuugugaacccacaauuaucgagagaaauauuaccgaaaucguguaucugacaaacaccacgauugagaaggaaaugugcccuaaacucgcugaguaccggaauugguccaagccccagugugacaucaccggguucgccccuuuuucuaaagauaacagcauucgccuguccgcgggaggcgacaucugggugacaagagagcccuaugucucuugcgauccugacaaguguuaccaauucgcucuugggcagggaaccacacugaauaacgugcauagcaaugauaccguucgggaccgcacgccguauagaacacuccugaugaacgaacugggcgugcccuuucaccucgggaccaagcaggucugcaucgccugguccucuagcuccugucaugauggaaaagccuggcugcacgugugcauuacaggcgacgauaagaaugcuaccgccagcuucaucuacaacggccggcuuguugacucuauuguguccuggagcaaagagauccugcgcacccaggaaucugagugugucugcauuaaugggacauguacgguggugaugaccgauggauccgcuagcggcaaggccgacacaaaaauccucuuuaucgaggaagggaagauuguccauaccuccacacugucuggaagcgcgcaacacguugaggaaugcuccugcuauccuagauaccccggcgugcggugugugugccgcgauaacuggaaggggagcaacagaccuaucgucgacauuaauaucaaagaccacucuauuguguccagcuacguuuguucuggacuugugggcgauacgccccggaagaacgacagcuccucuagcucccauugccuggauccgaauaacgaggaaggcgggcacggagucaaaggcugggccuucgacgaugggaaugacguguggaugggacgcaccaucagcgagaagucuagacucggcuaugagacauuuaaaguuaucgaagggugguccaacccuaauagcaagcugcagaugaaccgccaggugauugucgaucggggaaauagaucuggcuacuccggcaucuucagcguggaggggaaauccuguauuaaccggugcuuuuaugucgaacugaucagaggacgcaaggaggaaaccgaggugcucuggaccucuaauagcauuguuguguucuguggcacauccgggaccuacggaacaggcucuuggcccgacggggcugauaucaaccugaugccuauuuga

SEQ ID NO: 214394 - RNA, 1410 nt, Artificial Sequence
  derived and/or modified CDS sequence (opt5) from neuraminidase__InfluenzaA__AFJ78136
augaaccccaaucagaagaucauuaccaucggcagcgugucccugacaauuucuacgaucugcuucuuuaugcaaaccgccauucucaucacaaccgucacacugcacuucaaacaguacgaguuuaacagcccuccgaauaaccagguuaugcuuugugaacccaccaucauugagagaaauaucacagaaauuguguaucugaccaacacgaccaucgagaaggaaauuugcccuaaacucgcugaguaccggaauugguccaagccccagugugacaucacaggguucgccccuuuuucuaaagauaacagcauucgccuguccgcgggaggcgacaucugggugaccagagagcccuaugucucuugcgauccugacaaguguuaccaauucgcucuugggcagggaacaacccugaauaacgugcauagcaauaacacgguucgggaucgcacaccguauagaacccuccugaugaaugaacugggcgugcccuuucaccucgggacaaagcaggucugcaucgccugguccucuagcuccugucaugacggaaaagccuggcugcacgugugcauuaccggcgaugacaagaacgcuaccgccagcuucaucuacaauggccggcuuguugauucuauuguguccuggagcaaagagauccugcgcacacaggaaucugagugugucugcauuaacgggacguguaccguggugaugacagacggauccgcuagcggcaaggccgauaccaaaauccucuuuaucgaggaagggaagauuguccauacauccacccugucuggaagcgcgcaacacguugaggaaugcuccugcuauccuagauaccccggcgugcggugugugugccgcgacaacuggaaggggagcaauagaccuaucgucgauauuaacaucaaagaccacucuauuguguccagcuacguuuguucuggacuugugggcgacacgccccggaagaaugauagcuccucuagcucccauugccuggacccgaacaaugaggaaggcgggcacggagucaaaggcugggccuucgaugacgggaacgauguguggaugggacgcacaaucagcgagaagucuagacucggcuaugagaccuuuaaaguuaucgaagggugguccaauccuaagagcaaacugcagauuaaccgccaggugaucgucgaccggggaaauagaucuggcuacuccggcauuuucagcguggaggggaaguccuguaucaaccggugcuuuuaugucgaacugauuagaggacgcaaggaggaaaccgaggugcucuggacaucuaauagcaucguuguguucuguggcaccuccgggacauacggaacgggcucuuggcccgauggggcugacauuaaccugaugccuaucuga

SEQ ID NO: 214395 - RNA, 1410 nt, Artificial Sequence; identical to SEQ ID NO: 214394
  derived and/or modified CDS sequence (opt5) from neuraminidase__InfluenzaA__AFJ78147

SEQ ID NO: 214396 - RNA, 1410 nt, Artificial Sequence; identical to SEQ ID NO: 214394
  derived and/or modified CDS sequence (opt5) from neuraminidase__InfluenzaA__AFJ78158

SEQ ID NO: 214397 - RNA, 1410 nt, Artificial Sequence; identical to SEQ ID NO: 207956
  derived and/or modified CDS sequence (opt5) from neuraminidase__InfluenzaA__AFJ78169

SEQ ID NO: 214398 - RNA, 1410 nt, Artificial Sequence; identical to SEQ ID NO: 208474
  derived and/or modified CDS sequence (opt5) from neuraminidase__InfluenzaA__AFJ78180

SEQ ID NO: 214399 - RNA, 1410 nt, Artificial Sequence; identical to SEQ ID NO: 207956
  derived and/or modified CDS sequence (opt5) from neuraminidase__InfluenzaA__AFJ78191

SEQ ID NO: 214400 - RNA, 1410 nt, Artificial Sequence
  derived and/or modified CDS sequence (opt5) from neuraminidase__InfluenzaA__AFJ78202
augaaccccaaucagaagaucauuaccaucggcagcgugucccugacaauuucuacgaucugcuucuuuaugcaaaccgccauucucaucacaaccgucacacugcacuucaaacaguacgaguuuaacagcccuccgaauaaccagguuaugcuuugugaacccaccaucauugagagaaauaucacagaaauuguguaucugaucaacaccacgauugagaaggaaaucugcccuaaacucgcugaguaccggaauugguccaagccccagugugacauuaccggguucgccccuuuuucuaaagauaacagcauccgccuguccgcgggaggcgacaucugggugacaagagagcccuaugucucuugcgauccugacaaguguuaccaauucgcucuugggcagggaaccacacugaauaacgugcauagcaauaacaccguucgggaucgcacgccguauagaacacuccugaugaaugaacugggcgugcccuuucaccucgggaccaagcaggucugcauugccugguccagcagcuccugucaugacggaaaagccuggcugcacgugugcaucacaggcgaugacaagaacgcuaccgccagcuucauuuacaauggccggcuuguugauucuaucguguccuggagcaaagagauucugcgcacccaggaaucugagugugucugcaucaacgggacauguacgguggugaugaccgacggauccgcuagcggcaaggccgauacaaaaauccucuuuauugaggaagggaagaucguccauaccuccacacugucuggaggcgcgcaacacguugaggaaugcagcugcuauccuagauaccccggggugcggugugugugccgcgacaacuggaagggauccaauagaccuauugucgauaucaacauuaaagaccacagcaucgugucuuccuacguuuguagcggccuugugggcgacacgccccggaagaaugauucuagcuccucuagccauugccuggacccgaacaaugaggaagggggacacggcgucaaagggugggccuucgaugacggaaacgauguguggaugggccgcaccaucuccgagaagucuagacucggguaugagacauuuaaaguuauugaaggauggucuaauccuaaguccaaacugcagaucaaccgccaggugauugucgaccggggcaauagaagcggcuacucugggaucuucuccguggagggaaagagcuguauuaaccggugcuuuuaugucgaacugaucagaggccgcaaggaggaaaccgaggugcucuggaccuccaauucuauuguuguguucugugggacaagcggaaccuacggcacaggguccuggcccgauggcgcugacaucucucugaugccuaucuga

SEQ ID NO: 214401 - RNA, 1410 nt, Artificial Sequence
  derived and/or modified CDS sequence (opt5) from neuraminidase__InfluenzaA__AFJ78213
augaaccccaaucagaagaucauuaccaucggcagcgugucccugacaauuucuacgaucugcuucuuuaugcaaauugccauccucaucaccacagucacccugcacuucaaacaguacgaguuuaacagcccuccgaauaaccagguuaugcuuugugaacccacaauuaucgagagaaauauuaccgaaaucguguaucugacaaacaccacgauugagaaggaaaucugcccuaaacucgcugaguaccggaauugguccaagccccagugugacauuaccggguucgccccuuuuucuaaagauaacagcauccgccuguccgcgggaggcgacaucugggugacaagagagcccuaugucucuugcgauccugacaaguguuaccaauucgcucuugggcagggaaccacacugaauaacgugcauagcaaugauaccguucgggaccgcacgccguauagaacacuccugaugaacgaacugggcgugcccuuucaccucgggaccaagcaggucugcauugccugguccucuagcuccugucaugauggaaaagccuggcugcacgugugcaucacaggcgacgauaagaaugcuaccgccagcuucauuuacaacggccggcuuguugacucuaucguguccuggagcaaagagauucugcgcacccaggaaucugagugugucugcaucaaugggacauguacgguggugaugaccgauggauccgcuagcggcaaggccgacacaaaaauccucuuuauugaggaagggaagaucguccauaccuccacacugucuggaagcgcgcaacacguugaggaaugcuccugcuauccuagauaccccggcgugcggugugugugccgcgauaacuggaaggggagcaacagaccuauugucgacaucaauauuaaagaccacucuaucguguccagcuacguuuguucuggacuugugggcgauacgccccggaagaacgacagcuccucuagcucccauugccuggauccgaauaacgaggaaggcgggcacggagucaaaggcugggccuucgacgaugggaaugacguguggaugggacgcaccaucagcgagaagucuagacucggcuaugagacauuuaaaguuauugaagggugguccaacccuaagagcaaacugcagaucaaucgccaggugauugucgaucggggaaacagaucuggcuacuccggcaucuucagcguggaggggaaguccuguauuaaucggugcuuuuaugucgaacugaucagaggacgcaaggaggaaaccgaggugcucuggaccucuaacagcauuguuguguucuguggcacauccgggaccuacggaacaggcucuuggcccgacggggcugauaucaaucugaugcuuaucuga

SEQ ID NO: 214402 - RNA, 1410 nt, Artificial Sequence; identical to SEQ ID NO: 207956
  derived and/or modified CDS sequence (opt5) from neuraminidase__InfluenzaA__AFJ78224

SEQ ID NO: 214403 - RNA, 1410 nt, Artificial Sequence; identical to SEQ ID NO: 207956
  derived and/or modified CDS sequence (opt5) from neuraminidase__InfluenzaA__AFJ78235

SEQ ID NO: 214404 - RNA, 1410 nt, Artificial Sequence
  derived and/or modified CDS sequence (opt5) from neuraminidase__InfluenzaA__AFJ78246
augaaccccaaucagaagaucauuaccaucggcagcgugucccugacaauuucuacgaucugcuucuuuaugcaaauugccauccucaucaccacagucacccugcacuucaaacaguacgaguuuaacagcccuccgaauaaccaggcuaugcuuugugaacccacaauuaucgagagaaauauuaccgaaaucguuuaucugacaaacaccacgauugagaaggaaaucugcccuaaacucgccgaguaccggaauugguccaagccccagugugacauuaccggguucgcgccuuuuucuaaagauaacagcauccgccuguccgcuggaggcgacaucugggugacaagagagcccuaugugucuugcgauccugacaaguguuaccaauucgcccuugggcagggaaccacacugaauaacguccauagcaaugauaccgugcgggaccgcacgccguauagaacacuccugaugaacgaacugggcguucccuuucaccucgggaccaaacaggugugcauugccugguccucuagcuccugucaugauggaaaggcuuggcugcacgucugcaucacaggcgacgauaagaaugccaccgcuagcuucauuuacaacggccggcuuguggacucuaucguuuccuggagcaaagagauucugcgcacccaggaaucugagugugugugcaucaaugggacauguacggucgugaugaccgauggauccgccagcggcaaggcggacacaaaaauccucuuuauugaggaagggaagaucgugcauaccuccacacugucuggaagcgcccaacacgucgaggaaugcuccugcuauccuagauaccccggcguucggugugugugccgcgauaacuggaaggggagcaacagaccuauuguggacaucaauauuaaagaccacucuaucgucuccagcuacguguguucuggacuuguuggcgauacgccccggaagaacgacagcuccucuagcucccauugccuggauccgaauaacgaggaaggcgggcacggagugaaaggcugggcuuucgacgaugggaaugacgucuggaugggacgcaccaucagcgagaagucuagacucggcuaugagacauuuaaagugauugaagggugguccaacccuaagagcaaacugcagaucaaucggcagguuauuguggaucgcggaaacagaucuggcuacuccggcaucuucagcgucgaggggaaguccuguauuaaucggugcuuuuauguggaacugaucagaggacgcaaggaggaaaccgagguccucuggaccucuaacagcauugugguuuucuguggcacauccgggaccuacggaacaggcucuuggcccgacggggccgauaucaaucugaugccuaucuga

SEQ ID NO: 214405 - RNA, 1410 nt, Artificial Sequence
  derived and/or modified CDS sequence (opt5) from neuraminidase__InfluenzaA__AFJ78268
augaaccccaaucagaagaucauuaccaucggcagcgugucccugacaauuucuacgaucugcuucuuuaugcaaaccgccauucucaucacaaccgucacacugcacuucaaacaguacgaguuuaacagcccuccgaauaaccagguuaugcuuugugaacccaccaucauugagagaaauaucacagaaauuguguaucugaccaacacgaccaucgagaaggaaauuugcccuaaacucgcugaguaccggaauugguccaagccccagugugacaucacaggguucgccccuuuuucuaaagauaacagcauucgccuguccgcgggaggcgacaucugggugaccagagagcccuaugucucuugcgauccugacaaguguuaccaauucgcucuugggcagggaacaacccugaauaacgugcauagcaauaacacgguucgggaucgcacaccguauagaacccuccugaugaaugaacugggcgugcccuuucaccucgggacaaagcaggucugcaucgccugguccucuagcuccugucaugacggaaaagccuggcugcacgugugcauuaccggcgaugacaagaacgcuaccgccagcuucaucuacaauggccggcuuguugauucuauuguguccuggagcaaagagauccugcgcacacaggaaucugagugugucugcauuaacgggacguguaccguggugaugacagacggauccgcuagcggcaaggccgauaccaaaauccucuuuaucgaggaagggaagauuguccauacauccaagcugucuggaagcgcgcaacacguugaggaaugcuccugcuauccuagauaccccggcgugcggugugugugccgcgacaacuggaaagggagcaauagaccuaucgucgauauuaacaugaaggaccacucuaucguguccagcuacguuuguucuggacuugugggcgacacgccccggaaaaaugauagcuccucuagcucccauugccuggacccgaacaaugaggaaggcgggcacggagucaagggcugggccuucgaugacgggaacgauguguggaugggacgcaccauuagcgagaaaucuagacucggcuaugagacauuuaagguuaucgaagggugguccaauccuaaaagcaagcugcagaucaaccgccaggugauugucgaccggggaaauagaucuggcuacuccggcaucuucagcguggaggggaaguccuguauuaaccggugcuuuuaugucgaacugaucagaggacgcaaagaggaaaccgaggugcucuggaccucuaauagcauuguuguguucuguggcacauccgggaccuacggaacaggcucuuggcccgauggggcugacaucaaccugaugccuauuuga

SEQ ID NO: 214406 - RNA, 1410 nt, Artificial Sequence
  derived and/or modified CDS sequence (opt5) from neuraminidase__InfluenzaA__AFJ78279
augaaccccaaucagaagaucauuaccaucggcagcgugucccugacaauuucuacgaucugcuucuuuaugcaaaccgccauucucaucacaaccgucacacugcacuucaaacaguacgaguuuaacagcccuccgaauaaccagguuaugcuuugugaacccaccaucauugagagaaauaucacagaaauuguguaucugaucaacaccacgauugagaaggaaaucugcccuaaacucgcugaguaccggaauugguccaagccccagugugacauuaccggguucgccccuuuuucuaaagauaacagcauccgccuguccgcgggaggcgacaucugggugacaagagagcccuaugucucuugcgauccugacaaguguuaccaauucgcucuugggcagggaaccacacugaauaacgugcauagcaauaacaccguucgggaucgcacgccguauagaacacuccugaugaaugaacugggcgugcccuuucaccucgggaccaagcaggucugcauugccugguccagcagcuccugucaugacggaaaagccuggcugcacgugugcaucacaggcgaugacaagaacgcuaccgccagcuucauuuacaauggccggcuuguugauucuaucguguccuggagcaaagagauucugcgcacccaggaaucugagugugucugcaucaacgggacauguacgguggugaugaccgacggauccgcuagcggcaaggccgauacaaaaauccucuuuauugaggaagggaagaucguccauaccuccacacugucuggaggcgcgcaacacguugaggaaugcagcugcuauccuagauaccccggggugcggugugugugccgcgacaacuggaagggauccaauagaccuauugucgauaucaacauuaaagaccacagcaucgugucuuccuacguuuguagcggccuugugggcgacacgccccggaagaaugauucuagcuccucuagccauugccuggacccgaacaaugaggaagggggacacggcgucaaagggugggccuucgaugacggaaacgauguguggaugggccgcaccaucuccgagaagucuagacucggguaugagacauuuaaaguuauugaaggauggucuaauccuaaguccaaacugcagaucaaccgccaggugauugucgaccggggcaauagaagcggcuacucugggaucuucuccguggagggaaagagcuguauuaaccggugcuuuuaugucgaacugaucagaggccgcaaggaggaaaccgaggugcucuggaccuccaauucuauuguuguguucugugggacaagcggaaccuacggcacaggguccuggcccgauggcgcugacaucaaccugaugccuaucuga

SEQ ID NO: 214407 - RNA, 1410 nt, Artificial Sequence
  derived and/or modified CDS sequence (opt5) from neuraminidase__InfluenzaA__AFJ78290
augaaccccaaucagaagaucauuaccaucggcagcgugucccugacaauuucuacgaucugcuucuuuaugcaaauugccauccucaucaccacagucacccugcacuucaaacaguacgaguuuaacagcccuccgaauaaccagguuaugcuuugugaacccacaauuaucgagagaaauauuaccgaaaucguguaucugacaaacaccacgauugagaaggaaaucugcccuaaacucgcugaguaccggaauugguccaagccccagugugacauuaccggguucgccccuuuuucuaaagauaacagcauccgccuguccgcgggaggcgacaucugggugacaagagagcccuaugucucuugcgauccugacaaguguuaccaauucgcucuugggcagggaaccacacugaauaacgugcauagcaauaacaccguucgggaucgcacgccguauagaacacuccugaugaaugaacugggcgugcccuuucaccucgggaccaagcaggucugcauugccugguccucuagcuccugucaugacggaaaagccuggcugcacgugugcaucacaggcgaugacaagaacgcuaccgccagcuucauuuacaauggccggcuuguugauucuguggucuccuggagcaaagagauccugcgcacccaggaaucugagugugugugcauuaacgggacauguacgguggucaugaccgacggauccgcuagcggcaaggccgauacaaaaauccucuuuaucgaggaagggaagauuguucauaccuccgcgcugucuggaagcgcccaacacguggaggaaugcuccugcuauccuagauaccccggcgugcggugugucugccgcgacaacuggaaggggagcaauagaccuaucguggauauuaacaucaaagaccacucuauuguuuccagcuacguguguucuggacuugucggcgacacaccccggaagaaugauagcuccucuagcucccauugccuggacccgaacaaugaggaaggcgggcacggagugaaaggcugggcuuucgaugacgggaacgauguuuggaugggacgcaccaucagcgagaagucuagacucggcuaugagacguuuaaagugaucgaagggugguccaauccuaagagcaaacugcagauuaaccggcaggucaucguggaccgcggaaauagaucuggcuacuccggcauuuucagcgucgaggggaaguccuguaucaaccggugcuuuuauguggaacugauuagaggacgcaaggaggaaacagagguucucuggaccucuaauagcaucguggucuucuguggcaccuccgggacauacggaaccggcucuuggcccgauggggccgacauuaaccugaugccuaucuga

SEQ ID NO: 214408 - RNA, 1413 nt, Artificial Sequence
  derived and/or modified CDS sequence (opt5) from neuraminidase__InfluenzaA__AFJ78312
augaaccccaaucagaagaucauuaccaucggcagcauuuccaucgccauugggaucaucucucugaugcuccaaauuggaaacaucauuagcaucugggcuucccacucuauucagacaggcagccagaaucauacggggaucugcaaccagagaauuaucaccuacgagaauagcacaugggugaaccacaccuaugucaauaucaacaauacaaacguuguggccggaaaagacaagaccucugugacacuggcgggcaauagcucccuuuguagcauuucugggugggcuaucuacaccaaagauaacuccauucggaucggaagcaagggcgacgucuucgugauucgcgaaccuuuuaucucuugcucccaucuggaguguagaacguucuuucucacccaaggcgcccugcuuaaugauaaacacagcaacgggacaguuaaggaccggucuccguaucgcgcccugauguccugcccccucggagaagcuccuagccccuacaauuccaaguucgagucuguggccuggagcgcuuccgccugucaugauggcaugggguggcugaccaucggaauuagcggcccugacaacggggcggucgccgugcugaaauauaacggaaucauuacagaaaccaucaagucuugggagaaacggauucucagaacgcaggaguccgaaugcguuugugugaauggcagcugcuuuacaaucaugaccgauggccccucuaacggggcugccagcuacaagaucuucaaaauugagaagggaaaggucacaaaauccaucgaacugaaugcuccuaacucucacuaugaggaguguagcugcuacccggacaccggcaccgugaugugugugugccgcgauaauuggcacggguccaacagacccugggucagcuuuaaucagaaccuugacuaccagauuggauauaucugcucuggcguuuucggggauaauccucggcccaaggacggagaaggcuccuguaacccugugacagccgauggcgcggacggggugaaaggauuuagcuacaaguauggcaauggggucuggauuggacgcacgaaaucuaacagacugcggaagggcuucgagaugaucugggaccccaauggguggaccgauacagacuccgauuuuagcgugaaacaagacguuguggccauuaccgauugguccggcuacucuggauccuucguccagcauccggaacucacaggccuggacugcauccgcccuuguuuuuggguggagcuuguuagagggcggccccgcgaaaacaccacgaucuggacauccggaucuagcauuuccuucugcggcgugaauagcgauaccgcuaacuggucuuggccugacggggccgagcugcccuucaccaucgauaaguga

SEQ ID NO: 214409 - RNA, 1410 nt, Artificial Sequence; identical to SEQ ID NO: 214341
  derived and/or modified CDS sequence (opt5) from neuraminidase__InfluenzaA__AFJ78323

SEQ ID NO: 214410 - RNA, 1413 nt, Artificial Sequence
  derived and/or modified CDS sequence (opt5) from neuraminidase__InfluenzaA__AFJ78334
augaaccccaaucagaagaucauuaccaucggcagcauuuccaucgccauugggaucaucucucugaugcuccaaauuggaaacaucauuagcaucugggcuucccacucuauucagacaggcagccagaaucauacggggaucugcaaccagagaauuaucaccuacgagaauagcacaugggugaaccacaccuaugucaauaucaacaauacaaacguuguggccggaaaagacaagaccucugugacacuggcgggcaauagcucccuuuguagcauuucugggugggcuaucuacaccaaagauaacuccauucggaucggaagcaagggcgacgucuucgugauucgcgaaccuuuuaucucuugcucccaucuggaguguagaacguucuuucucacccaaggcgcccugcuuaaugauaaacacagcaacgggacaguuaaggaccggucuccguaucgcgcccugauguccugcccccucggagaagcuccuagccccuacaauuccaaguucgagucuguggccuggagcgcuuccgccugucaugauggcaugggguggcugaccaucggaauuagcggcccugacaacggggcggucgccgugcugaaauauaacggaaucauuacagaaaccaucaagucuuggaaaaagcagauucucagaacgcaggaguccgagugcguuugugugaauggcagcugcuuuacaaucaugaccgauggccccucuaacggggcugccagcuacaaaaucuucaagauugaaaagggaaaagucacaaaguccaucgagcugaaugcuccuaacuuucacuaugaagaguguucuugcuacccggacaccggcaccgugaugugugugugccgggauaauuggcacgggagcaaccgccccugggucuccuucaaucagaaccuugacuaccaaauuggauauaucugcagcggcguuuuuggggauaauccuagacccaaagacggagagggcucuuguaacccugugacaguggauggcgccgacggggucaagggauucuccuacaaauauggcaaugggguguggauuggacggacgaaguccaaccgccugagaaaaggcuuugaaaugaucugggaccccaauggguggaccgauacagacucugauuucuccguuaagcaggacguggucgcgauuaccgauuggagcggcuacuccggaucuuuugugcagcauccggagcucacaggccuggacugcauccggccuuguuucuggguugaacuugugcgcgggcugcccagagagaacaccacgaucuggacaagcggauccucuauuagcuucugcggcgucaauuccgauaccgccaacuggagcuggccugacggggcugaacuccccuuuaccaucgauaaguga

SEQ ID NO: 214411 - RNA, 1413 nt, Artificial Sequence; identical to SEQ ID NO: 214410
  derived and/or modified CDS sequence (opt5) from neuraminidase__InfluenzaA__AFJ78345

SEQ ID NO: 214412 - RNA, 1413 nt, Artificial Sequence
  derived and/or modified CDS sequence (opt5) from neuraminidase__InfluenzaA__AFJ78356
augaaccccaaucagaagaucauuaccaucggcagcauuuccaucgccauugggaucaucucucugaugcuccaaauuggaaacaucauuagcaucugggcuucccacucuauucagacaggcagccagaaucauacggggaucugcaaccagagaauuaucaccuacgagaauagcacaugggugaaccacaccuaugucaauaucaacaauacaaacguuguggugggaaaagacaagaccucugucacacuggccggcaauagcucccuuuguagcauuucugggugggcgaucuacaccaaagauaacuccauucggaucggaagcaagggcgacguguucguuauucgcgaaccuuuuaucucuugcucccaucuggaguguagaacguucuuucucacccaaggcgcucugcuuaaugauaaacacagcaacgggacagugaaggaccggucuccguaucgcgcccugauguccugcccccucggagaagccccuagccccuacaauuccaaguucgagucugucgcuuggagcgccuccgcuugucaugauggcaugggguggcugaccaucggaauuagcggcccugacaacggggccguggcgguucugaaauauaacggaaucauuacagaaaccaucaagucuuggaaaaagcagauucucagaacgcaggaguccgagugcgugugugucaauggcagcugcuuuacaaucaugaccgauggccccucuaacggggccgcuagcuacaaaaucuucaagauugaaaagggaaaagugacaaaguccaucgagcugaaugccccuaacuuucacuaugaagaguguucuugcuacccggacaccggcaccgugauguguauuugccgggauaauuggcacgggagcaaccgccccugggucuccuucaaucagaaccuugacuaccaaaucggauauauuugcagcggcguuuuuggggauaauccuagacccaaagacggagagggcucuuguaacccugugacaguggauggcgcugacggggucaagggauucuccuacaaauauggcaaugggguguggaucggacggacgaaguccaaccgccugagaaaaggcuuugaaaugauuugggaccccaauggguggaccgauacagacucugauuucuccguuaagcaggacguggucgccaucaccgauuggagcggcuacuccggaucuuuugugcagcauccggagcucacaggccuggacugcauccggccuuguuucuggguugaacuugugcgcgggcugcccagagagaacaccacgauuuggacaagcggauccucuaucagcuucugcggcgucaauuccgauaccgcgaacuggagcuggccugacggggccgaacuccccuuuaccauugauaaguga

SEQ ID NO: 214413 - RNA, 1413 nt, Artificial Sequence
  derived and/or modified CDS sequence (opt5) from neuraminidase__InfluenzaA__AFJ78367
augaaccccaaucagaagaucauuaccaucggcagcauuuccaucgccauugggaucaucucucugaugcuccaaauuggaaacaucauuagcaucugggcuucccacucuauucagacaggcagccagaaucauacggggaucugcaaccagagaauuaucaccuacgagaauagcacaugggugaaccacaccuaugucaauaucaacaauacaaacguuguggccggaaaagacaagaccucugugacacuggcgggcaauagcucccuuuguagcauuucugggugggcuaucuacaccaaagauaacuccauucggaucggaagcaagggcgacgucuucgugauucgcgaaccuuuuaucucuugcucccaucuggaguguagaacguucuuucucacccaaggcgcccugcuuaaugauaaacacagcaacgggacaguuaaggaccggucuccguaucgcgcccugauguccugcccccucggagaagcuccuagccccuacaauuccaaguucgagucuguggccuggagcgcuuccgccugucaugauggcaugggguggcugaccaucggaauuagcggcccugacaacggggcggucgccgugcugaaauauaacggaaucauuacagaaaccaucaagucuuggaaaaagcggauucucagaacgcaggaguccgagugcguuugugugaauggcagcugcuuuacaaucaugaccgauggccccucuaacggggcugccagcuacaaaaucuucaagauugaaaagggaaaagucacaaaguccaucgagcugaaugcuccuaacucucacuaugaagaguguagcugcuacccggacaccggcaccgugaugugugugugccgcgauaauuggcacggguccaacagacccugggucagcuuuaaucagaaccuugacuaccagauuggauauaucugcucuggcguuuucggggauaauccucggcccaaagacggagagggcuccuguaacccugugacagccgauggcgcggacggggugaagggauuuagcuacaaauauggcaauggggucuggauuggacgcacgaagucuaacagacugcggaaaggcuucgaaaugaucugggaccccaauggguggaccgauacagacuccgauuuuagcgugaagcaagacguuguggccauuaccgauugguccggcuacucuggauccuucguccagcauccggagcucacaggccuggacugcauccgcccuuguuuuuggguggaacuuguuagagggcggccccgcgagaacaccacgaucuggacauccggaucuagcauuuccuucugcggcgugaauggggauaccgcuaacuggagcuggccugacggagccgaacugcccuucaccaucgauaaguga

SEQ ID NO: 214414 - RNA, 1413 nt, Artificial Sequence
  derived and/or modified CDS sequence (opt5) from neuraminidase__InfluenzaA__AFJ78378
augaaccccaaucagaaggugaucaccauuggcagcaucuccauugccaucgggauuaucucucugaugcuccaaaucggaaacauuaucagcauuugggcuucccacucuauccagacaggcagccagaaucauacggggauuugcaaccagagaaucauuaccuacgaaaauuccacaugggugaaccacaccuauguuaauaucaacaauacaaacgugguggccggaaaagacaagaccucugucacacuggcgggcaauagcucccuuuguagcaucucugggugggcuauuuacaccaaagauaacuccauccggauuggaagcaagggcgacguguucguuauccgcgagccuuuuauuucuugcucccauauggaguguagaacguucuuucugacccaaggcgcccuccugaaugauaaacacagcaacgggacagugaaggaccggucuccguaucgcgcccuuauguccugcccccugggagaagcuccuagccccuacaauuccaaguucgagucugucgccuggagcgcuuccgccugucaugauggcaugggguggcucaccaucggaaucagcggcccugacaacggggcgguggccguucugaaauauaacggaauuaucacagaaaccauuaagucuuggaaaaagagaauccugcggacgcaggaguccgagugcgugugugucaauggcagcugcuuuacaauuaugaccgauggccccucuaacggggcugccagcuacaaaaucuucaagaucgaaaagggaaaagugacaaaguccauugagcucaaugcuccuaacucucacuaugaagaguguagcugcuacccggacaccggcaccgugaugugugucugccgcgauaauuggcacggguccaacagacccuggguuagcuuuaaucagaaccuggacuaccagaucggauauauuugcucuggcguguucggggauaauccucggccccgcgacggagagggcuccuguaacccugugacagucgauggcgccgacggggugaaaggauuuagcuacaaguauggcaaugggguuuggaucggaagaacgaaaucuaaccggcuucgcaagggcuucgaaaugauuugggaccccaauggguggaccgauacagacuccgauuuugcggugaaacaagacgucguggccaucaccgauuggagcggcuacuccggaucuuucguucagcauccggagcugacaggccucgacugcauuagaccuuguuuuuggguggaacugguccgggggcuuccccgcgagaacaccacgaucuggacaagcggauccucuaucagcuucugcggcgucaauuccgauaccgcuaacuggagcuggccugacggggccgaacugcccuucaccauugauaaguga

SEQ ID NO: 214415 - RNA, 1413 nt, Artificial Sequence; identical to SEQ ID NO: 206458
  derived and/or modified CDS sequence (opt5) from neuraminidase__InfluenzaA__AFJ78389

SEQ ID NO: 214416 - RNA, 1413 nt, Artificial Sequence; identical to SEQ ID NO: 206458
  derived and/or modified CDS sequence (opt5) from neuraminidase__InfluenzaA__AFJ78400

SEQ ID NO: 214417 - RNA, 1413 nt, Artificial Sequence; identical to SEQ ID NO: 206458
  derived and/or modified CDS sequence (opt5) from neuraminidase__InfluenzaA__AFJ78411

SEQ ID NO: 214418 - RNA, 1413 nt, Artificial Sequence
  derived and/or modified CDS sequence (opt5) from neuraminidase__InfluenzaA__AFJ78422
augaaccccaaucagaagaucauuaccaucggcagcauuuccaucgccauugggaucaucucucugaugcuccaaauuggaaacaucauuagcaucugggcuucccacucuauucagacaggcagccagaaucauacggggaucugcaaccagagaauuaucaccuacgagaauagcacaugggugaaccacaccuaugucaauaucaacaauacaaacguuguggccggaaaagacaagaccucugugacacuggcgggcaauagcucccuuuguagcauuucugggugggcuaucuacaccaaagauaacuccauucggaucggaagcaagggcgacgucuucgugauucgcgaaccuuuuaucucuugcucccaucuggaguguagaacguucuuucucacccaaggcgcccugcuuaaugauaaacacagcaacgggacaguuaaggaccggucuccguaucgcgcccugauguccugcccccucggagaagcuccuagccccuacaauuccaaguucgagucuguggccuggagcgcuuccgccugucaugauggcaccggguggcugacaaucggaauuagcggcccugacaacggggcggucgccgugcugaaauauaacggaaucauuaccgaaacgaucaagucuuggaaaaagcggauucucagaacacaggaguccgagugcguuuguaugaauggcagcugcuuuaccaucaugacagauggccccucuaacggggcugccagcuacaaaaucuucaagauugaaaagggaaaagugaccaaguccaucgagcugaaugcuccuucuuuucacuaugaagaguguagcugcuacccggacaccggcacagucaugugugugugccgcgauaacuggcacggguccaauagacccugggugagcuucaaccagaaucuugacuaccagauuggauauaucugcucuggcgucuuuggggauaacccucggccccaagacggagagggcuccuguaauccuguuacgguggauggcgccgacggggugaaaggauucagcuacaaguauggcaacggggucuggauuggacgcaccaaaucuaauagacugcggaagggcuuugaaaugaucugggaccccaacggguggacaaauaccgauuccgacuucagcgugaaacaggauguuguggcgauuacagacugguccggcuacucuggauccuuuguccagcauccggagcucaccggccuggauugcauccgcccuuguuucuggguggaacuuguuagagggcugccccgggagaacacgacaaucuggaccuccggaucuagcauuuccuucugcggcgugaauagcgacaccgccaacuggucuuggccugauggggcugaacuccccuuuacaaucgacaaguga

SEQ ID NO: 214419 - RNA, 1413 nt, Artificial Sequence; identical to SEQ ID NO: 208565
  derived and/or modified CDS sequence (opt5) from neuraminidase__InfluenzaA__AFJ78433

SEQ ID NO: 214420 - RNA, 1413 nt, Artificial Sequence; identical to SEQ ID NO: 208565
  derived and/or modified CDS sequence (opt5) from neuraminidase__InfluenzaA__AFJ78444

SEQ ID NO: 214421 - RNA, 1413 nt, Artificial Sequence
  derived and/or modified CDS sequence (opt5) from neuraminidase__InfluenzaA__AFJ78466
augaaccccaaucagaagaucauuaccaucggcagcauuuccaucgccauugggaucaucucucugaugcuccaaauuggaaacaucauuagcaucugggcuucccacucuauucagacaggcagccagaaucauacggggaucugcaaccagagaauuaucaccuacgaaaauuccacaugggugaaccacaccuaugucaauaucaacaauacaaacguuguggccggaaaagacaagaccucugugacacuggcgggcaauagcucccuuuguagcauuucugggugggcuaucuacaccaaagauaacuccauucggaucggaagcaagggcgacgucuucgugauucgcgagccuuuuaucucuugcucccaucuggaguguagaacguucuuucucacccaaggcgcccugcuuaaugauaaacacagcaacgggacaguuaaggaccggucuccguaucgcgcccugauguccugcccccucggagaagcuccuagccccuacaauuccaaguucgagucuguggccuggagcgcuuccgccugucaugauggcaucggguggcugaccauuggaaucagcggcccugacaacggggcggucgccgugcugaaauauaacggaauuaucacaggcaccauuaagucuuggaaaaagcagauccucagaacgcaggaauccgagugcguuuguaucaauggcagcugcuuuacaauuaugaccgaugggcccucuaacggagcugccagcuacaaaaucuucaagauugagaagggcaaagugacaaaguccaucgaacugaaugcuccuaacuuucacuaugaggaauguucuugcuacccggacaccgggaccgucaugugugugugccgggauaauuggcacggaagcaaccgccccuggguguccuucaaucagaaccuugacuaccaaauuggcuauaucugcagcggggucuuuggagauaauccuagacccaaagacggcgagggccgguguaacccuguuacaguggauggggccgacggagugaagggcuucucuuacaaauaugggaauggagucuggauuggccgcacgaaguccaacagacugcggaaaggguuugagaugaucugggaccccaauggcuggaccaacacagauagcgacuucucugugaagcaggauguuguggcgaucaccgacugguccggauacagcggcuccuuuguccagcauccggaacucacagggcuggauugcauucgcccuuguuucuggguggagcuuguuagaggacugccccgggaaaauaccacgaucuggacaucuggcagcuccauuucuuucugcggggugaacagcgacaccgccaacugguccuggccugauggagcugagcuccccuuuaccaucgacaaguga

SEQ ID NO: 214422 - RNA, 1413 nt, Artificial Sequence
  derived and/or modified CDS sequence (opt5) from neuraminidase__InfluenzaA__AFJ78477
augaaccccaaucagaagaucauuaccaucggcagcauuuccaucgccauugggaucaucggacugaugcuccaaauuggcaacaucauuucuaucugggcuagccacuccauucagacagggucucagaaucauacgggaaucugcagccagagaauuaucaccuacgagaacuccacaugggugaauaacaccuaugucaauaucaacaauacaaacguuguggccgaaaaagacaagaccucugugacacuggcgggcaauagcucccuuuguagcauuucugggugggcuaucuacaccaaagauaacuccauucggaucggaagcaagggcgacgucuucgugauucgcgagccuuuuaucucuugcucccaccuggaauguagaacguucuuucucacccaaggcgcccugcuuaaugauaaacauagcaacgggacaguuaaggaccggucuccguaucgcgcccugauguccugcccccucggagaggcuccuagccccuacaauuccagauucgaaucuguggccuggagcgcuuccgccugucacgauggcaugggguggcugaccaucggaauuagcggcccugacaacggggcggucgccgugcugaaguauaacggaaucauuacagagaccaucaaaucuuggaagaaacggauucuccgcacgcaggaguccgaaugcguuuguaugaauggcagcugcuuuacaaucaugaccgauggccccucuaacggggcugccagcuacaagaucuucaaaauugagaagggaaaggugacaaaauccaucgaacugaaugcuccuaacuuucauuaugaggaguguucuugcuacccggacaccggcaccgucaugugugugugcagagauaauuggcacgggagcaaccggcccuggguguccuucaaucagaaccuugacuaccagauuggauauaucugcagcggcgucuuuggggauaauccucgccccaaggacggagaaggcucuuguaacccuguuacaguggauggcgccgacggggugaaaggauucuccuacaaguauggcaauggggucuggauuggaagaacgaaaagcaaccggcugcgcaagggcuuugagaugaucugggaccccaauggguggaccaacacagauucugacuucuccgugaaacaagauguuguggcgauuaccgacuggagcggcuacuccggaucuuuuguccagcacccggaacucacaggccuggauugcaucagaccuuguuucuggguggagcuuguucgggggcugccccgcgaaaauaccacgaucuggacaagcggauccucuauuagcuucugcggcgugaacuccgggaccgccaacuggagcuggccugacggagcugagcuccccuuuaccaucgauaaguga

SEQ ID NO: 214423 - RNA, 1413 nt, Artificial Sequence
  derived and/or modified CDS sequence (opt5) from neuraminidase__InfluenzaA__AFJ78488
augaaccccaaucagaagaucauuaccaucggcagcauuuccaucgccauugggaucaucucucugauucuccaaaucggaaacauuaucagcauuugggcuucccacucuauccagacaggcagccagaaucauacggggauuugcaaccagagaaucaucaccuacgaaaauuccacaugggugaacaauaccuaugucaacauuaauaacacaaauguuguggccgagaaagacaagaccucugugacacuggcgggaaacagcucccuuuguagcaucucuggcugggcuauuuacaccaaagauaauuccauccggauugggagcaagggagacgucuucgugauccgcgagccuuuuaucucuugcucccaccuggaauguagaacguucuuucucacccaaggcgcccugcuuaacgauaaacauagcaauggcacaguuaaggaccggucuccguaucgcgcccugauguccugcccccucggggaggcuccuagccccuacaacuccagauucgaaucuguggccuggagcgcuuccgccugucacgauggaaugggcuggcugaccauugggaucagcggaccugacaacggcgcggucgccgugcugaaguauaaugggauuaucacagagaccauuaaaucuuggaagaaacggauccuccgcacgcaggaguccgaaugcguuuguaugaacggaagcugcuuuacaaucaugaccgauggccccucuaauggcgcugccagcuacaagauuuucaaaaucgagaaggggaaggugacaaaaaccauugaacugaacgcuccuaauuuucauuaugaggaguguuccugcuacccggacaccggaacagucaugugugugugcagagauaacuggcacggcucuaaucggcccugggugagcuucaaccagaaucuugacuaccagaucggguauauuugcuccggagucuuuggcgauaacccucgccccaaggacggggaaggaagcuguaauccuguuacgguggauggcgccgacggcgugaaaggguucucuuacaaguauggaaacggcgucuggaucgggagaaccaaauccaaucggcugcgcaagggauuugagaugauuugggaccccaacggcuggacaaauaccgauagcgacuucucuaugaaacaagaugugguugcgaucacagacugguccggguacagcggcuccuuugugcagcacccggaacucaccggacuggauugcaucagaccuuguuucugggucgagcuugugcggggccugccccgcgaaaacacgacaauuuggaccucugggagcuccaucucuuucugcggaguuaacagcggcaccgccaauugguccuggccugacggggcugagcuccccuuuacaauugauaaguga

SEQ ID NO: 214424 - RNA, 1413 nt, Artificial Sequence
  derived and/or modified CDS sequence (opt5) from neuraminidase__InfluenzaA__AFJ78510
augaaccccaaucagaagaucauuaccaucggcagcauuuccaucgccauugggaucaucucucugaugcuccaaauuggaaacaucauuagcaucugggcuucccacucuauucagacaggcagccagaaucauacggggaucugcaaccagagaauuaucaccuacgaaaauuccacaugggugaaccacaccuaugucaauaucaacaauacaaacguuguggccggaaaagacaagaccucugugacacuggcgggcaauagcucccuuuguagcauuucugggugggcuaucuacaccaaagauaacuccauucggaucggaagcaagggcgacgucuucgugauucgcgagccuuuuaucucuugcucccaucuggaguguagaacguucuuucucacccaaggcgcccugcuuaaugauaaacacagcaacgggacaguuaaggaccggucuccguaucgcgcccugauguccugcccccucggagaagcuccuagccccuacaauuccaaguucgagucuguggccuggagcgcuuccgccugucaugauggcaugggguggcugaccaucggaauuagcggcccugacaacggggcggucgccgugcugaaauauaacggaaucauuacaggcaccaucaagucuuggaaaaagcagauucucagaacgcaggaauccgagugcguuuguaugaauggcagcugcuuuacaaucaugaccgaugggcccucuaacggagcugccagcuacaaaaucuucaagauugagaagggcaaagugacaaaguccaucgaacugaaugcuccuaacuuucacuaugaggaauguucuugcuacccggacaccgggauugucaugugugugugccgggauaauuggcacggaagcaaccgccccuggguguccuucaaucagaaccuugacuaccaaaucggcuauauuugcagcggggucuuuggagauaauccuagacccaaagacggcgagggcucuuguaacccuguuaccguggauggggccgacggagugaagggcuucuccuacaaauaugacaauggggucuggaucggacggacaaagagcaaccgccugagaaaaggcuuugagaugauuugggaucccaauggguggacgaacaccgacucugauuucuccgugaagcaggacguuguggcgaucacagauuggagcggcuacuccggaucuuuuguccagcauccggaacucaccggccuggacugcauccggccuuguuucuggguggagcuuguucgcgggcugcccagagaaaauacaaccauuuggacgagcggauccucuaucagcuucugcggcgugaacuccgauacagccaacuggagcuggccugacggggcugagcuccccuuuaccauugauaaguga

SEQ ID NO: 214425 - RNA, 1413 nt, Artificial Sequence
  derived and/or modified CDS sequence (opt5) from neuraminidase__InfluenzaA__AFJ78521
augaaccccaaucagaagaucauuaccaucggcagcauuuccaucgccauugggaucaucucucugauucuccaaaucggaaacauuaucagcauuugggcuucccacucuauccagacaggcagccagaaucauacggggauuugcaaccagagaaucaucaccuacgaaaauuccacaugggugaacaauaccuaugucaacauuaauaacacaaauguuguggccgagaaagacaagaccucugugacacuggcgggaaacagcucccuuuguagcaucucuggcugggcuauuuacaccaaagauaauuccauccggauugggagcaagggagacgucuucgugauccgcgagccuuuuaucucuugcucccaccuggaauguagaacguucuuucucacccaaggcgcccugcuuaacgauaaacauagcaauggcacaguuaaggaccggucuccguaucgcgcccugauguccugcccccucggggaggcuccuagccccuacaacuccagauucgaaucuguggccuggagcgcuuccgccugucacgauggaaugggcuggcugaccauugggaucagcggaccugacaacggcgcggucgccgugcugaaguauaaugggauuaucacagagaccauuaaaucuuggaagaaacggauccuccgcacgcaggaguccgaaugcguuuguaugaacggaagcugcuuuacaaucaugaccgauggccccucuaauggcgcugccagcuacaagauuuucaaaaucgagaaggggaaggugacaaaaaccauugaacugaacgcuccuaauuuucauuaugaggaguguuccugcuacccggacaccggaacagucaugugugugugcagagauaacuggcacggcucuaaucggcccugggugagcuucaaccagaaucuugacuaccagaucggguauauuugcuccggagucuuuggcgauaacccucgccccaaggacggggaaggaagcuguaauccuguuacgguggauggcgccgacggcgugaaaggguucucuuacaaguauggaaacggcgucuggaucgggagaaccaaauccaaucggcugcgcaagggauuugagaugauuugggaccccaacggcuggacaaauaccgauagcgacuucucugugaaacaagauguuguggcgaucacagacugguccggguacagcggcuccuuuguccagcacccggaacucaccggacuggauugcaucagaccuuguuucuggguggagcuuguucggggccugccccgcgaaaacacgacaauuuggaccucugggagcuccaucucuuucugcggagugaacagcggcaccgccaauugguccuggccugacggggcugagcuccccuuuacaauugauaaguga

SEQ ID NO: 214426 - RNA, 1413 nt, Artificial Sequence; identical to SEQ ID NO: 214319
  derived and/or modified CDS sequence (opt5) from neuraminidase__InfluenzaA__AFJ78532

SEQ ID NO: 214427 - RNA, 1413 nt, Artificial Sequence; identical to SEQ ID NO: 214319
  derived and/or modified CDS sequence (opt5) from neuraminidase__InfluenzaA__AFJ78543

SEQ ID NO: 214428 - RNA, 1413 nt, Artificial Sequence; identical to SEQ ID NO: 214319
  derived and/or modified CDS sequence (opt5) from neuraminidase__InfluenzaA__AFJ78554

SEQ ID NO: 214429 - RNA, 1413 nt, Artificial Sequence; identical to SEQ ID NO: 214307
  derived and/or modified CDS sequence (opt5) from neuraminidase__InfluenzaA__AFJ78565

SEQ ID NO: 214430 - RNA, 1413 nt, Artificial Sequence
  derived and/or modified CDS sequence (opt5) from neuraminidase__InfluenzaA__AFJ78576
augaaccccaaucagaagaucauuaccaucggcagcauuuccaucgccauugggaucaucucucugaugcuccaaauuggaaacaucauuagcaucugggcuucccacucuauucagacaggcagccagaaucauacggggaucugcaaccagagaauuaucaccuacgaaaauuccacaugggugaaccacaccuaugucaauaucaacaauacaaacguuguggccggaaaagacaagaccccugugacacuggcgggcaauucuagccuuuguuccauuagcgggugggcuauccauaccaaagauaacucuauucggaucggauccaagggcgacgucuucgugauucgcgagccguuuaucagcugcucucaccuggaguguaaaacguucuuucucacccaaggcgcccugcuuaaugauaagcauuccaacgggacaguuaaggacagaagccccuaccgggcccugaugucuugcccucucggagaagcucccuccccuuauaauagcaaauucgaguccguggccuggucugcuagcgccugucacgauggcaucggguggcugaccauuggaaucuccggccccgacaacggggcggucgccgugcugaaguacaacggaauuaucacaggcaccauuaaaagcuggaagaaacagauccuccgcacgcaggaaucugagugcguuuguaugaauggcuccugcuuuacaaucaugaccgaugggccuagcaacggagcugccucuuauaagauuuucaagaucgagaaaggcaaggugacaaaaagcauggaacugaaugcuccgaacuuucacuacgaggaauguuccugcuaucccgacaccgggaccgucaugugugugugcagagauaauuggcauggaucuaaccggccuugggugagcuucaaucagaaccuugacuaccaaauuggcuacaucugcacaggggucuuuggagauaauccccgcccugaggacggcgagggcuccuguaaccccguuacgguggauggggccaauggagugaagggcuucagcuauaaauacgggaacggagucuggauuggcagaaccaagucuaaucggauccgcaaaggguuugaaaugauuugggacccgaacggcuggacaaauaccgacuccgauuucagcgugaagcaggacaucguugcgaucacagauuggucuggauauuccggcagcuuugugcagcacccugagcugaccgggcucgacugcauuagacccuguuucugggucgaacuggugcggggacuuccucgcgagaacacgacaaucuggaccuccggcucuagcauuuccuucugcgggguuaacucugauaucgccaauuggagcuggcccgacggagcugaacugcccuuuaccauugauaaguga

SEQ ID NO: 214431 - RNA, 1413 nt, Artificial Sequence
  derived and/or modified CDS sequence (opt5) from neuraminidase__InfluenzaA__AFJ78598
augaaccccaaucagaagaucauuaccaucggcagcauuuccaucgccauugggaucaucucucugaugcuccaaauuggaaacaucauuagcaucugggcuucccacucuauucagacaggcauccagaauaacacggggauuugcaaucagagaaucaucaccuacgagaacagcacaugggugaaucauaccuaugucaacauuaauaacacaaauguuguggccggagaagacaaaaccuccgugacacuggcgggcaacucuagccuuuguuccaucagcgggugggcuauuuacaccaaggauaauucuauccggauuggauccaaaggcgacgucuucgugauccgcgagccuuuuaucagcugcucucaccuggaauguagaacguucuuucucacccaaggcgcccugcuuaacgauaagcauuccaaugggacaguuaaagaccggagcccguaucgcgcccugaugucuugcccccucggagaggcuccuucccccuacaacagcaaguucgaauccguggccuggucugcuagcgccugucacgauggcaugggguggcugaccauuggaaucuccggcccugacaacggggcggucgccgugcugaaguauaauggaauuaucacaggcaccauuaaaagcuggaagaaacagauccucagaacgcaggagucugagugcguuuguaugaacggcuccugcuuuacaaucaugaccgaugggcccagcaauaaggcugccucuuacaaaauuuucaagaucgaaaagggaaaagugacaaagagcauugagcugaacgcuccuaauuuucauuaugaagaguguuccugcuacccggacaccggcaucgucaugugugugugccgggauaacuggcacgggucuaaucgccccugggugagcuucaaccagaaucuugacuaccaaauuggauauaucugcuccggcgucuuuggggauaacccuagacccgaggacggagaaggcagcuguaauccuguuaccguggauggcgccaacggggugaaaggauucucuuacaaguaugacaauggcgucuggauugggcggacaaaauccaaccgccugagaaagggauuugagaugaucugggaccccaauggcuggacgaacaccgauagcgacuucucugugaaacaggauguuguggcgaucacagacugguccggguacagcggcuccuuuguccagcacccggaacucaccggacuggauugcauucggccuuguuucuggguggagcuuguucgcggccugcccagagaaaacacaaccaucuggacgucugggagcuccauuucuuucugcggagugaauagcgacacagccaacugguccuggccugauggcgcugagcuccccuuuaccaucgacaaguga

SEQ ID NO: 214432 - RNA, 1413 nt, Artificial Sequence
  derived and/or modified CDS sequence (opt5) from neuraminidase__InfluenzaA__AFJ78609
augaaccccaaucagaagaucauuaccaucggcagcauuuccaucgccauugggaucaucucucugaugcuccaaauuggaaacaucauuagcaucugggcuucccacucuauucagacaggcagccagaauaacacggggaucugcaaucagagaauuaucaccuacgagaacuccacaugggugaaucauaccuaugugaacaucaauaacacaaauguuguggccggagaagacaaaaccucugugauucuggcgggcaacagcucccuuuguagcaucucugggugggcuauuuacacaaaggauaauuccauccggauuggaagcaaaggcgacgucuucgugauccgcgagccuuuuaucucuugcucccaccuggaauguagaaccuucuuucucacgcaaggcgcccugcuuaacgauaagcauagcaaugggaccguuaaagaccggucuccguaucgcgcccugauguccugcccccucggagaggcuccuagccccuacaacuccaaguucgaaucuguggccuggagcgcuuccgccugucacgauggcaugggguggcugacaauuggaaucagcggcccugacaacggggcggucgccgugcugaaguauaauggaauuaucaccggcacaauuaaaucuuggaagaaacagauccucagaacccaggaguccgagugcguuuguaugaacggcagcugcuuuacgaucaugacagaugggcccucuaauaaggcugccagcuacaaaauuuucaagaucgaaaagggaaaagugaccaaguccauugagcugaacgcuccuaauuuuuauuacgaagaguguucuugcuacccggacacaggcaucgucaugugugugugccgggauaacuggcaugggagcaaucgccccuggguguccuucaaccagaaucuugacuaucaaauuggauacaucugcagcggcgucuuuggggauaacccuagacccgaggacggagaaggcucuuguaauccuguuaccguggauggcgccaacggggugaaaggauucuccuauaaguacggcaauggggucuggauuggacggaccaaaagcaaccgccugagaaagggcuuugagaugaucugggaccccaauggguggacaaacacggacucugauuucuccgugaaacaggacguuguggcgaucaccgauuggagcggcuauuccggaucuuuuguccagcacccggaacucacaggccuggacugcauucggccuuguuucuggguggagcuuguucgcgggcugcccagagaaaacaccacaaucuggaccagcggauccucuauuagcuucugcggcgucaauuccgauacggccaacuggagcuggccugacggggcugagcuccccuuuacaaucgauaaguga

SEQ ID NO: 214433 - RNA, 1413 nt, Artificial Sequence; identical to SEQ ID NO: 209533
  derived and/or modified CDS sequence (opt5) from neuraminidase__InfluenzaA__AFJ78620

SEQ ID NO: 214434 - RNA, 1413 nt, Artificial Sequence; identical to SEQ ID NO: 214307
  derived and/or modified CDS sequence (opt5) from neuraminidase__InfluenzaA__AFJ78631

SEQ ID NO: 214435 - RNA, 1413 nt, Artificial Sequence; identical to SEQ ID NO: 209533
  derived and/or modified CDS sequence (opt5) from neuraminidase__InfluenzaA__AFJ78642

SEQ ID NO: 214436 - RNA, 1413 nt, Artificial Sequence; identical to SEQ ID NO: 209533
  derived and/or modified CDS sequence (opt5) from neuraminidase__InfluenzaA__AFJ78653

SEQ ID NO: 214437 - RNA, 1410 nt, Artificial Sequence; identical to SEQ ID NO: 208810
  derived and/or modified CDS sequence (opt5) from neuraminidase__InfluenzaA__AFJ78664

SEQ ID NO: 214438 - RNA, 1410 nt, Artificial Sequence; identical to SEQ ID NO: 208810
  derived and/or modified CDS sequence (opt5) from neuraminidase__InfluenzaA__AFJ78674

SEQ ID NO: 214439 - RNA, 1410 nt, Artificial Sequence; identical to SEQ ID NO: 208810
  derived and/or modified CDS sequence (opt5) from neuraminidase__InfluenzaA__AFJ78684

SEQ ID NO: 214440 - RNA, 1410 nt, Artificial Sequence; identical to SEQ ID NO: 208810
  derived and/or modified CDS sequence (opt5) from neuraminidase__InfluenzaA__AFJ78694

SEQ ID NO: 214441 - RNA, 1410 nt, Artificial Sequence; identical to SEQ ID NO: 208810
  derived and/or modified CDS sequence (opt5) from neuraminidase__InfluenzaA__AFJ78704

SEQ ID NO: 214442 - RNA, 1410 nt, Artificial Sequence; identical to SEQ ID NO: 208810
  derived and/or modified CDS sequence (opt5) from neuraminidase__InfluenzaA__AFJ78714

SEQ ID NO: 214443 - RNA, 1410 nt, Artificial Sequence
  derived and/or modified CDS sequence (opt5) from neuraminidase__InfluenzaA__AFJ78724
augaaccccaaucagaagaucauuaccaucggcagcgugugcaugacaauugggauggccaaccugauccuccaaauuggaaauaucaucuccauuuggaucucucacagcauucagcugggcaaccagaaucagaucgagacguguaaccaauccgucauuaccuacgaaaauaacacauggguuaaucagaccuaugugaacaucucuaauacaaacuucgcugccgggcagagcguggucuccgugaaacuugcgggaaauucuagccugugcccuguuuccggcugggcuauuuacagcaaggacaacucuaucagaaucggguccaaaggagauguguuugucauucgggagccguucaucagcuguucuccccucgaaugccgcaccuuuuuccugacacagggcgcccuucugaaugacaagcauuccaacggcaccauuaaagauagaagcccuuaucggacgcucaugucuugucccaucggggaggugccuucccccuacaacagccgcuuugaauccguugccuggucugcuagcgccugccacgacggaauuaauuggcugaccaucggcaucuccgggccugauaacggagcuguggccguccugaaguauaauggcauuaucacagacaccauuaagagcuggagaaacaauauccuccggacacaagagucugagugugcgugcgugaacggguccuguuucacccugaugacggauggaccgagcgacggccaggccucuuacaaaauuuuucgcaucgaaaagggcaaaaucgucaagagcguggagaugaaugcucccaacuaucauuacgaagagugcuccuguuacccugauucuagcgagauuacaugcguuugcagagacaauuggcacggguccaaccggcccugggugagcuucaaucagaaccuugaauaucagaucggauacauuuguucuggcaucuuuggggauaauccucgccccaacgacaaaaccggauccugcggcccggugagcucuaauggggccaacggagucaagggcuucuccuuuaaguauggcaacgggguguggauuggaagaacaaaaagcaucuccucucggaauggcuucgagaugauuugggauccuaacggguggaccggaaccgacaauaacuuuagcaucaagcaagacaucguuggcauuaaugaaugguccggguacucuggcagcuucgugcagcaucccgagcugacaggacucgauuguauccgcccuugcuucugggucgaacugauuagaggccggcccaaagagaacacgaucuggaccuccgggagcucuauuuccuuuuguggagugaauagcgacacaguuggcuggucuuggcccgauggggcugagcuuccuuucaccaucgacaaguga

SEQ ID NO: 214444 - RNA, 1410 nt, Artificial Sequence; identical to SEQ ID NO: 208810
  derived and/or modified CDS sequence (opt5) from neuraminidase__InfluenzaA__AFJ78734

SEQ ID NO: 214445 - RNA, 1410 nt, Artificial Sequence; identical to SEQ ID NO: 208810
  derived and/or modified CDS sequence (opt5) from neuraminidase__InfluenzaA__AFJ78744

SEQ ID NO: 214446 - RNA, 1410 nt, Artificial Sequence; identical to SEQ ID NO: 208810
  derived and/or modified CDS sequence (opt5) from neuraminidase__InfluenzaA__AFJ78754

SEQ ID NO: 214447 - RNA, 1410 nt, Artificial Sequence; identical to SEQ ID NO: 208810
  derived and/or modified CDS sequence (opt5) from neuraminidase__InfluenzaA__AFJ78764

SEQ ID NO: 214448 - RNA, 1410 nt, Artificial Sequence; identical to SEQ ID NO: 208810
  derived and/or modified CDS sequence (opt5) from neuraminidase__InfluenzaA__AFJ78774

SEQ ID NO: 214449 - RNA, 1410 nt, Artificial Sequence; identical to SEQ ID NO: 208810
  derived and/or modified CDS sequence (opt5) from neuraminidase__InfluenzaA__AFJ78784

SEQ ID NO: 214450 - RNA, 1410 nt, Artificial Sequence
  derived and/or modified CDS sequence (opt5) from neuraminidase__InfluenzaA__AFJ78794
augaaccccaaucagaagaucauuaccaucggcagcgugugcaugacaauugggauggccaaccugauccuccaaauuggaaauaucaucuccauuuggaucucucacagcauucagcugggcaaccagaaucagaucgagacguguaaccaauccgucauuaccuacgaaaauaacacauggguuaaucagaccuaugugaacaucucuaauacaaacuucgcugccgggcagagcguggucuccgugaaacuugcgggaaauucuagccugugcccuguuuccggcugggcuauuuacagcaaggacaacucuaucagaaucggguccaaaggagauguguuugucauucgggagccguucaucagcuguucuccccucgaaugccgcaccuuuuuccugacacagggcgcccuucugaaugacaagcauuccaacggcaccauuaaagauagaagcccuuaucggacgcucaugucuugucccaucggggaggugccuucccccuacaacagccgcuuugaauccguugccuggucugcuagcgccugccacgacggaauuaauuggcugaccaucggcaucuccgggccugauaacggagcuguggccguccugaaguauaauggcauuaucacagacaccauuaagagcuggagaaacaauauccuccggacacaagagucugagugugcgugcgugaacggguccuguuucaccgugaugacggauggaccgagcgacggccaggccucuuacaaaauuuuucgcaucgaaaagggcaaaaucgucaagagcguugagaugaaugcucccaacuaucauuacgaagagugcuccuguuacccugauucuggggagauuacaugcgugugcagagacaauuggcacggaagcaaccggcccuggguguccuucaaucagaaccuggaauaucagaucggcuacauuuguagcgggaucuuuggagauaauccucgccccaacgacaaaaccggcucuugcgggccggucuccagcaauggagccaacggcgugaagggcuucucuuuuaaguaugggaacggaguuuggauuggcagaacaaaauccaucagcucccggaauggguucgagaugauuugggauccuaacggauggaccggcaccgacaauaacuuuucuaucaagcaagacaucguggggauuaaugaauggagcggcuacuccggaucuuucguccagcaucccgagcuuacaggccuggauuguauccgcccuugcuucuggguggaacucauuagagggcggcccaaagagaacacgaucuggaccagcggauccagcauuucuuuuuguggcguuaauuccgacacagugggguggagcuggcccgauggagcugagcugccuuucaccaucgacaaguga

SEQ ID NO: 214451 - RNA, 1410 nt, Artificial Sequence; identical to SEQ ID NO: 208810
  derived and/or modified CDS sequence (opt5) from neuraminidase__InfluenzaA__AFJ78804

SEQ ID NO: 214452 - RNA, 1410 nt, Artificial Sequence; identical to SEQ ID NO: 208810
  derived and/or modified CDS sequence (opt5) from neuraminidase__InfluenzaA__AFJ78814

SEQ ID NO: 214453 - RNA, 1410 nt, Artificial Sequence; identical to SEQ ID NO: 208810
  derived and/or modified CDS sequence (opt5) from neuraminidase__InfluenzaA__AFJ78824

SEQ ID NO: 214454 - RNA, 1410 nt, Artificial Sequence; identical to SEQ ID NO: 208810
  derived and/or modified CDS sequence (opt5) from neuraminidase__InfluenzaA__AFJ78834

SEQ ID NO: 214455 - RNA, 1410 nt, Artificial Sequence; identical to SEQ ID NO: 208810
  derived and/or modified CDS sequence (opt5) from neuraminidase__InfluenzaA__AFJ78844

SEQ ID NO: 214456 - RNA, 1410 nt, Artificial Sequence; identical to SEQ ID NO: 211059
  derived and/or modified CDS sequence (opt5) from neuraminidase__InfluenzaA__AFJ78854

SEQ ID NO: 214457 - RNA, 1410 nt, Artificial Sequence; identical to SEQ ID NO: 208810
  derived and/or modified CDS sequence (opt5) from neuraminidase__InfluenzaA__AFJ78864

SEQ ID NO: 214458 - RNA, 1410 nt, Artificial Sequence; identical to SEQ ID NO: 208810
  derived and/or modified CDS sequence (opt5) from neuraminidase__InfluenzaA__AFJ78874

SEQ ID NO: 214459 - RNA, 1410 nt, Artificial Sequence; identical to SEQ ID NO: 208810
  derived and/or modified CDS sequence (opt5) from neuraminidase__InfluenzaA__AFJ78884

SEQ ID NO: 214460 - RNA, 1410 nt, Artificial Sequence; identical to SEQ ID NO: 208810
  derived and/or modified CDS sequence (opt5) from neuraminidase__InfluenzaA__AFJ78894

SEQ ID NO: 214461 - RNA, 1410 nt, Artificial Sequence; identical to SEQ ID NO: 208810
  derived and/or modified CDS sequence (opt5) from neuraminidase__InfluenzaA__AFJ78904

SEQ ID NO: 214462 - RNA, 1410 nt, Artificial Sequence; identical to SEQ ID NO: 208810
  derived and/or modified CDS sequence (opt5) from neuraminidase__InfluenzaA__AFJ78914

SEQ ID NO: 214463 - RNA, 1410 nt, Artificial Sequence
  derived and/or modified CDS sequence (opt5) from neuraminidase__InfluenzaA__AFJ78924
augaaccccaaucagaagaucauuaccaucggcagcgugugcaugacaauugggauggccaaccugauccuccaaauuggaaauaucaucuccauuuggaucucucacagcauucagcugggcaaccagaaucagaucgagacguguaaccaauccgucauuaccuacgaaaauaacacauggguuaaucagaccuauguggacaucucuaacacaaauuucgcugccgggcagagcguggucuccgugaaacuugcgggaaacucuagccugugcccuguuuccggcugggcuauuuacagcaaggauaauucuaucagaaucggguccaaaggagacguguuugucauucgggagccguucaucagcuguucuccccucgaaugccgcaccuuuuuccugacacagggcgcccuucugaacgauaagcauuccaauggcaccauuaaagacagaagcccuuaucggacgcucaugucuugucccaucggggagauuccuucccccuacaacagccgcuuugaauccguggccuggucugcuagcgccugccacgauggaaucaacuggcugaccaucggcauuuccgggccugacaauggagcuguugccgugcugaaguauaacggcaucauuacagauaccaucaagagcuggagaaauaacauucuccggacacaagagucugagugugcgugcgucaauggguccuguuucaccgugaugacggacggaccgagcgauggccaggccucuuacaaaaucuuucgcaucgaaaagggcaaaauugucaagagcguggagaugaacgcucccaauuaucauuacgaagagugcuccuguuacccugacucuagcgagaucacaugcguuugcagagauaacuggcacggguccaaucggcccugggugagcuucaaccagaaucuggaauaucagauuggauacaucuguucuggcauuuuuggggacaacccucgccccaaugauaaaaccggauccugcggcccggugagcucuaacggggccaauggagucaagggcuucuccuuuaaguauggcaacgggguguggaucggaagaacaaaaagcauuuccucucggaacggcuucgagaugaucugggacccuaauggguggaccggaaccgacaacaauuuuagcaucaagcaagauauuguuggcaucaacgaaugguccggguacucuggcagcuucgugcagcaucccgagcuuacaggacuggacuguauucgcccuugcuucugggucgaacucaucagaggccggcccaaagagaauacgauuuggaccuccgggagcucuaucuccuuuuguggagugaacagcgauacaguuggcuggucuuggcccgacggggcugagcugccuuucaccaucgauaaguga

SEQ ID NO: 214464 - RNA, 1410 nt, Artificial Sequence
  derived and/or modified CDS sequence (opt5) from neuraminidase__InfluenzaA__AFJ97569
augaaccccaaucagaagaucauuaccaucggcagcgugugcaugacaauugggauggccaaccugauccuccaaauuggaaauaucaucuccauuuggaucucucacagcauucagcugggcaaccagaaucagaucgagacguguaaccaauccgucauuaccuacgaaaauaacacauggguuaaucagaccuaugugaacaucucuaauacaaacuucgcugccgggcagagcguggucuccgugaaacuugcgggaaauucuagccugugcccuguuuccggcugggcuauuuacagcaaggacaacucuaucagaaucggguccaaaggagauguguuugucauucgggagccguucaucagcuguucuccccucgaaugccgcaccuuuuuccugacacagggcgcccuucugaaugacaagcauuccaacgagaccauuaaagauagaagcccuuaucggacgcucaugucuugucccaucggcgaagugccuucccccuacaacagccgcuuugaguccguugccuggucugcuagcgccugccacgacgggauuaauuggcugaccaucggaaucuccggcccugauaacggggcuguggccguccugaaguauaauggaauuaucacagacaccauuaagagcuggagaaacaauauccuccggacacaagagucugaaugugcgugcgugaacggcuccuguuucaccgugaugacggaugggccgagcgacggacaggccucuuacaaaauuuuucgcaucgagaagggcaaaaucgucaagagcguugaaaugaaugcucccaacuaucauuacgaggagugcuccuguuacccugauucuagcgaaauuacaugcgugugcagagacaauuggcacggcuccaaccggcccugggugagcuucaaucagaaccuggaguaucagaucggguacauuuguucuggaaucuuuggcgauaauccucgccccaacgacaaaaccggguccugcggaccggucagcucuaauggcgccaacggggugaagggauucuccuuuaaguauggcaacggcguuuggauugggagaacaaaaagcaucuccucucggaauggauucgaaaugauuugggauccuaacggcuggaccgggaccgacaauaacuuuagcaucaagcaagacaucgugggaauuaaugagugguccggcuacucugggagcuucguccagcaucccgaacuuacaggccuggauuguauccgcccuugcuucuggguggagcucauuagaggacggcccaaagagaacacgaucuggaccuccggcagcucuauuuccuuuugugggguuaauagcgacacagugucuugguccuggcccgauggagcugaacugccuuucaccaucgacaaguga

SEQ ID NO: 214465 - RNA, 1410 nt, Artificial Sequence; identical to SEQ ID NO: 208800
  derived and/or modified CDS sequence (opt5) from neuraminidase__InfluenzaA__AFK14107

SEQ ID NO: 214466 - RNA, 1410 nt, Artificial Sequence; identical to SEQ ID NO: 208810
  derived and/or modified CDS sequence (opt5) from neuraminidase__InfluenzaA__AFK14117

SEQ ID NO: 214467 - RNA, 1410 nt, Artificial Sequence; identical to SEQ ID NO: 209577
  derived and/or modified CDS sequence (opt5) from neuraminidase__InfluenzaA__AFK14141

SEQ ID NO: 214468 - RNA, 1410 nt, Artificial Sequence
  derived and/or modified CDS sequence (opt5) from neuraminidase__InfluenzaA__AFK14150
augaaccccaaucagaagaucauuaccaucggcagcgugugcaugacaauugggauggccaaccugauccuccaaauuggaaauaucaucuccauuuggaucucucacagcauuagacugggcaaccagaaucagaucgagacguguaaccaguccgucauuaccuacgaaaauaacacauggguuaaucaaaccuaugugaacaucucuaauacaaacuucgcugccgggcagagcguggucuccgugaaacuugcgggaaauucuagccugugcccuguuuccggcugggcuauuuacagcaaggacaacucuauccggaucggguccaaaggagauguguuugucauucgcgagccguucaucagcuguucuccccucgaaugcagaaccuuuuuccugacacagggcgcccuucugaaugacaagcauuccaacggcaccauuaaagaucggagcccuuaucgcacgcucaugucuugucccaucggggaggugccuucccccuacaacagcagauuugaauccguugccuggucugcuagcgccugccacgacggaauuaauuggcugaccaucggcaucuccgggccugauaacggagcuguggccguccugaaguauaauggcauuaucacagacaccauuaagagcuggcggaacaauauccuccgcacacaggagucugagugugcgugcgugaacggguccuguuucaccgugaugacggauggaccgagcgacgaacaagccucuuacaaaauuuuuagaaucgagaagggcaaaaucgucaagagcguugaaaugaaugcucccaacuaucauuacgaggagugcuccuguuacccugauucuagcgaaauuacaugcgugugccgggacaauuggcacggcuccaaccgccccugggugagcuucaaucagaaccuggaguaucagaucggguacauuuguucuggaaucuuuggcgauaauccuagacccaacgacaaaaccggguccugcggaccggucagcucuaauggcgccaacggggugaagggauucuccuuuaaguauggcaacggcguuuggauugggcggacaaaaagcaucuccucucgcaauggauucgaaaugauuugggauccuaacggcuggaccgggaccgacaauaacuuuagcaucaagcaggacaucgugggaauuaaugagugguccggcuacucugggagcuucguccaacaucccgaacuuacaggccuggauuguaucagaccuugcuucuggguggagcucauucggggacgccccaaagagaacacgaucuggaccuccggcagcucuauuuccuuuugugggguuaauagcgacacagugggauggucuuggcccgauggcgcugaacugccuuucaccaucgacaaguga

SEQ ID NO: 214469 - RNA, 1410 nt, Artificial Sequence; identical to SEQ ID NO: 209393
  derived and/or modified CDS sequence (opt5) from neuraminidase__InfluenzaA__AFK14159

SEQ ID NO: 214470 - RNA, 1410 nt, Artificial Sequence; identical to SEQ ID NO: 208810
  derived and/or modified CDS sequence (opt5) from neuraminidase__InfluenzaA__AFK14168

SEQ ID NO: 214471 - RNA, 1410 nt, Artificial Sequence; identical to SEQ ID NO: 208810
  derived and/or modified CDS sequence (opt5) from neuraminidase__InfluenzaA__AFK14177

SEQ ID NO: 214472 - RNA, 1410 nt, Artificial Sequence
  derived and/or modified CDS sequence (opt5) from neuraminidase__InfluenzaA__AFK14186
augaaccccaaucagaagaucauuaccaucggcagcgugugcaugacaauugggauggccaaccugauccuccaaauuggaaauaucaucuccauuuggaucucucacagcauucagcugggcaaccagaaucagaucgagacguguaaccaauccgucauuaccuacgaaaauaacacauggguuaaucagaccuaugugaacaucucuaauacaaacuucgcugccgggcagagcguggucuccgugaaacuugcgggaaauucuagccugugcccuguuuccggcugggcuauuuacagcaaggacaacucuaucagaaucggguccaaaggagauguguuugucauucgggagccguucaucagcuguucuccccucgaaugccgcaccuuuuuccugacacagggcgcccuucugaaugacaagcauuccaacggcaccauuaaagauagaagcccuuaucggacgcucaugucuugucccaucggggaggugccuucccccuacaacagccgcuuugaauccguugccuggucugcuagcgccugccacgacggaauuaauuggcugaccaucggcaucuccgggccugauaacggagcuguggccguccugaaguauaauggcauuaucacagacaccauuaagagcuggagaaacaauauccuccggacacaagagucugagugugcgugcgugaacggguccuguuucaccgugaugacggauggaccgagcgacggccaggccucuuacaaaauuuuucgcaucgaaaagggcaaaaucgucaagagcguugagaugaaugcucccaacuaucauuucgaagagugcuccuguuacccugauucuagcgagauuacaugcgugugcagagacaauuggcacggguccaaccggcccugggugagcuuuaaucagaaccuggaauaccagaucggauauauuuguucuggcaucuucggggauaauccucgccccaacgacaaaaccggauccugcggcccggucagcucuaauggggccaacggagugaagggcuuuuccuucaaguacggcaacgggguuuggauuggaagaacaaaaagcaucuccucucggaauggcuuugagaugauuugggauccuaacggguggaccggaaccgacaauaacuucagcaucaagcaagacaucgugggcauuaaugaaugguccggguauucuggcagcuucguccagcaucccgagcuuacaggacuggauuguauccgcccuugcuuuuggguggaacucauuagaggccggcccaaagagaacacgaucuggaccuccgggagcucuauuuccuucuguggaguuaauagcgacacagugggcuggucuuggcccgauggggcugagcugccuuuuaccaucgacaaguga

SEQ ID NO: 214473 - RNA, 1410 nt, Artificial Sequence; identical to SEQ ID NO: 210791
  derived and/or modified CDS sequence (opt5) from neuraminidase__InfluenzaA__AFK14195

SEQ ID NO: 214474 - RNA, 1410 nt, Artificial Sequence; identical to SEQ ID NO: 208810
  derived and/or modified CDS sequence (opt5) from neuraminidase__InfluenzaA__AFK14204

SEQ ID NO: 214475 - RNA, 1410 nt, Artificial Sequence; identical to SEQ ID NO: 210791
  derived and/or modified CDS sequence (opt5) from neuraminidase__InfluenzaA__AFK14213

SEQ ID NO: 214476 - RNA, 1410 nt, Artificial Sequence
  derived and/or modified CDS sequence (opt5) from neuraminidase__InfluenzaA__AFK14222
augaaccccaaucagaagaucauuaccaucggcagcgugugcaugacaauugggauggccaaccugauccuccaaauuggaaauaucaucuccauuuggaucucucacagcauuagacugggcaaccagaaucagaucgagacguguaaccaguccgucauuaccuacgaaaauaacacauggguuaaucaaaccuaugugaacaucucuaauacaaacuucgcugccgggcagagcguggucuccgugaaacuugcgggaaauucuagccugugcccuguuuccggcugggcuauuuacagcaaggacaacucuauccggaucggguccaaaggagauguguuugucauucgcgagccguucaucagcuguucuccccucgaaugcagaaccuuuuuccugacacagggcgcccuucugaaugacaagcauuccaacggcaccauuaaagaucggagcccuuaucgcacgcucaugucuugucccaucggggaggugccuucccccuacaacagcagauuugaauccguugccuggucugcuagcgccugccacgacggaauuaauuggcugaccaucggcaucuccgggccugauaacggagcuguggccguccugaaguauaauggcauuaucacagacaccauuaagagcuggcggaacaauauccuccgcacacaggagucugagugugcgugcgugaacggguccuguuucaccgugaugacggauggaccgagcgacggccaagccucuuacaaaauuuuuagaaucgaaaagggcaaaaucgucaagagcguugagaugaaugcucccaacuaucauuacgaagagugcuccuguuacccugauucuagcgagauuacaugcgugugccgggacaauuggcacggguccaaccgccccugggugagcuucaaucagaaccuggaauaucagaucggauacauuuguucuggcaucuuuggggauaauccuagacccaacgacaaaaccggauccugcggcccggucagcucuaauggggccaacggagugaagggcuucuccuuuaaguauggcaacgggguuuggauuggacggacaaaaagcaucuccucucgcaauggcuucgagaugauuugggauccuaacggguggaccggaaccgacaauaacuuuagcaucaagcaggacaucgugggcauuaaugaaugguccggguacucuggcagcuucguccaacaucccgagcuuacaggacuggauuguaucagaccuugcuucuggguggaacucauucggggccgccccaaagagaacacgaucuggaccuccgggagcucuauuuccuuuuguggaguuaauagcgacacagugggcuggucuuggcccgauggggcugagcugccuuucaccaucgacaaguga

SEQ ID NO: 214477 - RNA, 1410 nt, Artificial Sequence; identical to SEQ ID NO: 209393
  derived and/or modified CDS sequence (opt5) from neuraminidase__InfluenzaA__AFK14231

SEQ ID NO: 214478 - RNA, 1410 nt, Artificial Sequence; identical to SEQ ID NO: 208810
  derived and/or modified CDS sequence (opt5) from neuraminidase__InfluenzaA__AFK14240

SEQ ID NO: 214479 - RNA, 1410 nt, Artificial Sequence; identical to SEQ ID NO: 209577
  derived and/or modified CDS sequence (opt5) from neuraminidase__InfluenzaA__AFK14249

SEQ ID NO: 214480 - RNA, 1410 nt, Artificial Sequence; identical to SEQ ID NO: 208810
  derived and/or modified CDS sequence (opt5) from neuraminidase__InfluenzaA__AFK14257

SEQ ID NO: 214481 - RNA, 1410 nt, Artificial Sequence; identical to SEQ ID NO: 208810
  derived and/or modified CDS sequence (opt5) from neuraminidase__InfluenzaA__AFK14266

SEQ ID NO: 214482 - RNA, 1410 nt, Artificial Sequence; identical to SEQ ID NO: 208810
  derived and/or modified CDS sequence (opt5) from neuraminidase__InfluenzaA__AFK14274

SEQ ID NO: 214483 - RNA, 1410 nt, Artificial Sequence
  derived and/or modified CDS sequence (opt5) from neuraminidase__InfluenzaA__AFK14281
augaaccccaaucagaagaucauuaccaucggcagcgugugcaugacaauugggauggccaaccugauccuccaaauuggaaauaucaucuccauuuggaucucucacagcauucagcugggcaaccagaaucagaucgagacguguaaccaauccgucauuaccuacgaaaauaacacauggguuaaucagaccgacgugaacaucucuaauacaaacuucgcugccgggcagagcguggucuccgugaaacuugcgggaaauucuagccugugcccuguuuccggcugggcuauuuauagcaaggauaacucuaucagaaucggguccaaaggagacguguuugucauucgggagccguucaucagcuguucuccccucgaaugccgcaccuuuuuccugacacagggcgcccuucugaaugauaagcauuccaacggcaccauuaaagacagaagcccuuaccggacgcucaugucuugucccaucggggaggugccuucccccuauaacagccgcuuugaauccguugccuggucugcuagcgccugccacgauggaauuaauuggcugaccaucggcaucuccgggccugacaacggagcuguggccguccugaaguacaauggcauuaucacagauaccauuaagagcuggagaaacaauauccuccggacacaagagucugagugugcgugcgugaacggguccuguuucaccgugaugacggacggaccgagcgauggccaggccucuuauaaaauuuuucgcaucgaaaagggcaaaaucgucaagagcguugagaugaaugcucccaacuaccauuaugaagagugcuccuguuacccugacucuagcgagauuacaugcgugugcagagauaauuggcacggguccaaccggcccugggugagcuucaaucagaaccuggaauaccagaucggauauauuuguucuggcaucuuuggggacaauccucgccccaacgauaaaaccggauccugcggcccggucagcucuaauggggccaacggagugaagggcuucuccuuuaaguacggcaacgggguuuggauuggaagaacaaaaagcaucuccucucggaauggcuucgagaugauuugggacccuaacggguggaccggaaccgacaauaacuuuagcaucaagcaagauaucgugggcauuaaugaaugguccggguauucuggcagcuucguccagcaucccgagcuuacaggacuggacuguauccgcccuugcuucuggguggaacucauuagaggccggcccaaagagaacacgaucuggaccuccgggagcucuauuuccuuuuguggaguuaauagcgauacagugggcuggucuuggcccgacggggcugagcugccuuucaccaucgauaaguga

SEQ ID NO: 214484 - RNA, 1410 nt, Artificial Sequence; identical to SEQ ID NO: 208810
  derived and/or modified CDS sequence (opt5) from neuraminidase__InfluenzaA__AFK14289

SEQ ID NO: 214485 - RNA, 1410 nt, Artificial Sequence; identical to SEQ ID NO: 209393
  derived and/or modified CDS sequence (opt5) from neuraminidase__InfluenzaA__AFK14298

SEQ ID NO: 214486 - RNA, 1410 nt, Artificial Sequence; identical to SEQ ID NO: 208810
  derived and/or modified CDS sequence (opt5) from neuraminidase__InfluenzaA__AFK14307

SEQ ID NO: 214487 - RNA, 1410 nt, Artificial Sequence; identical to SEQ ID NO: 210791
  derived and/or modified CDS sequence (opt5) from neuraminidase__InfluenzaA__AFK14316

SEQ ID NO: 214488 - RNA, 1410 nt, Artificial Sequence
  derived and/or modified CDS sequence (opt5) from neuraminidase__InfluenzaA__AFK14325
augaaccccaaucagaagaucauuaccaucggcagcgugugcaugacaauugggauggccaaccugauccuccaaauuggaaauaucaucuccauuuggaucucucacagcauucagcugggcaaccagaaucagaucgagacguguaaccaauccgucauuaccuacgaaaauaacacauggguuaaucagaccuaugugaacaucucuaauacaaacuucgcugccgggcagagcguggucuccgugaaacuugcgggaaauucuagccugugcccuguuuccggcugggcuauuuacagcaaggacaacucuaucagaaucggguccaaaggagauguguuugucauucgggagccguucaucagcuguucuccccucgaaugccgcaccuuuuuccugacacagggcgcccuucugaaugacaagcauuccaacggcaccauuaaagauagaagcccuuaucggacgcucaugucuugucccaucggggaggugccuucccccuacaacagccgcuuugaauccguugccuggucugcuagcgccugccacgacggaauuaauuggcugaccaucggcaucuccgggccugauaacggagcuguggccguccugaaguauaauggcauuaucacagacaccauuaagagcuggagaaacaauauccuccggacacaagagucugagugugcgugcgugaacggguccuguuucaccgugaugacggauggaccgagcgacggccaggccucuuacaaaauuuuucgcaucgaaagaggcaagaucgucaaaagcguugagaugaaugcucccaacuaucauuacgaagagugcuccuguuacccugauucuagcgagauuacaugcgugugccgggacaauuggcacggguccaaccgccccugggugagcuucaaucagaaccuggaauaucagaucggauacauuuguucuggcaucuuuggggauaauccuagacccaacgacaagaccggauccugcggcccggucagcucuaauggggccaacggagugaaaggcuucuccuuuaaguauggcaacgggguuuggauuggacggacaaagagcaucuccucucgcaauggcuucgagaugauuugggauccuaacggguggaccggaaccgacaauaacuuuagcaucaaacaagacaucgugggcauuaaugaaugguccggguacucuggcagcuucguccagcaucccgagcuuacaggacuggauuguaucagaccuugcuucuggguggaacucauucggggccgccccaaggagaacacgaucuggaccuccgggagcucuauuuccuuuuguggaguuaauagcgacacagugggcuggucuuggcccgauggggcugagcugccuuucaccaucgacaaauga

SEQ ID NO: 214489 - RNA, 1410 nt, Artificial Sequence; identical to SEQ ID NO: 208810
  derived and/or modified CDS sequence (opt5) from neuraminidase__InfluenzaA__AFK14334

SEQ ID NO: 214490 - RNA, 1410 nt, Artificial Sequence; identical to SEQ ID NO: 208810
  derived and/or modified CDS sequence (opt5) from neuraminidase__InfluenzaA__AFK14343

SEQ ID NO: 214491 - RNA, 1410 nt, Artificial Sequence; identical to SEQ ID NO: 208810
  derived and/or modified CDS sequence (opt5) from neuraminidase__InfluenzaA__AFK14352

SEQ ID NO: 214492 - RNA, 1410 nt, Artificial Sequence; identical to SEQ ID NO: 208810
  derived and/or modified CDS sequence (opt5) from neuraminidase__InfluenzaA__AFK14360

SEQ ID NO: 214493 - RNA, 1410 nt, Artificial Sequence; identical to SEQ ID NO: 208810
  derived and/or modified CDS sequence (opt5) from neuraminidase__InfluenzaA__AFK14369

SEQ ID NO: 214494 - RNA, 1410 nt, Artificial Sequence
  derived and/or modified CDS sequence (opt5) from neuraminidase__InfluenzaA__AFK14387
augaaccccaaucagaagaucauuaccaucggcagcgugugcaugacaauugggauggccaaccugauccuccaaauuggaaauaucacguccaucuggauuucucacagcauccagcugggcaaccagaaucagauugacaccuguaaccaauccgucaucacauacgagaauaacaccuggguuaaucagacauaugugaacauuucuaauaccaacuucgcugccgggcagagcguggucuccgugaaacuugcgggaaauucuagccugugcccuguuuccggcugggcuaucuacagcaaggauaacucuauuagaaucggguccaaaggagacguguuugucauccgggaaccguucauuagcuguucuccccucgagugccgcacauuuuuccugacccagggcgcccuucugaaugauaagcauuccaacggcacgaucaaagacagaagcccuuaucggacccucaugucuugucccauuggggaagugccuucccccuacaacagccgcuuugaguccguugccuggucugcuagcgccugccacgauggaaucaauuggcugacaauuggcaucuccgggccugacaacggagcuguggccguccugaaguauaauggcaucauuaccgauacaaucaagagcuggagaaacaauauucuccggacccaagaaucugagugugcgugcgugaacggguccuguuucacggugaugacagacggaccgagcgauggccaggccucuuacaaaaucuuucgcauugagaagggcaaaaucgucaagagcguugaaaugaaugcucccaacuaucauuacgaggaaugcuccuguuacccugacucuagcgagauuaccugcgugugcagagauaauuggcacggguccaaccggcccugggugagcuucaaucagaaccuggaguaucagaucggauacaucuguucuggcauuuuuggggacaauccucgccccaacgauaaaacaggauccugcggcccggucagcucuaauggggccaacggagugaagggcuucuccuuuaaguauggcaacgggguuuggaucggaagaaccaaaagcauuuccucucggaauggcuucgaaaugaucugggacccuaacggguggaccggaacagacaauaacuuuagcauuaagcaagauaucgugggcaucaaugagugguccggguacucuggcagcuucguccagcaucccgaacuuacgggacuggacuguauucgcccuugcuucuggguggagcucaucagaggccggcccaaagaaaacaccauuuggacauccgggagcucuaucuccuuuuguggaguuaauagcgauaccgugggcuggucuuggcccgacggggcugagcugccuuucacaauugauaaguga

SEQ ID NO: 214495 - RNA, 1410 nt, Artificial Sequence; identical to SEQ ID NO: 209393
  derived and/or modified CDS sequence (opt5) from neuraminidase__InfluenzaA__AFK14397

SEQ ID NO: 214496 - RNA, 1410 nt, Artificial Sequence; identical to SEQ ID NO: 208810
  derived and/or modified CDS sequence (opt5) from neuraminidase__InfluenzaA__AFK14406

SEQ ID NO: 214497 - RNA, 1410 nt, Artificial Sequence; identical to SEQ ID NO: 208810
  derived and/or modified CDS sequence (opt5) from neuraminidase__InfluenzaA__AFK14415

SEQ ID NO: 214498 - RNA, 1410 nt, Artificial Sequence; identical to SEQ ID NO: 208810
  derived and/or modified CDS sequence (opt5) from neuraminidase__InfluenzaA__AFK14424

SEQ ID NO: 214499 - RNA, 1410 nt, Artificial Sequence
  derived and/or modified CDS sequence (opt5) from neuraminidase__InfluenzaA__AFK14433
augaaccccaaucagaagaucauuaccaucggcagcgugugcaugauuaucgggauggccaaccugauucuccaaaucggaaauaucauuuccaucuggauuucucacagcauccagcugggcaaccagaaucagauugagacauguaaccaauccgucaucacguacgaaaauaacaccuggguuaaucagacauaugugaacauuucuaauaccaacuucgcugccgggcagagcguggucuccgugaaacuugcgggaaauucuagccugugcccuguuuccggcugggcuaucuacagcaaggacaacucuaucagaauuggguccaaaggagauguguuugucauccgggagccguucauuagcuguucuccccucgaaugccgcacauuuuuccugacccagggcgcccuucugaaugacaagcauuccaacggcacaaucaaagauagaagcccuuaucggacccucaugucuugucccauuggggaggugccuucccccuacaacagccgcuuugaauccguugccuggucugcuagcgccugccacgacggaaucaauuggcugacgaucggcauuuccgggccugauaacggagcuguggccguccugaaguauaauggcaucauuaccgacacaaucaagagcuggagaaacaauauucuccggacccaagagucugagugugcgugcgugaacggguccuguuucacagugaugaccgauggaccgagcgacggccaggccucuuacaaaaucuuucgcaucgaaaagggcaaaauugucaagagcguugagaugaaugcucccaacuaucauuacgaagagugcuccuguuacccugauucuagcgagaucacgugcgugugcagagacaauuggcacggguccaaccggcccugggugagcuucaaucagaaccuggaauaucagauuggauacaucuguucuggcauuuuuggggauaauccucgccccaacgacaaaacaggauccugcggcccggucagcucuaauggggccaacggagugaagggcuucuccuuuaaguauggcaacgggguuuggaucggaagaaccaaaagcauuuccucucggaauggcuucgagaugaucugggauccuaacggguggacaggaaccgacaauaacuuuagcaucaagcaagacauugugggcaucaaugaaugguccggguacucuggcagcuucguccagcaucccgagcuuaccggacuggauuguauucgcccuugcuucuggguggaacucaucagaggccggcccaaagagaacacaauuuggacguccgggagcucuaucuccuuuuguggaguuaauagcgacaccgugggcuggucuuggcccgauggggcugagcugccuuucacaaucgacaaguga

SEQ ID NO: 214500 - RNA, 1410 nt, Artificial Sequence; identical to SEQ ID NO: 208810
  derived and/or modified CDS sequence (opt5) from neuraminidase__InfluenzaA__AFK14442

SEQ ID NO: 214501 - RNA, 1410 nt, Artificial Sequence
  derived and/or modified CDS sequence (opt5) from neuraminidase__InfluenzaA__AFK14451
augaaccccaaucagaagaucauuaccaucggcagcgugugcaugacaauugggauggccaaccugauccuccaaauuggaaauaucaucuccauuuggaucucucacagcauucagcugggcaaccagaaucagaucgagacguguaaccaauccgucauuaccuacgaaaauaacacauggguuaaucagaccuaugugaacaucucuaauacaaacuucgcugccgggcagagcguggcguccgcuaaacuugccggaaauucuagccugugcccugucuccggcugggccauuuacagcaaggacaacucuaucagaaucggguccaaaggagauguguuuguuauucgggagccguucaucagcuguucuccccucgaaugccgcaccuuuuuccugacacagggcgcccuucugaaugacaagcauuccaacggcaccauuaaagauagaagcccuuaucggacgcucaugucuugucccaucggggaggugccuucccccuacaacagccgcuuugaauccgucgcuuggucugcuagcgccugccacgacggaauuaauuggcugaccaucggcaucuccgggccugauaacggagcgguggccguucugaaguauaauggcauuaucacagacaccauuaagagcuggagaaacaauauccuccggacacaagagucugagugugcuugcgugaacggguccuguuucaccgucaugacggauggaccgagcgacggccaggccucuuacaaaauuuuucgcaucgaaaagggcaaaaucgucaagagcguggagaugaaugcucccaacuaucauuacgaagagugcuccuguuacccugauucuagcgagauuacaugcgugugcagagacaauuggcacggguccaaccggcccuggguuagcuucaaucagaaccuggaauaucagaucggauacauuuguucuggcaucuuuggggauaauccucgccccaacgacaaaaccggauccugcggcccggugagcucuaauggggccaacggagugaagggcuucuccuuuaaguauggcaacggggucuggauuggaagaacaaaaagcaucuccucucggaauggcuucgagaugauuugggauccuaacggguggaccggaaccgacaauaacuuuagcaucaagcaagacaucgugggcauuaaugaaugguccggguacucuggcagcuucguucagcaucccgagcuuacaggacuggauuguauccgcccuugcuucuggguggaacucauuagaggccggcccaaagagaacacgaucuggaccuccgggagcauuaucucuuuuuguggagucaauuccgacacagugggcuggagcuggcccgauggggcggagcugccuuucaccaucgacaaguga

SEQ ID NO: 214502 - RNA, 1410 nt, Artificial Sequence; identical to SEQ ID NO: 208810
  derived and/or modified CDS sequence (opt5) from neuraminidase__InfluenzaA__AFK14458

SEQ ID NO: 214503 - RNA, 1410 nt, Artificial Sequence; identical to SEQ ID NO: 208810
  derived and/or modified CDS sequence (opt5) from neuraminidase__InfluenzaA__AFK14467

SEQ ID NO: 214504 - RNA, 1410 nt, Artificial Sequence; identical to SEQ ID NO: 208810
  derived and/or modified CDS sequence (opt5) from neuraminidase__InfluenzaA__AFK14476

SEQ ID NO: 214505 - RNA, 1410 nt, Artificial Sequence; identical to SEQ ID NO: 211869
  derived and/or modified CDS sequence (opt5) from neuraminidase__InfluenzaA__AFK14485

SEQ ID NO: 214506 - RNA, 1410 nt, Artificial Sequence; identical to SEQ ID NO: 208810
  derived and/or modified CDS sequence (opt5) from neuraminidase__InfluenzaA__AFK14504

SEQ ID NO: 214507 - RNA, 1410 nt, Artificial Sequence; identical to SEQ ID NO: 208810
  derived and/or modified CDS sequence (opt5) from neuraminidase__InfluenzaA__AFK14514

SEQ ID NO: 214508 - RNA, 1410 nt, Artificial Sequence; identical to SEQ ID NO: 208810
  derived and/or modified CDS sequence (opt5) from neuraminidase__InfluenzaA__AFK14522

SEQ ID NO: 214509 - RNA, 1410 nt, Artificial Sequence; identical to SEQ ID NO: 208810
  derived and/or modified CDS sequence (opt5) from neuraminidase__InfluenzaA__AFK14529

SEQ ID NO: 214510 - RNA, 1410 nt, Artificial Sequence; identical to SEQ ID NO: 208810
  derived and/or modified CDS sequence (opt5) from neuraminidase__InfluenzaA__AFK14538

SEQ ID NO: 214511 - RNA, 1410 nt, Artificial Sequence; identical to SEQ ID NO: 211185
  derived and/or modified CDS sequence (opt5) from neuraminidase__InfluenzaA__AFK14547

SEQ ID NO: 214512 - RNA, 1410 nt, Artificial Sequence
  derived and/or modified CDS sequence (opt5) from neuraminidase__InfluenzaA__AFK14555
augaaccccaaucagaagaucauuaccaucggcagcgugugcaugacaauugggauggccaaccugauccuccaaauuggaaauaucaucuccauuuggaucucucacagcauucagcugggcaaccagaaucagaucgagacguguaaccaauccgucauuaccuacgaaaauaacacauggguuaaucagaccuaugugaacaucucuaauacaaacuucgcugccgggcagagcgugauuuccgucaaacuugcgggaaauucuagccugugcccuguguccggcugggcuaucuacagcaaggacaacucuaucagaauuggguccaaaggagauguuuuugugauccgggagccguucauuagcuguucuccccucgaaugccgcaccuuuuuccugacacagggcgcccuucugaaugacaagcauuccaacggcaccaucaaagauagaagcccuuaucggacgcucaugucuugucccauuggggaggucccuucccccuacaacagccgcuuugaauccguggccuggucugcuagcgccugccacgacggaaucaauuggcugaccaucggcauuuccgggccugauaacggagcuguugccgugcugaaguauaauggcaucauuacagacaccaucaagagcuggagaaacaauauucuccggacacaagagucugagugugcgugcgucaacggguccuguuucaccgugaugacggauggaccgagcgacggccaggccucuuacaaaaucuuucgcaucgaaaagggcaaaauugucaagagcguggagaugaaugcucccaacuaucauuacgaagagugcuccuguuacccugauucuagcgagaucacaugcguuugcagagacaauuggcacggguccaaccggcccugggugagcuucaaucagaaccuggaauaucagauuggauacaucuguucuggcauuuuuggggauaauccucgccccaacgacaaaaccggauccugcggcccggugagcucuaauggggccaacggagucaagggcuucuccuuuaaguauggcaacgggguguggaucggaagaacaaaaagcauuuccucucggaauggcuucgagaugaucugggauccuaacggguggaccggaaccgacaauaacuuuagcaucaagcaagacauuguuggcaucaaugaaugguccggguacucuggcagcuucgugcagcaucccgagcuuacaggacuggauuguauucgcccuugcuucugggucgaacucaucagaggccggcccaaagagaacacgauuuggaccuccgggagcucuaucuccuuuuguggagugaauagcgacacaguuggcuggucuuggcccgauggggcugagcugccuuucaccaucgacaaguga

SEQ ID NO: 214513 - RNA, 1410 nt, Artificial Sequence; identical to SEQ ID NO: 208810
  derived and/or modified CDS sequence (opt5) from neuraminidase__InfluenzaA__AFK14564

SEQ ID NO: 214514 - RNA, 1410 nt, Artificial Sequence; identical to SEQ ID NO: 208810
  derived and/or modified CDS sequence (opt5) from neuraminidase__InfluenzaA__AFK14573

SEQ ID NO: 214515 - RNA, 1410 nt, Artificial Sequence
  derived and/or modified CDS sequence (opt5) from neuraminidase__InfluenzaA__AFK14579
augaaccccaaucagaagaucauuaccaucggcagcgugugcaugacaauugggauggccaaccugauccuccaaauuggaaauaucaucuccauuuggaucucucacagcauucagcugggcaaccagaaucagaucgagacguguaaccaauccgucauuaccuacgaaaauaacacauggguuaaucagaccuaugugaacaucucuaauacaaacuucgcugccgggcagagcguggucuccgugaaacuugcgggaaauucuagccugugcccuguuuccggcugggcuauuuacagcaaggacaacucuaucagaaucggguccaaaggagauguguuugucauucgggagccguucaucagcuguucuccccucgaaugccgcaccuuuuuccugacacagggcgcccuucugaaugacaagcauuccaacggcaccauuaaagauagaagcccuuaucggacgcucaugucuugucccaucggggaggugccuucccccuacaacagccgcuuugaauccguugccuggucugcuagcgccugccacgacggaauuaauuggcugaccaucggcaucuccgggccugauaacggagcuguggccguccugaaguauaauggcauuaucacagacaccauuaagagcuggagaaacaauauccuccggacacaagagucugagugugcgugcgugaacggguccuguuucaccgugaugacggauggaccgagcgacggccaggccucuuacaaaauuuuucgcaucgaaaagggcaaaaucgucaagagcguugagaugaaugcucccaacuaucauuacgaagagugcuccuguuacccugauucuagcgagauuacaugcgugugcagagacaauuggcacggguccaaccggcccugggugagcuucaaucagaaccuggaauaucagaucggauacauguguucuggcauuuuuggggauaauccucgccccaacgacaaaaccggauccugcggcccggucagcucuaauggggccaacggagugaagggcuucuccuuuaaguauggcaacgggguuuggaucggaagaacaaaaagcauuuccucucggaauggcuucgagaugaucugggauccuaacggguggaccggaaccgacaauaacuuuagcauuaagcaagacaucgugggcaucaaugaaugguccggguacucuggcagcuucguccagcaucccgagcuuacaggacuggauuguauucgcccuugcuucuggguggaacucaucagaggccggcccaaagagaacacgauuuggaccuccgggagcucuaucuccuuuuguggaguuaauagcgacacagugggcuggucuuggcccgauggggcugagcugccuuucaccauugacaaguga

SEQ ID NO: 214516 - RNA, 1410 nt, Artificial Sequence; identical to SEQ ID NO: 208810
  derived and/or modified CDS sequence (opt5) from neuraminidase__InfluenzaA__AFK14588

SEQ ID NO: 214517 - RNA, 1410 nt, Artificial Sequence; identical to SEQ ID NO: 208810
  derived and/or modified CDS sequence (opt5) from neuraminidase__InfluenzaA__AFK14597

SEQ ID NO: 214518 - RNA, 1410 nt, Artificial Sequence; identical to SEQ ID NO: 208810
  derived and/or modified CDS sequence (opt5) from neuraminidase__InfluenzaA__AFK14604

SEQ ID NO: 214519 - RNA, 1410 nt, Artificial Sequence; identical to SEQ ID NO: 208810
  derived and/or modified CDS sequence (opt5) from neuraminidase__InfluenzaA__AFK14632

SEQ ID NO: 214520 - RNA, 1410 nt, Artificial Sequence; identical to SEQ ID NO: 208800
  derived and/or modified CDS sequence (opt5) from neuraminidase__InfluenzaA__AFK14641

SEQ ID NO: 214521 - RNA, 1410 nt, Artificial Sequence; identical to SEQ ID NO: 208810
  derived and/or modified CDS sequence (opt5) from neuraminidase__InfluenzaA__AFK14651

SEQ ID NO: 214522 - RNA, 1410 nt, Artificial Sequence; identical to SEQ ID NO: 208810
  derived and/or modified CDS sequence (opt5) from neuraminidase__InfluenzaA__AFK14656

SEQ ID NO: 214523 - RNA, 1410 nt, Artificial Sequence; identical to SEQ ID NO: 208810
  derived and/or modified CDS sequence (opt5) from neuraminidase__InfluenzaA__AFK14663

SEQ ID NO: 214524 - RNA, 1410 nt, Artificial Sequence; identical to SEQ ID NO: 208810
  derived and/or modified CDS sequence (opt5) from neuraminidase__InfluenzaA__AFK14672

SEQ ID NO: 214525 - RNA, 1410 nt, Artificial Sequence; identical to SEQ ID NO: 208810
  derived and/or modified CDS sequence (opt5) from neuraminidase__InfluenzaA__AFK14680

SEQ ID NO: 214526 - RNA, 1410 nt, Artificial Sequence; identical to SEQ ID NO: 208810
  derived and/or modified CDS sequence (opt5) from neuraminidase__InfluenzaA__AFK14690

SEQ ID NO: 214527 - RNA, 1410 nt, Artificial Sequence; identical to SEQ ID NO: 208810
  derived and/or modified CDS sequence (opt5) from neuraminidase__InfluenzaA__AFK14707

SEQ ID NO: 214528 - RNA, 1410 nt, Artificial Sequence; identical to SEQ ID NO: 208810
  derived and/or modified CDS sequence (opt5) from neuraminidase__InfluenzaA__AFK14715

SEQ ID NO: 214529 - RNA, 1410 nt, Artificial Sequence; identical to SEQ ID NO: 208810
  derived and/or modified CDS sequence (opt5) from neuraminidase__InfluenzaA__AFK14724

SEQ ID NO: 214530 - RNA, 1410 nt, Artificial Sequence; identical to SEQ ID NO: 208810
  derived and/or modified CDS sequence (opt5) from neuraminidase__InfluenzaA__AFK14733

SEQ ID NO: 214531 - RNA, 1410 nt, Artificial Sequence; identical to SEQ ID NO: 208810
  derived and/or modified CDS sequence (opt5) from neuraminidase__InfluenzaA__AFK14751

SEQ ID NO: 214532 - RNA, 1410 nt, Artificial Sequence; identical to SEQ ID NO: 208810
  derived and/or modified CDS sequence (opt5) from neuraminidase__InfluenzaA__AFK14757

SEQ ID NO: 214533 - RNA, 1410 nt, Artificial Sequence; identical to SEQ ID NO: 208810
  derived and/or modified CDS sequence (opt5) from neuraminidase__InfluenzaA__AFK14766

SEQ ID NO: 214534 - RNA, 1410 nt, Artificial Sequence; identical to SEQ ID NO: 209393
  derived and/or modified CDS sequence (opt5) from neuraminidase__InfluenzaA__AFK14774

SEQ ID NO: 214535 - RNA, 1410 nt, Artificial Sequence; identical to SEQ ID NO: 214512
  derived and/or modified CDS sequence (opt5) from neuraminidase__InfluenzaA__AFK14781

SEQ ID NO: 214536 - RNA, 1410 nt, Artificial Sequence; identical to SEQ ID NO: 209393
  derived and/or modified CDS sequence (opt5) from neuraminidase__InfluenzaA__AFK14790

SEQ ID NO: 214537 - RNA, 1410 nt, Artificial Sequence
  derived and/or modified CDS sequence (opt5) from neuraminidase__InfluenzaA__AFK14800
augaaccccaaucagaagaucauuaccaucggcagcgugugcaugacaauugggauggccaaccugauccuccaaauuggaaauaucaucuccauuuggaucucucacagcauucagcugggcaaccagaaucagaucgagacguguaaccaauccgucauuaccuacgaaaauaacacauggguuaaucagaccuaugugaacaucucuaauacaaacuucgcugccgggcagagcguggucuccgugaaacuugcgggaaauucuagccugugcccuguuuccggcugggcuauuuacagcaaggacaacucuaucagaaucggguccaaaggagauguguuugucauucgggagccguucaucagcuguucuccccucgaaugccgcaccuuuuuccugacacagggcgcccuucugaaugacaagcauuccaacggcaccauuaaagauagaagcccuuaucggacgcucaugucuugucccaucggggaggugccuucccccuacaacagccgcuuugaauccguugccuggucugcuagcgccugccacgacggaauuaauuggcugaccaucggcaucuccgggccugauaacggagcuguggccguccugaaguauaauggcauuaucacagacaccauuaagagcuggagaaacaauauccuccggacacaagagucugagugugcgugcgugaacggguccuguuucaccgugaugacggauggaccgagcgacggccaggccucuuacaaaauuuuucgcaucgaaaagggcaaaaucgucaagagcguugagaugaaugcucccaacuaucauuacgaagagugcuccuguuacccugauucuagcgagauuacaugcgugugcagagacaauuggcacggguccaaccggcccugggugagcuucaaucagaaccuggaauaucagaucggauacauuuguucuggcaucuuuggggauaauccucgccccaacgacaaaaccggauccugcggcccggucagcucuaauggggccaacggagugaagggcuucuccuuuaaguauggcaacgggguuuggauuggaagaacaaaaagcaucuccucucggaauggcuucgagaugauuugggauccuaacggguggaccggaaccgacaauaacuuuagcaucaagcaagacaucgugggcauuaaugaaugguccggguacucuggcagcuucguccagcaucccgagcuuacaggacuggauuguauccgcccuugcuucuggguggaacucauuagaggccggccccgcgagaacacgaucuggaccuccgggagcucuauuuccuuuuguggaguuaauagcgacacagugggcuggucuuggcccgauggggcugagcugccuuucaccaucgacaaauga

SEQ ID NO: 214538 - RNA, 1410 nt, Artificial Sequence; identical to SEQ ID NO: 210791
  derived and/or modified CDS sequence (opt5) from neuraminidase__InfluenzaA__AFK14809

SEQ ID NO: 214539 - RNA, 1410 nt, Artificial Sequence; identical to SEQ ID NO: 210791
  derived and/or modified CDS sequence (opt5) from neuraminidase__InfluenzaA__AFK14816

SEQ ID NO: 214540 - RNA, 1410 nt, Artificial Sequence; identical to SEQ ID NO: 208810
  derived and/or modified CDS sequence (opt5) from neuraminidase__InfluenzaA__AFK14824

SEQ ID NO: 214541 - RNA, 1410 nt, Artificial Sequence; identical to SEQ ID NO: 208810
  derived and/or modified CDS sequence (opt5) from neuraminidase__InfluenzaA__AFK14841

SEQ ID NO: 214542 - RNA, 1410 nt, Artificial Sequence; identical to SEQ ID NO: 209883
  derived and/or modified CDS sequence (opt5) from neuraminidase__InfluenzaA__AFK14849

SEQ ID NO: 214543 - RNA, 1410 nt, Artificial Sequence
  derived and/or modified CDS sequence (opt5) from neuraminidase__InfluenzaA__AFK14856
augaaccccaaucagaagaucauuaccaucggcagcgugugcaugacaauugggauggccaaccugauccuccaaauuggaaauaucaucuccauuuggaucucucacagcauucagcugggcaaccagaaucagaucgagacguguaaccaauccgucauuaccuacgaaaauaacacauggguuaaucagaccuaugugaacaucucuaauacaaacuucgcugccgggcagagcguggucuccgugaaacuugcgggaaauucuagccugugcccuguuuccggcugggcuauuuacagcaaggacaacucugugagaaucggguccaaaggagaugucuuugugauccgggagccguucauuagcuguucuccccucgaaugccgcaccuuuuuccugacacagggcgcccuucugaaugacaagcauuccaacggcaccaucaaagauagaagcccuuaucggacgcucaugucuugucccauuggggagguuccuucccccuacaacagccgcuuugaauccguggccuggucugcuagcgccugccacgacggaaucaauuggcugaccauuggcaucuccgggccugauaacggagcugucgccgugcugaaguauaauggcaucauuacagacaccaucaagagcuggagaaacaauauucuccggacacaagagucugagugugcgugcgugaacggguccuguuucaccgucaugacggauggaccgagcaauggccaggccucuuacaaaaucuuuaagauugaaaaaggcaagaucguuaaaagcguggagaugaacgcucccaauuaucauuacgaagagugcuccuguuacccugacucuagcgagaucacaugcgugugccgcgauaacuggcacggguccaauagacccugggucagcuucaaccagaaucuggaauaucagauuggauacaucuguucuggcauuuuuggggacaacccucggcccaucgauaagaccggauccugcggcccggugagcucuaauggggccaacggaguuaagggcuucuccuuuaaauauggcaacgggguguggauuggacgcacaaagagcaucuccucuagaaauggcuucgagaugauuugggacccuaacggguggaccggaaccgauaauaacuuuagcaucaaacaagacaucgucggcauuaaugaaugguccggguacucuggcagcuucgugcagcaucccgagcuuacaggacuggacuguauccggccuugcuucuggguugaacucauucgcggcagacccaaggagaacacgaucuggaccuccgggagcucuauuuccuuuuguggagugaauagcgauacagucggcuggucuuggcccgacggggcugagcugccuuucaccaucgauaaauga

SEQ ID NO: 214544 - RNA, 1410 nt, Artificial Sequence; identical to SEQ ID NO: 208810
  derived and/or modified CDS sequence (opt5) from neuraminidase__InfluenzaA__AFK14870

SEQ ID NO: 214545 - RNA, 1410 nt, Artificial Sequence; identical to SEQ ID NO: 208810
  derived and/or modified CDS sequence (opt5) from neuraminidase__InfluenzaA__AFK14879

SEQ ID NO: 214546 - RNA, 1410 nt, Artificial Sequence; identical to SEQ ID NO: 208810
  derived and/or modified CDS sequence (opt5) from neuraminidase__InfluenzaA__AFK14885

SEQ ID NO: 214547 - RNA, 1410 nt, Artificial Sequence; identical to SEQ ID NO: 208810
  derived and/or modified CDS sequence (opt5) from neuraminidase__InfluenzaA__AFK14894

SEQ ID NO: 214548 - RNA, 1410 nt, Artificial Sequence; identical to SEQ ID NO: 208810
  derived and/or modified CDS sequence (opt5) from neuraminidase__InfluenzaA__AFK14903

SEQ ID NO: 214549 - RNA, 1410 nt, Artificial Sequence; identical to SEQ ID NO: 208810
  derived and/or modified CDS sequence (opt5) from neuraminidase__InfluenzaA__AFK14912

SEQ ID NO: 214550 - RNA, 1410 nt, Artificial Sequence; identical to SEQ ID NO: 208810
  derived and/or modified CDS sequence (opt5) from neuraminidase__InfluenzaA__AFK14921

SEQ ID NO: 214551 - RNA, 1410 nt, Artificial Sequence; identical to SEQ ID NO: 208810
  derived and/or modified CDS sequence (opt5) from neuraminidase__InfluenzaA__AFK14931

SEQ ID NO: 214552 - RNA, 1410 nt, Artificial Sequence
  derived and/or modified CDS sequence (opt5) from neuraminidase__InfluenzaA__AFK25604
augaaccccaaucagaagaucauuaccaucggcagcgugugcaugacaauugggauggccaaccugauccuccaaauuggaaauaucaucuccauuuggaucucucacagcauucagcugagaaaccagucccagaucgagacguguaaucaaucugucauuaccuacgaaaacaauacauggguuaaccagaccuaugugaauaucagcaacacaaauuucgcugccggccaguccguggucucugugaaacuugcggggaacagcucccugugcccuguuagcggaugggcuauuuacucuaaggacaauuccauccggaucggcagcaaaggggauguguuugucauucgcgagccguucaucucuuguucuccccucgaaugcagaaccuuuuuccugacacagggagcccuucugaacgacaagcauagcaauggcaccauuaaagaucggucuccuuaucgcacgcucauguccugucccaucggcgaggugccuagccccuacaacuccagauuugaaucuguugccuggagcgcuuccgccugccacgacgggauuaacuggcugaccaucggaaucagcggcccugauaauggggcuguggccguccugaaguauaacggaauuaucacagacaccauuaagucuuggcggaauaacauccuccgcacacaagaguccgagugugcgugcgugaauggcagcuguuucaccauuaugacggaugggccgucugacggacaggccagcuacaaaaucuuuagaaucgaaaagggcaaaauugugaaguccgucgagaugaacgcucccaauuauuacuacgaagagugcucuuguuauccugauagcuccgagaucacaugcguuugccgggacaacuggcauggcagcaaucgccccugggugucuuucaaccagaaucuggaauaccagauuggguauaucuguuccggaauuuuuggcgauaacccuagacccaaugacaaaaccgggagcugcggaccggugucuuccaacggcgccaauggggucaagggauucagcuuuaaguacggcaacggcguguggaucgggcggacaaaauccauuucuagccgcaagggauucgagaugaucugggauccuaacggcuggaccgggaccgacaauaacuuuuccaucaaacaagacauuguuggaaucaaugaauggucuggcuauagcggguccuucgugcagcaccccgagcuuacaggccuggauuguauuagaccuugcuucugggucgaacucauccggggacgccccaaggagaacacgauuuggaccagcggcuccuccaucagcuuuugugggguuaauucugacacagugggaugguccuggcccgauggcgcugagcugccuuucaccaucgacaaauga

SEQ ID NO: 214553 - RNA, 1410 nt, Artificial Sequence; identical to SEQ ID NO: 214552
  derived and/or modified CDS sequence (opt5) from neuraminidase__InfluenzaA__AFK25606

SEQ ID NO: 214554 - RNA, 1410 nt, Artificial Sequence; identical to SEQ ID NO: 210161
  derived and/or modified CDS sequence (opt5) from neuraminidase__InfluenzaA__AFK74537

SEQ ID NO: 214555 - RNA, 1410 nt, Artificial Sequence; identical to SEQ ID NO: 208810
  derived and/or modified CDS sequence (opt5) from neuraminidase__InfluenzaA__AFK74547

SEQ ID NO: 214556 - RNA, 1410 nt, Artificial Sequence; identical to SEQ ID NO: 211802
  derived and/or modified CDS sequence (opt5) from neuraminidase__InfluenzaA__AFK74557

SEQ ID NO: 214557 - RNA, 1410 nt, Artificial Sequence; identical to SEQ ID NO: 208810
  derived and/or modified CDS sequence (opt5) from neuraminidase__InfluenzaA__AFK74567

SEQ ID NO: 214558 - RNA, 1410 nt, Artificial Sequence; identical to SEQ ID NO: 208810
  derived and/or modified CDS sequence (opt5) from neuraminidase__InfluenzaA__AFK74578

SEQ ID NO: 214559 - RNA, 1410 nt, Artificial Sequence; identical to SEQ ID NO: 213925
  derived and/or modified CDS sequence (opt5) from neuraminidase__InfluenzaA__AFK74588

SEQ ID NO: 214560 - RNA, 1410 nt, Artificial Sequence; identical to SEQ ID NO: 208810
  derived and/or modified CDS sequence (opt5) from neuraminidase__InfluenzaA__AFK74598

SEQ ID NO: 214561 - RNA, 1410 nt, Artificial Sequence; identical to SEQ ID NO: 208810
  derived and/or modified CDS sequence (opt5) from neuraminidase__InfluenzaA__AFK74608

SEQ ID NO: 214562 - RNA, 1410 nt, Artificial Sequence; identical to SEQ ID NO: 208810
  derived and/or modified CDS sequence (opt5) from neuraminidase__InfluenzaA__AFK74618

SEQ ID NO: 214563 - RNA, 1410 nt, Artificial Sequence; identical to SEQ ID NO: 208810
  derived and/or modified CDS sequence (opt5) from neuraminidase__InfluenzaA__AFK74628

SEQ ID NO: 214564 - RNA, 1410 nt, Artificial Sequence; identical to SEQ ID NO: 208810
  derived and/or modified CDS sequence (opt5) from neuraminidase__InfluenzaA__AFK74638

SEQ ID NO: 214565 - RNA, 1410 nt, Artificial Sequence; identical to SEQ ID NO: 208810
  derived and/or modified CDS sequence (opt5) from neuraminidase__InfluenzaA__AFK74648

SEQ ID NO: 214566 - RNA, 1410 nt, Artificial Sequence; identical to SEQ ID NO: 213934
  derived and/or modified CDS sequence (opt5) from neuraminidase__InfluenzaA__AFK74658

SEQ ID NO: 214567 - RNA, 1410 nt, Artificial Sequence; identical to SEQ ID NO: 213934
  derived and/or modified CDS sequence (opt5) from neuraminidase__InfluenzaA__AFK74668

SEQ ID NO: 214568 - RNA, 1410 nt, Artificial Sequence; identical to SEQ ID NO: 208810
  derived and/or modified CDS sequence (opt5) from neuraminidase__InfluenzaA__AFK74678

SEQ ID NO: 214569 - RNA, 1410 nt, Artificial Sequence; identical to SEQ ID NO: 208810
  derived and/or modified CDS sequence (opt5) from neuraminidase__InfluenzaA__AFK74688

SEQ ID NO: 214570 - RNA, 1410 nt, Artificial Sequence; identical to SEQ ID NO: 208810
  derived and/or modified CDS sequence (opt5) from neuraminidase__InfluenzaA__AFK74698

SEQ ID NO: 214571 - RNA, 1410 nt, Artificial Sequence; identical to SEQ ID NO: 213941
  derived and/or modified CDS sequence (opt5) from neuraminidase__InfluenzaA__AFK74708

SEQ ID NO: 214572 - RNA, 1410 nt, Artificial Sequence; identical to SEQ ID NO: 211802
  derived and/or modified CDS sequence (opt5) from neuraminidase__InfluenzaA__AFK74718

SEQ ID NO: 214573 - RNA, 1410 nt, Artificial Sequence; identical to SEQ ID NO: 208810
  derived and/or modified CDS sequence (opt5) from neuraminidase__InfluenzaA__AFK74728

SEQ ID NO: 214574 - RNA, 1410 nt, Artificial Sequence; identical to SEQ ID NO: 208810
  derived and/or modified CDS sequence (opt5) from neuraminidase__InfluenzaA__AFK74738

SEQ ID NO: 214575 - RNA, 1410 nt, Artificial Sequence; identical to SEQ ID NO: 208810
  derived and/or modified CDS sequence (opt5) from neuraminidase__InfluenzaA__AFK74748

SEQ ID NO: 214576 - RNA, 1410 nt, Artificial Sequence; identical to SEQ ID NO: 208810
  derived and/or modified CDS sequence (opt5) from neuraminidase__InfluenzaA__AFK74758

SEQ ID NO: 214577 - RNA, 1410 nt, Artificial Sequence; identical to SEQ ID NO: 208810
  derived and/or modified CDS sequence (opt5) from neuraminidase__InfluenzaA__AFK74768

SEQ ID NO: 214578 - RNA, 1410 nt, Artificial Sequence; identical to SEQ ID NO: 208810
  derived and/or modified CDS sequence (opt5) from neuraminidase__InfluenzaA__AFK74778

SEQ ID NO: 214579 - RNA, 1410 nt, Artificial Sequence; identical to SEQ ID NO: 211802
  derived and/or modified CDS sequence (opt5) from neuraminidase__InfluenzaA__AFK74788

SEQ ID NO: 214580 - RNA, 1410 nt, Artificial Sequence; identical to SEQ ID NO: 211802
  derived and/or modified CDS sequence (opt5) from neuraminidase__InfluenzaA__AFK74798

SEQ ID NO: 214581 - RNA, 1410 nt, Artificial Sequence; identical to SEQ ID NO: 211802
  derived and/or modified CDS sequence (opt5) from neuraminidase__InfluenzaA__AFK74808

SEQ ID NO: 214582 - RNA, 1410 nt, Artificial Sequence; identical to SEQ ID NO: 211802
  derived and/or modified CDS sequence (opt5) from neuraminidase__InfluenzaA__AFK74818

SEQ ID NO: 214583 - RNA, 1410 nt, Artificial Sequence; identical to SEQ ID NO: 208810
  derived and/or modified CDS sequence (opt5) from neuraminidase__InfluenzaA__AFK74828

SEQ ID NO: 214584 - RNA, 1410 nt, Artificial Sequence; identical to SEQ ID NO: 210701
  derived and/or modified CDS sequence (opt5) from neuraminidase__InfluenzaA__AFK74838

SEQ ID NO: 214585 - RNA, 1410 nt, Artificial Sequence; identical to SEQ ID NO: 208810
  derived and/or modified CDS sequence (opt5) from neuraminidase__InfluenzaA__AFK74848

SEQ ID NO: 214586 - RNA, 1410 nt, Artificial Sequence; identical to SEQ ID NO: 208810
  derived and/or modified CDS sequence (opt5) from neuraminidase__InfluenzaA__AFK74898

SEQ ID NO: 214587 - RNA, 1410 nt, Artificial Sequence; identical to SEQ ID NO: 208810
  derived and/or modified CDS sequence (opt5) from neuraminidase__InfluenzaA__AFK74908

SEQ ID NO: 214588 - RNA, 1410 nt, Artificial Sequence; identical to SEQ ID NO: 208810
  derived and/or modified CDS sequence (opt5) from neuraminidase__InfluenzaA__AFK74918

SEQ ID NO: 214589 - RNA, 1410 nt, Artificial Sequence; identical to SEQ ID NO: 208810
  derived and/or modified CDS sequence (opt5) from neuraminidase__InfluenzaA__AFK74928

SEQ ID NO: 214590 - RNA, 1410 nt, Artificial Sequence
  derived and/or modified CDS sequence (opt5) from neuraminidase__InfluenzaA__AFK74938
augaaccccaaucagaagaucauuaccaucggcagcgugugcaugacaauugggauggccaaccugauccuccaaauuggaaauaucaucuccauuuggaucucucacagcauucagcugggcaaccagaaucagaucgagacguguaaccaauccgucauuaccuacgaaaauaacacauggguuaaucagaccuaugugaacaucucuaauacaaacuucgcugccgggcagagcguggucuccgugaaacuugcgggaaauucuagccugugcccuguuuccggcugggcuauuuacagcaaggacaacucuaucagaaucggguccaaaggagauguguuugucauucgggagccguucaucagcuguucuccccucgaaugccgcaccuuuuuccugacacagggcgcccuucugaaugacaagcauuccaacggcaccauuaaagauagaagcccuuaucggacgcucaugucuugucccaucggggaggugccuucccccuacaacagccgcuuugaauccguugccuggucugcuagcgccugccacgacggaauuaauuggcugaccaucggcaucuccgggccugauaacggagcuguggccguccugaaguauaauggcauuaucacagacaccauuaagagcuggagaaacaauauccuccggacacaagagucugagugugcgugcgugaacggguccuguuucaccgugaugacggauggaccgagcgacggccaggccucuuacaaaauuuuucgcaucgaaaagggcaaaaucgucaagagcguugagaugaaugcucccaacuaucauuacgaagagugcuccuguuacccugauucuagcgagauuacaugcgugugcagagacaauuggcacggguccaaccggcccugggugagcuucaaucagaaccuggaauaucagaucggauacauuuguucuggcaucuuuggggauaauccucgccccaacgacaauaccggauccugcggcccggucagcucuaacggggccaacggagugaaaggcuucuccuuuaaguauggcaaugggguuuggauuggaagaacaaagagcaucuccucucggaacggcuucgagaugauuugggauccuaauggguggaccggaaccgacaacaauuuuagcaucaaacaagacaucgugggcauuaacgaaugguccggguacucuggcagcuucguccagcaucccgagcuuacaggacuggauuguauccgcccuugcuucuggguggaacucauuagaggccggcccaaggagaauacgaucuggaccuccgggagcucuauuuccuuuuguggaguuaacagcgacacagugggcuggucuuggcccgauggggcugagcugccuuucaccaucgacaaauga

SEQ ID NO: 214591 - RNA, 1410 nt, Artificial Sequence; identical to SEQ ID NO: 208810
  derived and/or modified CDS sequence (opt5) from neuraminidase__InfluenzaA__AFK74948

SEQ ID NO: 214592 - RNA, 1410 nt, Artificial Sequence; identical to SEQ ID NO: 210701
  derived and/or modified CDS sequence (opt5) from neuraminidase__InfluenzaA__AFK74958

SEQ ID NO: 214593 - RNA, 1410 nt, Artificial Sequence; identical to SEQ ID NO: 211802
  derived and/or modified CDS sequence (opt5) from neuraminidase__InfluenzaA__AFK74968

SEQ ID NO: 214594 - RNA, 1410 nt, Artificial Sequence; identical to SEQ ID NO: 208810
  derived and/or modified CDS sequence (opt5) from neuraminidase__InfluenzaA__AFK74978

SEQ ID NO: 214595 - RNA, 1410 nt, Artificial Sequence; identical to SEQ ID NO: 210701
  derived and/or modified CDS sequence (opt5) from neuraminidase__InfluenzaA__AFK74988

SEQ ID NO: 214596 - RNA, 1410 nt, Artificial Sequence; identical to SEQ ID NO: 208810
  derived and/or modified CDS sequence (opt5) from neuraminidase__InfluenzaA__AFK74998

SEQ ID NO: 214597 - RNA, 1410 nt, Artificial Sequence; identical to SEQ ID NO: 211802
  derived and/or modified CDS sequence (opt5) from neuraminidase__InfluenzaA__AFK75008

SEQ ID NO: 214598 - RNA, 1410 nt, Artificial Sequence; identical to SEQ ID NO: 208810
  derived and/or modified CDS sequence (opt5) from neuraminidase__InfluenzaA__AFK75018

SEQ ID NO: 214599 - RNA, 1410 nt, Artificial Sequence; identical to SEQ ID NO: 208810
  derived and/or modified CDS sequence (opt5) from neuraminidase__InfluenzaA__AFK75028

SEQ ID NO: 214600 - RNA, 1410 nt, Artificial Sequence; identical to SEQ ID NO: 208810
  derived and/or modified CDS sequence (opt5) from neuraminidase__InfluenzaA__AFK75038

SEQ ID NO: 214601 - RNA, 1410 nt, Artificial Sequence; identical to SEQ ID NO: 208810
  derived and/or modified CDS sequence (opt5) from neuraminidase__InfluenzaA__AFK75048

SEQ ID NO: 214602 - RNA, 1410 nt, Artificial Sequence; identical to SEQ ID NO: 208810
  derived and/or modified CDS sequence (opt5) from neuraminidase__InfluenzaA__AFK75058

SEQ ID NO: 214603 - RNA, 1410 nt, Artificial Sequence; identical to SEQ ID NO: 211802
  derived and/or modified CDS sequence (opt5) from neuraminidase__InfluenzaA__AFK75068

SEQ ID NO: 214604 - RNA, 1410 nt, Artificial Sequence; identical to SEQ ID NO: 208810
  derived and/or modified CDS sequence (opt5) from neuraminidase__InfluenzaA__AFK75078

SEQ ID NO: 214605 - RNA, 1410 nt, Artificial Sequence; identical to SEQ ID NO: 208810
  derived and/or modified CDS sequence (opt5) from neuraminidase__InfluenzaA__AFK75088

SEQ ID NO: 214606 - RNA, 1410 nt, Artificial Sequence; identical to SEQ ID NO: 208810
  derived and/or modified CDS sequence (opt5) from neuraminidase__InfluenzaA__AFK75098

SEQ ID NO: 214607 - RNA, 1410 nt, Artificial Sequence; identical to SEQ ID NO: 210723
  derived and/or modified CDS sequence (opt5) from neuraminidase__InfluenzaA__AFK75108

SEQ ID NO: 214608 - RNA, 1410 nt, Artificial Sequence; identical to SEQ ID NO: 208810
  derived and/or modified CDS sequence (opt5) from neuraminidase__InfluenzaA__AFK77860

SEQ ID NO: 214609 - RNA, 1410 nt, Artificial Sequence; identical to SEQ ID NO: 208810
  derived and/or modified CDS sequence (opt5) from neuraminidase__InfluenzaA__AFK77870

SEQ ID NO: 214610 - RNA, 1410 nt, Artificial Sequence; identical to SEQ ID NO: 208810
  derived and/or modified CDS sequence (opt5) from neuraminidase__InfluenzaA__AFK77880

SEQ ID NO: 214611 - RNA, 1410 nt, Artificial Sequence
  derived and/or modified CDS sequence (opt5) from neuraminidase__InfluenzaA__AFK77890
augaaccccaaucagaagaucauuaccaucggcagcgugugcaugacaauugggauggccaaccugauccuccaaauuggaaauaucaucuccauuuggaucucucacagcauucagcugggcaaccagaaucagaucgagacguguaaccaauccgucauuaccuacgaaaauaacacauggguuaaucagaccuaugugaacaucucuaauacaaacuucgcugccgggcagagcguggucuccgugaaacuugcgggaaauucuagccugugcccuguuuccggcugggcuauuuacagcaaggacaacucuaucagaaucggguccaaaggagauguguuugucauucgggagccguucaucagcuguucuccccucgaaugccgcaccuuuuuccugacacagggcgcccuucugaaugacaagcauuccaacggcaccauuaaagauagaagcccuuaucggacgcucaugucuugucccaucggggaggugccuucccccuacaacagccgcuuugaauccguugccuggucugcuagcgccugccacgacggaauuaauuggcugaccaucggcaucuccgggccugauaacggagcuguggccguccugaaguauaauggcauuaucacagacaccauuaagagcuggagaaacaauauccuccggacacaagagucugagugugcgugcgugaacggguccuguuucaccgugaugacggauggaccgagcgacggccaggccucuuacaaaauuuuucgcaucgaaaagggcaaaaucgucaagagcguugagaugaaugcucccaacuaucauuacgaagagugcuccuguuacccugauucuagcgagauuacaugcgugugcagagacaauuggcacggguccaaccggcccugggugagcuucaaucagaaccuggaauaucagaucggauacauuuguucuggcaucuuuggggauaauccucgccccaacgacaaaaccggauccugcggcccggucagcucuaauggggccaacggagugaagggcuucuccuuuaaguauggcaacgggguuuggauuggaagaacaaaaggcaucagcucccggaauggguucgagaugauuugggauccuaacggauggaccggcaccgacaauaacuuuucuaucaagcaagacaucguggggauuaaugaauggagcggcuacuccggaucuuucguccagcaucccgagcuuacaggccuggauuguauccgcccuugcuucuggguggaacucauuagagggcggcccaaagagaacacgaucuggaccagcggauccagcauuucuuuuuguggcguuaauuccgacacagugggguggagcuggcccgauggagcugagcugccuuucaccaucgacaaguga

SEQ ID NO: 214612 - RNA, 1410 nt, Artificial Sequence
  derived and/or modified CDS sequence (opt5) from neuraminidase__InfluenzaA__AFK77900
augaaccccaaucagaagaucauuaccaucggcagcgugugcaugacaauugggauggccaaccugauccuccaaauuggaaauaucaucuccauuuggaucucucacagcauucagaucggcaaccagaaucagauugagacguguaaccaauccgucaucaccuacgaaaauaacacauggguuaaucagaccuaugugaacauuucuaauacaaacuucgcugccgggcagagcguggcguccgucaaacuggcuggaaauucuagccuuugcccuguguccggcugggccaucuacagcaaggacaacucuaucagaauuggguccaaaggagauguuuuugugauccgggagccguucauuagcuguucuccccuggaaugccgcaccuuuuuccucacacagggcgcccugcuuaaugacaagcauuccaacggcaccaucaaagauagaagcccuuaucgggcucugaugucuugucccauuggggaggucccuucccccuacaacagccgcuuugaauccguggccuggucugcuagcgccugccacgacggaaucaauuggcucacgaucggcauuuccgggccugauaacggagcgguugccgugcugaaguauaauggcaucauuaccgacacaaucaagagcuggagaaacaauauucugcggacccaagagucugagugugcuugcgucaacggguccuguuucacaaucaugaccgauggaccgagcgacggccaggccucuuacaaaaucuuucgcauugaaaagggcaaaaucgucaagagcguggagaugaaugcucccaacuaucauuacgaagagugcuccuguuacccugauucuagcgagauuacgugcgugugcagagacaauuggcacggguccaaccggcccuggguuagcuucaaucagaaccucgaauaucagaucggauacauuuguucuggcaucuuuggggauaauccucgccccaacgacaaaacaggauccugcggcccggugagcucuaauggggccaacggagugaagggcuucuccuuuaaguauggcaacggggucuggauuggaagaaccaaaagcaucuccucucggaagggcuucgagaugaucugggauccuaauggguggacaggaaccgacaacaauuuuagcauuaaacaagacaucgugggcaugaacgaaugguccggguacucuggcagcuucguucagcaucccgagcugaccggacuugauuguauucgcccuugcuucuggguggaacugaucagaggccggcccaaggagaauacaauuuggacguccgggagcucuaucuccuuuuguggagucaacagcgacaccgugggcuggucuuggcccgauggggcggagcucccuuucacaaucgacaaauga

SEQ ID NO: 214613 - RNA, 1410 nt, Artificial Sequence
  derived and/or modified CDS sequence (opt5) from neuraminidase__InfluenzaA__AFK78031
augaaccccaaucagaagaucauuaccaucggcagcgugugcaugacaauugggauggccaaccugauccuccaaauuggaaauaucaucuccauuuggaucucucacagcauucagcugggcaaccagaaucagaucgagacguguaaccaauccgucauuaccuacgaaaauaacacauggguuaaucagaccuaugugaacaucucuaauacaaacuucgcugccgggcagagcguggcguccgucaaacuugcuggaaauucuagccugugcccuguguccggcugggccauuuacagcaaggacaacucuaucagaaucggguccaaaggagauguuuuugugauucgggagccguucaucagcuguucuccccucgaaugccgcaccuuuuuccugacacagggcgcccuucugaaugacaagcauuccaacggcaccauuaaagauagaagcccuuaucgggcucucaugucuugucccaucggggaggucccuucccccuacaacagccgcuuugaauccguggccuggucugcuagcgccugccacgacggaauuaauuggcugacgaucggcaucuccgggccugauaacggagcgguugccgugcugaaguauaauggcauuaucaccgacacaauuaagagcuggagaaacaauauccuccggacccaagagucugagugugcuugcgucaacggguccuguuucacaauuaugaccgauggaccgagcgacggccaggccucuuacaaaaucuuucgcaucgaaaagggcaaaauugucaagagcguggagaugaaugcucccaacuaucauuacgaagagugcuccuguuacccugauucuagcgagaucacgugcgugugcagagacaauuggcacggguccaaccggcccuggguuagcuucaaucagaaccuggaauaucagauuggauacaucuguucuggcauuuuuggggauaauccucgccccaacgacaaaacaggauccugcggcccggugagcucuaauggggccaacggagugaagggcuucuccuuuaaguauggcaacggggucuggaucggaagaaccaaaagcauuuccucucggaagggcuucgagaugaucugggauccuaauggguggacaggaaccgacaacaauuuuagcaucaaacaagacauugugggcaugaacgaaugguccggguacucuggcagcuucguucagcaucccgagcuuaccggacuggauuguauccgcccuugcuucuggguggaacucauuagaggccggcccaaggagaauacaaucuggacguccgggagcucuauuuccuuuuguggagucaacagcgacaccgugggcuggucuuggcccgauggggcggagcugccuuucacaaucgacaaauga

SEQ ID NO: 214614 - RNA, 1410 nt, Artificial Sequence; identical to SEQ ID NO: 208810
  derived and/or modified CDS sequence (opt5) from neuraminidase__InfluenzaA__AFK78190

SEQ ID NO: 214615 - RNA, 1362 nt, Artificial Sequence
  derived and/or modified CDS sequence (opt5) from neuraminidase__InfluenzaA__AFM68957
augaaccccaaucagaagaucauuaccaucggcagcauuugcaugguggucgggaucauuucccugauccuccaaaucggaaacauuaucucuauuuggaucagccacuccauucagacaggcaaucagaaccauacggggaucuguaaucagggaauuaucacccacaacguuguggccggccaagacucuacaagcgugauccugaccggaaauuccucucuuugcccuauuagaggaugggcuauccauagcaaagauaacggcauucggaucggcuccaagggggacgucuucgugauucgcgagccguuuaucagcuguucucaccuggaaugcagaacauucuuucucacccagggagcccugcuuaaugauaaacauuccuacggcacaagcaaggaccggucucccuaucgcgcgcugauguccuguccuguuggggaggcucccagcccuuacaacucuagauucgaauccguggccuggagcgccuccgcuugccacgauggaaugggcuggcucaccaucgggauuucuggacccgacaauggcgccgucgcugugcugaaauauaacggcaucauuacggagaccaucaagagcuggcggaagaaaauucugcgcacacaggaauccgaguguaccugcguuaaugggagcuguuuuacaaucaugaccgauggaccuucugacggccucgccuccuacaagaucuucaaaauugagaaggggaaagugacgaagucuaucgaacugaacgcgccgaauagccacuaugaggaaugcagcuguuaccccgauacaggaaaggucaugugcgugugcagagacaacuggcauggcuccaaccggccuugggugucuuuugaucagaaucuugacuaucaaauuggguacaucuguagcggagucuucggcgauaacccccgcccuaaagacggcaccggguccugcggacccguuagcgccgacggcgcuaauggggugaagggauuuucuuacagauauggcaacgggguguggauuggccggacaaaauccgauagcucucgccacggauucgagaugaucugggacccgaauggcuggaccgagaccgauuccagauuuagcguccggcaggacgugguugccaugacagaucgcuccggguacucugggagcuucgugcagcauccugaacugacgggccucgacuguaugagacccugcuuuugggucgagcugauucgggggcagccugaagaggaaaccaucuggacauccggaucuaucauuagcuucuguggcgugaacuccgauaccguugacuggagcuggcccgauggggcugagcuucccuucacaaucgacaaguga

SEQ ID NO: 214616 - RNA, 1410 nt, Artificial Sequence
  derived and/or modified CDS sequence (opt5) from neuraminidase__InfluenzaA__AFM68968
augaaccccaaucagaagaucauuaccaucggcagcgugucccugacaauugccacgaucugcuuccucaugcaaauugcuauccuggucaccacaguuacccuucacuuuaaacaguacgagugugacucuccugccaacaaucaggugaugccgugcgaacccaucauuaucgagagaaacauuacagaaaucguguaucugaccaauacaaccauugagaaggaaaucuguccuaaacucgucgaguaccggaacuggagcaagccccagugcaaaauuacgggguucgcgccuuuuuccaaggauaauucuauccgccugagcgcuggaggcgacaucugggugaccagagagcccuauguuuccugugauccugggaagugcuaccaauucgcccuuggacagggcacaacccuggacaacaaacauucuaaugauacaauucacgaccggaccccgcaucgcacgcuccugaugaacgaacugggggugcccuuucaccucggaacaagacaggucuguaucgccuggagcuccagcucuugccaugauggcaaggcuuggcugcacguguguguuaccggcuaugacaaaaaugccacagcuuccuucauuuacgaugggcggcuuguggacagcaucggaucuugguccaagaacauucugcgcacccaggagagcgaaugcgucuguaucaaugggaccugcacaguggugaugacggauggcucugccuccgagagagcggacaccaaaauccucuuuauugaggaaggaaagaucguccacauuagcccucuguccggcucugcccaacauguugaggaaugcagcuguuauccccgguacccuggggugcgcugcguguguagagauaacuggaagggauccaaucggcccaucgucgacauuaacgugaaagacuacagcaucgcuucuuccuauguuugcagcggccuugugggcgauacaccgcgcaagaacgacagaucuagcuccucuuacugucggaauccuaacaaugagaaagggaaccacggagucaagggcugggccuucgaugacgggaaugauguguggaugggacgcaccaucagcgaagaguccagaagcggcuaugagacauuuaaaguuauugggggauggucuacccccaacuccaagcugcagaucaauagacaggugauugucgacagcgauaaccggucuggcuacuccggcaucuucagcguggaagggaaauccugcauuaaucgcuguuuuuaugucgagcucauccggggaagagaacaggagacgcgcgugugguggacaucuaacagcauuguuguguucugcggcaccuccgggaccuacggaacaggcucuuggccugacggggcugauaucaaucugaugcccaucuga

SEQ ID NO: 214617 - RNA, 1410 nt, Artificial Sequence
  derived and/or modified CDS sequence (opt5) from neuraminidase__InfluenzaA__AFM68979
augaaccccaaucagaagaucauuaccaucggcagcgugucccugacaauugccacgaucugcuuccucaugcaaauugcuauccuggucaccacaguuacccuucacuuuaaacaguacgaguguucuagcccuccgaacaaucaggugaugcccugcgaaccuaucauuaucgagagaaacauuacagaaaucguguaucugaccaauacaaccauugagaaggaaaucugucccaaacucgucgaguaccggaacugguccaagccucagugcaaaauuacgggguucgcccccuuuucuaaggacaauagcauccgccuguccgcgggaggcgggaucugggugaccagagagccuuauguuucuugugauccgggaaagugcuaccaauucgcucuuggccaggggacaacccuggacaacaaacauagcaaugauacaauucacgaccggacccccuaucgcacgcuccugaugaacgaacugggagugccuuuucaucucggcacaagacaggucuguaucgccugguccuccucuuccugccacgauggcaaggccuggcugcauguguguguuaccggguacgacaaaaaugcuacagccagcuucauuuaugauggacggcuuguggacucuaucggcuccuggagcaagaacauucugcgcacccaggagucugaaugcgucuguaucaaugggaccugcacaguggugaugacggauggauccgcuagcgagagagccgacaccaaaauccucuuuauugaggaaggcaagaucguccacauuagcccccugucugggagcgcgcaacacguugaggaaugcuccuguuacccucgguaccccggagugcgcugcguguguagagauaacuggaagggcagcaaucggccggucguggacaucaacguuaaagauuauucuauuguguccagcuacgucugcucuggccuugugggggacacaccucgcaagaacgacagaagcuccucuagcuauugucggaaucccaacaaugagaaaggaaaccauggcguuaaggggugggccuucgaugacggaaaugauguguggaugggccgcaccaucuccgaagagagcagaucuggguacgagacauuuaaagucaucggaggcugguccaccccuaacagcaagcugcagauuaauagacaggugaucgucgacucugauaaccgguccggcuauagcgggauuuucuccguggaaggaaaaucuugcaucaaucgcuguuuuuacguugagcucauucggggcagagaacaggagacgcgcgugugguggacaagcaacuccaucgucguguucugcgggaccucuggaaccuauggcacagggagcuggcccgacggcgcugauauuaaucugaugcccaucuga

SEQ ID NO: 214618 - RNA, 1410 nt, Artificial Sequence; identical to SEQ ID NO: 214617
  derived and/or modified CDS sequence (opt5) from neuraminidase__InfluenzaA__AFM68990

SEQ ID NO: 214619 - RNA, 1410 nt, Artificial Sequence; identical to SEQ ID NO: 206885
  derived and/or modified CDS sequence (opt5) from neuraminidase__InfluenzaA__AFM71723

SEQ ID NO: 214620 - RNA, 1410 nt, Artificial Sequence; identical to SEQ ID NO: 214207
  derived and/or modified CDS sequence (opt5) from neuraminidase__InfluenzaA__AFM71734

SEQ ID NO: 214621 - RNA, 1410 nt, Artificial Sequence; identical to SEQ ID NO: 214021
  derived and/or modified CDS sequence (opt5) from neuraminidase__InfluenzaA__AFM71745

SEQ ID NO: 214622 - RNA, 1410 nt, Artificial Sequence; identical to SEQ ID NO: 210681
  derived and/or modified CDS sequence (opt5) from neuraminidase__InfluenzaA__AFM71771

SEQ ID NO: 214623 - RNA, 1410 nt, Artificial Sequence; identical to SEQ ID NO: 213707
  derived and/or modified CDS sequence (opt5) from neuraminidase__InfluenzaA__AFM71782

SEQ ID NO: 214624 - RNA, 1410 nt, Artificial Sequence; identical to SEQ ID NO: 213707
  derived and/or modified CDS sequence (opt5) from neuraminidase__InfluenzaA__AFM71794

SEQ ID NO: 214625 - RNA, 1410 nt, Artificial Sequence; identical to SEQ ID NO: 208671
  derived and/or modified CDS sequence (opt5) from neuraminidase__InfluenzaA__AFM71805

SEQ ID NO: 214626 - RNA, 1410 nt, Artificial Sequence
  derived and/or modified CDS sequence (opt5) from neuraminidase__InfluenzaA__AFM71827
augaaccccaaucagaagaucauuaccaucggcagcgugucccugacaauuucuacgaucugcuucuuuaugcaaauugccauccucaucaccacagucacccugcacuucaaacaguacgaguuuaacagcccuccgaauaaccagguuaugcuuugugaacccacaauuaucgagagaaauauuaccgaaaucguguaucugacaaacaccacgauugagaaggaaaucugcccuaaacucgcugaguaccggaauugguccaagccccagugugacauuaccggguucgccccuuuuucuaaagauaacagcauccgccuguccgcgggaggcgacaucugggugacaagagagcccuaugucucuugcgauccugacaaguguuaccaauucgcucuugggcagggaaccacacugaauaacgugcauagcaauaacaccguucgggaucgcacgccguauagaacacuccugaugaaugaacugggcgugcccuuucaccucgggaccaagcaggucugcauugccugguccucuagcuccugucaugacggaaaagccuggcugcacgugugcaucacaggcgaugacaagaacgcuaccgccagcuucauuuacaauggccggcuuguugauucuguggucuccuggagcaaagagauccugcgcacccaggaaucugagugugugugcauuaacgggacauguacgguggucaugaccgacggauccgcuagcggcaaggccgauacaaaaauccucuuuaucgaggaagggaagauuguucauaccuccacacugucuggaagcgcgcaacacguggaggaaugcuccugcuauccuagauaccccggcgugcggugugucugccgcgacaacuggaaggggagcaauagaccuaucguggauauuaacaucaaagaccacucuauuguuuccagcuacguguguucuggacuugucggcgacacgccccggaagaaugauagcuccucuagcucccauugccuggacccgaacaaugaggaaggcgggcacggagugaaaggcugggccuucgaugacgggaaggauguuuggaugggacgcaccaucagcgagaaaucuagacucggcuaugagacauuuaaggugaucgaagggugguccaacccuaaaagcaagcugcagauuaaucggcaggucaucguggaccgcggaaacagaucuggcuacuccggcauuuucagcgucgaggggaaguccuguaucaaucggugcuuuuauguggaacugauuagaggacgcaaagaggaaaccgagguucucuggaccucuaacagcaucguggucuucuguggcacauccgggaccuacggaacaggcucuuggcccgauggggcugacauuaaucugaugccuaucuga

SEQ ID NO: 214627 - RNA, 1410 nt, Artificial Sequence; identical to SEQ ID NO: 211590
  derived and/or modified CDS sequence (opt5) from neuraminidase__InfluenzaA__AFM71838

SEQ ID NO: 214628 - RNA, 1365 nt, Artificial Sequence; identical to SEQ ID NO: 207791
  derived and/or modified CDS sequence (opt5) from neuraminidase__InfluenzaA__AFM71849

SEQ ID NO: 214629 - RNA, 1410 nt, Artificial Sequence; identical to SEQ ID NO: 206167
  derived and/or modified CDS sequence (opt5) from neuraminidase__InfluenzaA__AFM71860

SEQ ID NO: 214630 - RNA, 1410 nt, Artificial Sequence; identical to SEQ ID NO: 206399
  derived and/or modified CDS sequence (opt5) from neuraminidase__InfluenzaA__AFM71871

SEQ ID NO: 214631 - RNA, 1410 nt, Artificial Sequence; identical to SEQ ID NO: 206399
  derived and/or modified CDS sequence (opt5) from neuraminidase__InfluenzaA__AFM71882

SEQ ID NO: 214632 - RNA, 1410 nt, Artificial Sequence
  derived and/or modified CDS sequence (opt5) from neuraminidase__InfluenzaA__AFM71893
augaaccccaaucagaagaucauuaccaucggcagcgugucccugacaauugccacggucugcuuccucaugcaaaucgcuauucuggccaccacaguuacccuucacuuuaaacagcaugagugugacucuccugcgagcaaccaggugaugccgugcgaacccaucaucauugagagaaauaucacagaaauuguguaccugaacaauaccacaaucgagaaggaaauuuguccugaggucguggaguaucggaacugguccaaaccccagugccaaaucaccggguucgcuccuuuuucuaaggauaauagcauucgccucuccgccggaggcgacaucuggguuacgagagaacccuacgugucuugugauccugggaaaugcuaucaguucgcccugggacagggcaccacacuugacaacaagcacagcaaugggaccauccaugaucggauuccgcaccgcacacugcucaugaacgagcugggaguccccuuucaucugggcaccaaacagguguguguugcuugguccucuagcuccugccacgacggcaaggccuggcuccacgugugugucacgggggaugacagaaaugcuacagccagcuucaucuacgauggacggcugguggacucuauuggcuccuggagccaaaacauccuucgcacccaggaaucugagugcguguguauuaaugggacaugcaccgucguuaugaccgauggauccgcgagcggcagagccgacacacggauccuguuuaucaaggaggggaaaauugugcauaucuccccucucucuggaagcgcucagcacauugaagagugcuccuguuauccccgcuacccugaugugagaugcaucugucgggacaacuggaagggcagcaaucgccccgucauugacaucaacauggaagauuauucuaucgacuccagcuacgugugcucuggccugguuggggauacgccgagaaacgacgauagcuccucuaauagcaacugucgggacccuaauaacgagcgcggaaaucccggcgugaaagggugggccuucgauaacggagacgaugucuggaugggcagaaccauuaauaaggaaucccggagcggguacgagacauuuaaggugaucggaggcuggucuaccccuaacuccaaaagccagguuaauagacaagugauugucgacaacaauaacuggucuggcuauuccgggaucuucagcguggagggaaaguccugcauuaaucgcuguuuuuacgucgaacuuauccggggcagaccccaggagacacgcgugugguggaccucuaacagcauuguuguguucugcgggacguccggaacauauggcaccgggucuuggcccgauggcgcuaauaucaacuuuaugccuaucuga

SEQ ID NO: 214633 - RNA, 1410 nt, Artificial Sequence
  derived and/or modified CDS sequence (opt5) from neuraminidase__InfluenzaA__AFM71904
augaaccccaaucagaagaucauuaccaucggcagcgugucccugacaauugccacggucugcuuccucaugcaaaucgcuauucuggccaccacaguuacccuucacuuuaaacagcaugagugugacucuccugcgagcaaccaggugaugccgugcgaacccaucaucauugagagaaauaucacagaaauuguguaccugaacaauaccacaaucgagaaggaaauuuguccugaggucguggaguaucggaacugguccaaaccccagugccaaaucaccggguucgcuccuuuuucuaaggauaauagcauucgccucuccgccggaggcgacaucuggguuacgagagaacccuacgugucuugugauccugggaaaugcuaucaguucgcccugggacagggcaccacacuugacaacaagcacagcaaugucaccauccaugaucggauuccgcaccgcacacugcucaugaacgagcugggggugcccuuucaucugggaaccaagcagguuuguguggcuugguccucuagcuccugccacgacggcaaagccuggcuccacgucugugugacgggcgaugacagaaaugcuacagccagcuucaucuacgaugggcggcugguggacucuauuggauccuggagccaaaacauccuucgcacccaggaaucugagugcgucuguauuaauggcacaugcaccguugugaugaccgauggguccgcgagcggcagagccgacacacggauccuguuuaucaaggagggaaaaauugugcauaucuccccucucucugggagcgcucagcacauugaagagugcuccuguuauccccgcuacccugaugucagaugcaucugucgggacaacuggaagggaagcaaucgccccgugauugacaucaacauggaagauuauucuaucgacuccggcuacguuugcagcggccuggugggggauacgccgagaaacgacgauucuagcuccaauucuaacugucgggacccuaauaacgagcgcggaaaucccggcgucaaagggugggccuucgauaacggagacgauguguggaugggcagaaccauuaauaaggaaagccgguccggguacgagacauuuaagguuaucggaggcuggagcaccccuaacucuaaaucccaggugaauagacaagucauuguggacaacaauaacuggagcggcuauucugggaucuucuccgucgagggaaagagcugcauuaaucgcuguuuuuacguggaacuuauccggggcagaccccaggagacacgcguuugguggaccuccaacucuauuguggucuucugcgggacgagcggaacauauggcaccggguccuggcccgauggcgcuaauaucaacuuuaugccuaucuga

SEQ ID NO: 214634 - RNA, 1410 nt, Artificial Sequence; identical to SEQ ID NO: 207044
  derived and/or modified CDS sequence (opt5) from neuraminidase__InfluenzaA__AFM71915

SEQ ID NO: 214635 - RNA, 1410 nt, Artificial Sequence; identical to SEQ ID NO: 207044
  derived and/or modified CDS sequence (opt5) from neuraminidase__InfluenzaA__AFM71926

SEQ ID NO: 214636 - RNA, 1410 nt, Artificial Sequence; identical to SEQ ID NO: 207044
  derived and/or modified CDS sequence (opt5) from neuraminidase__InfluenzaA__AFM71937

SEQ ID NO: 214637 - RNA, 1410 nt, Artificial Sequence; identical to SEQ ID NO: 214052
  derived and/or modified CDS sequence (opt5) from neuraminidase__InfluenzaA__AFM71948

SEQ ID NO: 214638 - RNA, 1410 nt, Artificial Sequence; identical to SEQ ID NO: 214052
  derived and/or modified CDS sequence (opt5) from neuraminidase__InfluenzaA__AFM71959

SEQ ID NO: 214639 - RNA, 1410 nt, Artificial Sequence
  derived and/or modified CDS sequence (opt5) from neuraminidase__InfluenzaA__AFM71970
augaaccccaaucagaagaucauuaccaucggcagcgugucccugacaauugccacgaucugcuuccucaugcaaauugcuauccuggucaccacaguuacccuucacuuuaaacaguacgagugugacucuccugccaacaaucaggugaugccguaugaacccaucauuaucgagagaaacauuacagaaaucguguaccugaccaauacaaccauugagaaggaaaucugcccuaaacucgucgaguaucggaacuggagcaagccccaguguaaaauuacgggguucgcgccuuuuuccaaggauaauucuauccgccugagcgcuggaggcgacaucugggugaccagagagcccuacguuuccugcgauccugggaaguguuaucaauucgcccuuggacagggcacaacccuggaaaacaaacauucuaaugacacaauucacgaucggaccccgcaucgcacgcuccugaugaacgagcugggggugcccuuucaccucggaacaagacaggucugcaucgccuggagcuccagcucuugucaugacggcaaggcuuggcugcacgugugcguuaccggcuacgauaaaaaugccacagcuuccuucauuuaugacgggcggcuuguggauagcaucggaucuuggucccagaacauucugcgcacccaagaaagcgagugugucugcaucaauggcaccuguacaguggugaugacggacgggucugccuccggacgggcggauaccaagauccucuuuauugaggaaggcaaaaucguccacauuagcccucuguccgggucugcccagcauguugaggaaugcagcugcuacccccgguacccuggagugcgcuguaucugcagagacaacuggaagggcuccaaucggcccguggucgauauuaacgugaaggacuauagcaucgacucuuccuacguuuguagcggccuugugggggauacaccgcgcaaaaacgacagaucuagcuccucuuauugccggaauccuaacaaugagaagggaaaccacggcgucaaagggugggcuuucgaugacggaaaugauguguggaugggccgcaccaucagcgaagacuccagaagcggguacgagacauuuaagguuauuggaggcuggucuacccccaacuccaaacugcagaucaauagacaggugauugucgauagcgccaacagaucuggcuauuccgggaucuucagcguggagggaaaguccuguauuaaucgcugcuuuuacgucgaacucauccggggcagagagcaagaaacgcgcgugugguggacaucuaacagcauuguuguguucugugggaccuccggaaccuauggcacagggucuuggccugacggcgcugauaucaaucugaugcccaucuga

SEQ ID NO: 214640 - RNA, 1410 nt, Artificial Sequence; identical to SEQ ID NO: 214060
  derived and/or modified CDS sequence (opt5) from neuraminidase__InfluenzaA__AFM71981

SEQ ID NO: 214641 - RNA, 1410 nt, Artificial Sequence
  derived and/or modified CDS sequence (opt5) from neuraminidase__InfluenzaA__AFM71992
augaaccccaaucagaagaucauuaccaucggcagcgugucccugacaauuucuacgaucugcuucuuuaugcaaauugccauccucaucaccacagucacccugcacuucaaacaguacgaguuuaacagcccuccgaauaaccagguuaugcuuugugaacccacaauuaucgagagaaauauuaccgaaaucguguaucugacaaacaccacgauugagaaggaaaucugcccuaaacucgcugaguaccggaauugguccaagccccagugugacauuaccggguucgccccuuuuucuaaagauaacagcauccgccuguccgcgggaggcgacaucugggugacaagagagcccuaugucucuugcgauccugacaaguguuaccaauucgcucuugggcagggaaccacacugaauaacgugcauagcaauaacaccguucgggaucgcacgccguauagaacacuccugaugaaugaacugggcgugcccuuucaccucgggaccaagcaggucugcauugccugguccagcagcuccugucaugacggaaaagccuggcugcacgugugcaucacaggcgaugacaagaacgcuaccgccagcuucauuuacaauggccggcuuguugauucuguggucuccuggagccaggagauccugcgcacccaagaaucugagugugugugcauuaacgggacauguacgguggucaugaccgacggauccgcuagcggcaaagccgauacaaagauccucuuuaucgaggaagggaaaauuguucauaccuccacacugucuggaagcgcgcagcacguggaggaaugcuccugcuauccuagauaccccggcgugcggugugucugccgcgacaacuggaaggggagcaauagaccuaucguggauauuaacaucaaggaccacucuauuguuuccagcuacguguguucuggacuugucggcgacacgccccggaaaaaugauagcuccucuagcucccauugccuggacccgaacaaugaggaaggcgggcacggagugaagggcugggccuucgaugacgggaacgauguuuggaugggacgcaccaucaaugagacaagcagacucggcuaugagaccuuuaaagugaucgaaggguggucuaacccuaaguccaaacugcagaugaaucggcaggucauuguggaccgcggaaacagaagcggcuacucuggcaucuucuccgucgaggggaagucuuguauuaaucggugcuuuuauguggaacugaucagaggacgcaaagaggaaaccgagguucucuggacauccaacucuauuguggucuucuguggcaccagcgggacauacggaacgggcuccuggcccgauggggcugaccugaaucuuaugccuaucuga

SEQ ID NO: 214642 - RNA, 1410 nt, Artificial Sequence; identical to SEQ ID NO: 214616
  derived and/or modified CDS sequence (opt5) from neuraminidase__InfluenzaA__AFM72013

SEQ ID NO: 214643 - RNA, 1365 nt, Artificial Sequence; identical to SEQ ID NO: 207791
  derived and/or modified CDS sequence (opt5) from neuraminidase__InfluenzaA__AFM72024

SEQ ID NO: 214644 - RNA, 1410 nt, Artificial Sequence; identical to SEQ ID NO: 211067
  derived and/or modified CDS sequence (opt5) from neuraminidase__InfluenzaA__AFM72035

SEQ ID NO: 214645 - RNA, 1410 nt, Artificial Sequence; identical to SEQ ID NO: 211067
  derived and/or modified CDS sequence (opt5) from neuraminidase__InfluenzaA__AFM72046

SEQ ID NO: 214646 - RNA, 1413 nt, Artificial Sequence
  derived and/or modified CDS sequence (opt5) from neuraminidase__InfluenzaA__AFM72057
augaaccccaaucagaagaucauuaccaucggcagcauuugcacaacgaucgggauuaucucccugauccuccaaauuggaaacaucauuucuaucugggugagccacuccauucagaccggcucucagaaucauacagggaucuguaaccagagaauuaucaccuacgagaauagcacaugggucaaccaaaccuauguuaauaucaacaauacaaacgugguggccggaaaagacaccacguccgucacccuggcuggcaauucuagccuuugcccuauucgggggugggccaucuacuccaaggauaacagcauucgcaucggaucuaaaggcgacguguucguuauuagagaaccguuuaucuccuguagccaccuggagugccggacauucuuucucacccagggcgcgcugcuuaaugauaagcauucuaacgggacagugaaagaccgcucccccuauagagcucugaugagcuguccuaucggagaagcccccucuccuuacaauucccgguucgagagcgucgccugguccgcuucugccugccacgauggcaugggguggcucaccauuggaaucagcggccccgacgauggggcuguggccguucugaaguauaacggaauuaucacggaaacaauuaaguccuggcgcaaaagaauccugcggacccaggagagcgagugugugugcgucaacggcucuuguuuuacaaucaugaccgacggcccuuccaaugggccggcgagcuaccgcauuuucaagaucgaaaaaggaaagauuaccaaaucuaucgagcucgaugcccccaacagccauuaugaagagugcuccuguuacccugacacaggcacggugaugugcgugugcagagauaauuggcacgggucuaaccggcccugggucagcuuuaaucagaaccuggacuaccaaauuggauauaucuguuccggcguuuucggggauaauccucgccccaaggacggaaagggcagcugcgacccggugaccguggauggcgcugacggggucaaaggauuuucuuacagauauggcaacgggguguggauuggacggacaaaguccaauagcucucgcaaaggcuucgagaugaucugggauccuaacggguggaccgacacagauuccaauuuucuuguuaagcaggacguggucgccaugaccgauuggagcggcuacuccggaucuuucgugcagcaccccgaacugacgggccucgacuguaugagaccuugcuuuuggguugagcugauccgggggagaccccgcgagaaaacaaccauuuggaccagcggauccucuaucagcuucuguggcgugaacuccgauacagcuaauuggagcuggcccgacggggccgaacuuccuuucaccauugauaaguga

SEQ ID NO: 214647 - RNA, 1413 nt, Artificial Sequence; identical to SEQ ID NO: 207131
  derived and/or modified CDS sequence (opt5) from neuraminidase__InfluenzaA__AFM72068

SEQ ID NO: 214648 - RNA, 1410 nt, Artificial Sequence
  derived and/or modified CDS sequence (opt5) from neuraminidase__InfluenzaA__AFM72090
augaaccccaaucagaagaucauuaccaucggcagcgugucccugacaauugccacgaucugcuuccucaugcaaauugcuauccuggucaccacaguuacccuucacuuuaaacaguacgaguguucuagcccuccgaacaaucaggugaugcccugcgaaccuaucauuaucgagagaaacauuacagaaaucguguaucugaccaauacaaccauugagaaggaaaucugucccaaacucgucgaguaccggaacugguccaagccucagugcaaaauuacgggguucgcccccuuuucuaaggacaauagcauccgccuguccgcgggaggcgauaucugggugaccagagagccuuauguuucuugugacccggggaagugcuaccaauucgcucuuggacagggcacaacccugaacaauaaacauagcaacgauacagugcacgaccggacccccuaucgcacgcuccugaugaaugaacugggggucccuuuucaucucggaacaaaacagguguguauugccugguccuccucuuccugccacgauggcaaggccuggcugcauguuugugugaccggccacgacaagaacgcuacagccagcuucaucuacgaugggagacuugucgacucuauuggauccuggagcaaaaauauccugcggacccaggagucugaaugcguguguauuaacgggaccugcacaguggucaugacggauggcuccgcuagcgagcgcgccgacaccaagauccucuuuaucgaggaaggaaagauuguucacaucagcccccugucuggcagcgcgcaacauguggaggaaugcuccuguuauccuagauaccccggggugcggugcgucugucgcgauaauuggaaaggaagcaacagaccgauuguggacaucaacguuaaggauuacucuauuguguccagcuaugucugcucuggccuugugggcgacacaccucggaaaaaugaccgcagcuccucuagcuacuguagaaaccccaauaacgagaaggggaaucacggaguuaaaggcugggccuucgaugacgggaacgauguguggaugggacggaccaucggcgaggaacugcgccucggguaugagacauuuaaggucaucggaggcugguccaccccuaauagcaaacugcagauuaacagacaggugaucgucgacucuaagaaucgguccggcuacagcgggauuuucucuguggaaggaaaguccugcaucaacagauguuuuuauguugagcugauucgcggccgggaacaggagacgagagugugguggacaagcaauuccaucgucguguucugcgggaccucuggaaccuacggcacagggagcuggcccgauggcgcugacauuaaccucaugcccaucuga

SEQ ID NO: 214649 - RNA, 1410 nt, Artificial Sequence
  derived and/or modified CDS sequence (opt5) from neuraminidase__InfluenzaA__AFM72101
augaaccccaaucagaagaucauuaccaucggcagcgugucccugacaauugccacgaucugcuuccucaugcaaauugcuauccuggucaccacaguuacccuucacuuuaaacaguacgaguguucuagcccuccgaacaaucaggccaugcccugcgaaccuacaaucauugagagaaacaucaccgaaauuguguaucugacaaauaccacgaucgagaaggaaauuugucccaaacucguggaguaccggaacugguccaagccucagugcaaaaucaccggguucgcgcccuuuucuaaggacaauagcauucgccuguccgcuggaggcgauaucugggucacaagagagccuuaugugucuugugacccggggaagugcuaccaauucgcccuuggacagggcaccacacugaacaaucggcauagcaacgauaccguucacgaccgcacgcccuauagaacacuccugaugaaugaacugggggugccuuuucaucucggaaccaaacaggucuguaucgccugguccuccucuuccugccacgauggcaaggcuuggcugcauguguguguuacaggccacgacaaaaacgccaccgcuagcuucauuuacgaugggcggcuuguggacucuaucggauccuggagcaagaauauucugcgcacccaggagucugaaugcgucuguaucaacggcacaugcacgguggugaugaccgauggguccgccagcgagagagcggacacaaaaauucucuuuaucgaggaaggaaagaucguccacauuagcccccugucuggcagcgcccaacauguugaggaaugcuccuguuauccucgguaccccggggugcgcugcguguguagagauaauuggaagggaagcaaccggccgaucgucgacauuaacgugaaagauuacucuaucguuuccagcuaugugugcucuggccuugucggcgacaccccucgcaagaaugacagaagcuccucuagcuacugucggaaccccaauaacgagaaagggucccacggagugaagggcugggcuuucgaugacgggaaugauguuuggaugggacgcacaauuggcgaggaacugagaagcggguaugagaccuuuaaagugaucggaggcuggucuacgccuaacuccaagcuccagaucaaucggcaggucauuguggacagcggcaacagaucuggguacuccggaaucuucagcgucgaaggcaaauccugcauuaaucgcuguuuuuauguggagcugauccgggggagagaacaggagacacgcguuugguggaccucuaacagcauuguggucuucugcggaaccuccggcacauacgggaccggcucuuggcccgauggagccgacaucaaucugaugcccauuuga

SEQ ID NO: 214650 - RNA, 1410 nt, Artificial Sequence; identical to SEQ ID NO: 206885
  derived and/or modified CDS sequence (opt5) from neuraminidase__InfluenzaA__AFM72112

SEQ ID NO: 214651 - RNA, 1410 nt, Artificial Sequence
  derived and/or modified CDS sequence (opt5) from neuraminidase__InfluenzaA__AFM72123
augaaccccaaucagaagaucauuaccaucggcagcgugucccugacaauugccacgaucugcuuccucaugcaaauugcuauccuggucaccacaguuacccuucacuuuaaacaguacgaguguucuagcccuccgaacaaucaggugaugcccugcgaaccuacaaucauugagagaaacaucaccgaaauuguguaucugacaaauaccacgaucgagaaggaaauuugucccaaacucgucgaguaccggaacugguccaagccucagugcaaaaucaccggguucgcccccuuuucuaaggacaauagcauucgccuguccgcgggaggcgauaucugggugacaagagagccuuauguuucuugugacccggggaagugcuaccaauucgcucuuggacagggcaccacacugaacaaucggcauagcaacgauaccgugcacgaccgcacgcccuauagaacacuccugaugaaugaacugggggucccuuuucaucucggaaccaaacagguguguaucgccugguccuccucuuccugccacgauggcaaggccuggcugcauguuugugugacaggccacgacaaaaacgcuaccgccagcuucauuuacgaugggcggcuugucgacucuaucggauccuggagcaagaauauucugcgcacccaggagucugaaugcguguguaucaacggcacaugcacgguggucaugaccgauggguccgcuagcgagagagccgacacaaaaauucucuuuaucgaggaaggaaagaucguucacauuagcccccugucuggcagcgcgcaacauguggaggaaugcuccuguuauccucgguaccccggggugcgcugcgucuguagagauaauuggaagggaagcaaccggccgaucguggacauuaacguuaaagauuacucuaucguguccagcuaugucugcucuggccuugugggcgacaccccucgcaagaaugacagaagcuccucuagcuacugucggaaccccaauaacgagaaagggucccacggaguuaagggcugggccuucgaugacgggaaugauguguggaugggacgcacaauuggcgaggaacugagaagcggguaugagaccuuuaaagucaucggaggcuggucuacgccuaacuccaagcuccagacaaauagacaggugaucgucgacagcggcaaccggucuggguacuccggaauuuucagcguggaaggcaaauccugcaucaaucgcuguuuuuauguugagcugauucgggggagagaacaggagacccgcgugugguggaccucuaacagcaucgucguguucugcggaacauccggcaccuacgggacaggcucuuggcccgauggagcugacauuaaucugaugcccaucuga

SEQ ID NO: 214652 - RNA, 1410 nt, Artificial Sequence; identical to SEQ ID NO: 214207
  derived and/or modified CDS sequence (opt5) from neuraminidase__InfluenzaA__AFM72134

SEQ ID NO: 214653 - RNA, 1410 nt, Artificial Sequence
  derived and/or modified CDS sequence (opt5) from neuraminidase__InfluenzaA__AFM72145
augaaccccaaucagaagaucauuaccaucggcagcgugucccugacaauugccacgaucugcuuccucaugcaaauugcuauccuggccaucaccgucacacuucacuuuaaacaguacgaguguaacucuccuccgaauaaccagguuaugcugugcgaacccaccauuaucgagagaaauacaaccgaaauuguguaucucacaaacaccacgaucgagaaggaaguguguccuaaacuggcggaguaccggaauuggagcaagccccagugcaaaauuaccggguucgcuccuuuuuccaaggacaacucuauccgccuuagcgccggaggcgauauuugggucacaagagagcccuauguguccugugacccugggaagugcuaccaauucgcccugggacagggcaccacacucaauaaccggcauucuaaugauaccguucacgaccgcacgccguauagaacacugcugaugaacgaacucggggugcccuuucaucugggaaccaaacaggucuguaucgcuuggagcuccagcucuugccacgauggcaaggccuggcuucauguguguguuacaggccacgacgagaaugcuaccgccuccuucaucuacgaugggcggcugguggacagcauuggaucuugguccaaaaacauccuccgcacccaggaaagcgagugcgucuguauuaauggcacaugcacgguggugaugaccgaugggucugcguccgagagagccgacacaaagauccuguuuauugaagagggaaaaaucguccacaucagcccucuuuccggcucugcucaacauguugaagagugcagcuguuauccccgguacccuggggugcgcugcguguguagagauaacuggaagggauccaaccggcccauugucgacaucaaugugaaggauuacagcauuguuucuuccuaugugugcagcggccuggucggcgacaccccgcgcaaaaacgacucuagcuccucuagcuacuguagaaauccuaacaaugaaaaggggucccacggagugaaaggcugggccuucgaugacgggaacgauguuuggaugggacggacaaucagcgaggagcuccgcucuggcuaugaaaccuuuaaggugauugggggaugguccaaacccaauagcaagcugcagaucaacagacaggucaucguggaccggggcaauagaucuggcuacuccgggauuuucagcgucgagggaaaauccugcaucaaccgcuguuuuuauguggaacugauucggggcagaaagcaggagacggaaguuugguggacaucuaauagcaucguggucuucugcgggaccuccggaaccuacggcacagggucuuggccugauggcgcugacauuaaccucaugcccaucuga

SEQ ID NO: 214654 - RNA, 1410 nt, Artificial Sequence; identical to SEQ ID NO: 207257
  derived and/or modified CDS sequence (opt5) from neuraminidase__InfluenzaA__AFM72156

SEQ ID NO: 214655 - RNA, 1410 nt, Artificial Sequence
  derived and/or modified CDS sequence (opt5) from neuraminidase__InfluenzaA__AFM72167
augaaccccaaucagaagaucauuaccaucggcagcauuucccugacaaucgccacgauuugcuuccucaugcaaaucgcuauccuggugaccacagucacccuucacuuuaaacaguacgaguguaacucuccuccgaauaaccagguuaugcugugcgaacccacaauuaucgagagaaauauuaccgaaaucguguaucucacaaacaccacgauugagaaggaaaucuguccugagcuggccgaguaccggaauuggagcaaaccccagugcaagauuaccggguucgcgccuuuuuccaaagacaacucuauccgccuuagcgcuggaggcgauaucugggugacaagagaacccuaugucuccugugacccugggaagugcuaccaauucgcccugggacagggcaccacacucaauaaccggcauucuaaugauaccgugcacgaccgcacgccguauagaacacugcugaugaacgagcucgggguucccuuucaucugggaaccaaacagguguguauugccuggagcuccagcucuugccacgauggcaaggcuuggcuucaugucugugugacaggccacgacgaaaaugccaccgcuuccuucaucuacgaugggcggcugguugacagcauuggaucuugguccaagaacauccuccgcacccaggagagcgagugcguguguauuaauggcacaugcacggucgugaugaccgaugggucugccuccgaaagagcggacacaaaaauccuguuuaucgaggaaggaaagauugugcacaucagcccucuuuccggcucugcccaacaugucgaggaaugcagcuguuauccccgguacccugggguucgcugcguguguagagauaacuggaaaggauccaaccggcccauuguggacaucaaugucaaggauuacagcauugugucuuccuauguuugcagcggccuggugggcgacaccccgcgcaagaacgacucuagcuccucuagcuacuguuggaauccuaacaaugagaaagggggacacggcgucaaggggugggcuuucgaugacggaaacgauguguggaugggcagaacaaucuccgaggaacuccggagcggguaugagaccuuuaaaguuaucggaggcuggucuaagcccaauuccaaacugcagauuaaccgccaggugaucgucgacagaggcaaucggagcggguacucuggaauuuucuccguggaaggcaagagcugcaucaacagauguuuuuaugucgagcugauucgcgggcggaaacaggaaacggaggugugguggacauccaauucuaucguuguguucugcggaaccagcggcaccuacgggacaggcuccuggccugauggagccgacauuaaccucaugcccaucuga

SEQ ID NO: 214656 - RNA, 1410 nt, Artificial Sequence
  derived and/or modified CDS sequence (opt5) from neuraminidase__InfluenzaA__AFM72178
augaaccccaaucagaagaucauuaccaucggcagcgugucccugacaauugccacgaucugcuuccucaugcaaauugcuauccuggucaccacaguuacccuucacuuuaaacaguacgaguguaacucuccuccgaauaaccaggugaugcugugcgaacccacaaucauugagagaaauaucaccgaaauuguguaucucacaaacaccacgaucgagaaggaaauuuguccugagcuggccgaguaccggaauuggagcaaaccccagugcaagaucaccggguucgcgccuuuuuccaaagacaacucuauucgccuuagcgcuggaggcgauaucugggucacaagagaacccuauguguccugugacccugggaagugcuaccaauucgcccugggacagggcaccacacucaauaaccggcauucuaaugauaccguucacgaccgcacgccguauagaacacugcugaugaacgagcucggggugcccuuucaucugggaaccaagcaggucuguaucgccuggagcuccagcucuugccacgauggcaaggcuuggcuucauguguguguuacaggccacgacgaaaaugccaccgcuuccuucauuuacgaugggcggcugguggacagcaucggaucuugguccaaaaacauucuccgcacccaggagagcgagugcgucuguaucaauggcacaugcacgguggugaugaccgaugggucugccuccgaaagagcggacacaaaaauucuguuuaucgaggaaggaaagaucguccacauuagcccucuuuccggcucugcccaacauguugaggaaugcagcuguuauccccgguacccuggggugcgcugcguguguagagauaacuggaaaggauccaaccggcccaucgucgacauuaaugugaaggauuacagcaucguuucuuccuaugugugcagcggccuggucggcgacaccccgcgcaagaacgacucuagcuccucuagcuacuguuggaauccuaacaaugagaaagggggacacggcgugaaggggugggcuuucgaugacggaaacgauguuuggaugggcagaacaauuuccgaggaacuccggagcggguaugagaccuuuaaagugaucggaggcuggucuaagcccaauuccaaacugcagaucaaccgccaggucauuguggacagaggcaaucggagcggguacucuggaaucuucuccgucgaaggcaagagcugcauuaacagauguuuuuauguggagcugauccgcgggcggaaacaggaaacggagguuugguggacauccaauucuauuguggucuucugcggaaccagcggcaccuacgggacaggcuccuggccugauggagccgacaucaaccucaugcccauuuga

SEQ ID NO: 214657 - RNA, 1410 nt, Artificial Sequence
  derived and/or modified CDS sequence (opt5) from neuraminidase__InfluenzaA__AFM72189
augaaccccaaucagaagaucauuaccaucggcagcgugucccugacaauugccacgaucugcuuccucaugcaaauugcuauccuggucaccacaguuacccuucacuuuaaacaguacgaguguaacucuccuccgaauaaccaggugaugcugugcgaacccacaaucauugagagaaauaucaccgaaauuguguaucucacaaacaccacgaucgagaaggaaauuuguccuaaacuggccgaguaccggaauuggagcaagccccagugcaaaaucaccggguucgcgccuuuuuccaaggacaacucuauucgccuuagcgcuggaggcgauaucugggucacaagagagcccuauguguccugugacccugauaagugcuaccaauucgcccuggggcagggaaccacacucaauaaccggcauucuaaugacaccguucacgaucgcacgccguauagaacacugcugaugaacgaacucggcgugcccuuucaucuggggaccaaacaggucuguaucgccuggagcuccagcucuugccacgacggaaaggcuuggcuucauguguguguuacaggccacgaugagaaugccaccgcuuccuucauuuacgacggccggcugguggauagcaucgggucuugguccaaaaagauucuccgcacccaggaaagcgagugcgucuguaucaacggaacaugcacgguggugaugaccgacggcucugccuccgggagagcggauacaaaaauucuguuuaucgaggaaggaaagaucguccacauuagcccucuucugggcuccgcccaacauguugaggaaugcucuuguuauccccgguacccuggggugcgcugcguguguagagacaauuggaagggaagcaaccggcccaucgucgauauuaacgugaaagacuacuccaucguuagcucuuaugugugcuccggccucgucggcgacaccccgcgcaagaaugauagcucuagcuccucucacugucugaacccuaauaacgaggaagggggacauggcgugaaagggugggcuuucgacgauggagacgauguuuggaugggcagaacaauuagcgagaagcugcgguccggguacgagaccuuuaaagugaucgaaggauggagcaagcccaauucuaaacuccagaucaaccgccaggucauuguggacagaggcaaucgguccggcuauagcgggaucuucucugucgagggaaaguccugcauuaacagauguuuuuacguggaacugauccgcggccggaagcaggagacggaaguuugguggacaagcaauuccauuguggucuucugcgggaccucuggaaccuauggcacagggagcuggccugauggcgccgacaucaaccuuaugcccauuuga

SEQ ID NO: 214658 - RNA, 1410 nt, Artificial Sequence; identical to SEQ ID NO: 214657
  derived and/or modified CDS sequence (opt5) from neuraminidase__InfluenzaA__AFM72200

SEQ ID NO: 214659 - RNA, 1410 nt, Artificial Sequence; identical to SEQ ID NO: 207821
  derived and/or modified CDS sequence (opt5) from neuraminidase__InfluenzaA__AFM72211

SEQ ID NO: 214660 - RNA, 1410 nt, Artificial Sequence; identical to SEQ ID NO: 207821
  derived and/or modified CDS sequence (opt5) from neuraminidase__InfluenzaA__AFM72222

SEQ ID NO: 214661 - RNA, 1413 nt, Artificial Sequence; identical to SEQ ID NO: 208525
  derived and/or modified CDS sequence (opt5) from neuraminidase__InfluenzaA__AFM72233

SEQ ID NO: 214662 - RNA, 1410 nt, Artificial Sequence; identical to SEQ ID NO: 206645
  derived and/or modified CDS sequence (opt5) from neuraminidase__InfluenzaA__AFM72249

SEQ ID NO: 214663 - RNA, 1410 nt, Artificial Sequence; identical to SEQ ID NO: 206133
  derived and/or modified CDS sequence (opt5) from neuraminidase__InfluenzaA__AFM72260

SEQ ID NO: 214664 - RNA, 1410 nt, Artificial Sequence; identical to SEQ ID NO: 206133
  derived and/or modified CDS sequence (opt5) from neuraminidase__InfluenzaA__AFM72271

SEQ ID NO: 214665 - RNA, 1410 nt, Artificial Sequence
  derived and/or modified CDS sequence (opt5) from neuraminidase__InfluenzaA__AFM72293
augaaccccaaucagaagaucauuaccaucggcagcgugucccugacaauugccacgaucugcuuccucaugcaaauugcuauccuggucaccacaguuacccuucacuuuaaacaguacgaguguaacucuccuccgaauaaccaggugaugcugugcgaacccacaaucauugagagaaauaucaccgaaauuguguaucucacaaacaccacgaucgagaaggaaauuuguccuaaacuggccgaguaccggaauuggagcaagccccagugcaacaucaccggguucgcgccuuuuuccaaagacaauucuauucgccuuagcgcuggaggcgauaucugggucacaagagagcccuauguguccugugacccugauaagugcuaccaauucgcccuggggcagggaaccacacucaacaauggccauucuaacuauaccguucacgaccggacgccguaccgcacacugcugaugaaugaacucggggugcccuuucaucugggaaccaagcaggucuguaucgccuggagcuccagcucuugccacgauggcaaagccuggcuucauguguguguuacaggcgacgaugagaacgcuaccgcuuccuucauuuauaaugggagacugguggacagcaucggaucuugguccaagaaaauucuccggacccaggaaagcgagugcgucuguaucaacggcacaugcacgguggugaugaccgaugggucugccuccggaaaggcggacacaaaaauucuguuuaucgaggaaggcaagaucguccacaccagcucccuuucugggagcgcccaacacguugaggaaugcuccuguuacccucgcuaccccggagugagaugcgugugucgggauaacuggaagggcagcaaucgcccuauugucgacaucaacgugaaagauuauucuauuguuuccagcuacgugugcucuggccuggucggggacacacccagaaagaaugacagcuccucuagcucccauugucucgauccgaacaaugaggaaggaggccacggggugaaaggaugggcuuucgacgauggcaacgacguuuggauggggcggaccaucagcgagaagcugcgcucuggauaugagacguuuaaagugauugaaggcugguccaagccuaauagcaaacugcagaucaacagacaggucaucguggaucggggcaaucgcucuggguacuccggaauuuucagcgucgagggcaaguccugcaucaacagauguuuuuauguggaacucauucgggggagaaagcaggagacagaaguucuguggaccucuaauagcaucguggucuucugcggaaccuccggcacauacgggaccggcucuuggcccgacggagccgauauuaaccuuaugccuaucuga

SEQ ID NO: 214666 - RNA, 1410 nt, Artificial Sequence; identical to SEQ ID NO: 208001
  derived and/or modified CDS sequence (opt5) from neuraminidase__InfluenzaA__AFM72304

SEQ ID NO: 214667 - RNA, 1410 nt, Artificial Sequence
  derived and/or modified CDS sequence (opt5) from neuraminidase__InfluenzaA__AFM72315
augaaccccaaucagaagaucauuaccaucggcagcgugucccugacaauuucuacgaucugcuucuuuaugcaaauugccauccucaucaccacagucacccugcacuucaaacaguacgaguuuaacagcccuccgaauaaccagguuaugcuuugugaacccacaauuaucgagagaaauauuaccgaaaucguguaucugacaaacaccacgauugagaaggaaaucugcccuaaacucgcugaguaccggaauugguccaagccccaguguaacauuaccggguucgccccuuuuucuaaagacaauagcauccgccuguccgcgggaggcgauaucugggugacaagagagcccuaugucucuugcgacccugauaaguguuaccaauucgcucuugggcagggaaccacacugaacaaugugcauagcaacgacaccguucacgaucggacgccguaucgcacacuccugaugaaugaacugggcgugcccuuucaucucgggaccaagcaggucugcauugccugguccucuagcuccugucacgacggaaaagccuggcugcaugugugcguuacaggcgaugacgagaacgcuaccgccagcuucaucuacaauggcagacuuguggauucuauugucuccuggagcaagaaaauccugcggacccaggaaucugagugugugugcauuaacgggacauguacgguggucaugaccgacggauccgcuagcggcaaggccgauacaaaaauccucuuuaucgaggaagggaagauuguucacaccuccacacugucuggaagcgcgcaacacguggaggaaugcuccugcuauccucgcuaccccggcgugagaugugucugccgggacaacuggaaggggagcaaucgcccuaucguggauauuaacaucaaagacuacucuauuguuuccagcuauguguguucuggacuugucggcgacacccccagaaagaaugauagcuccucuagcucccauugccuggacccgaacaaugagaaaggcgggcacggagugaagggcugggccuucgaugacgggaacgauguuuggaugggacggacgaucagcgaaaaacuccgcucuggcuacgagacauuuaaggugaucgaggggugguccaauccuaacagcaaacugcagauuaauagacaggucaucguggaccgggauaaccgcucuggauauuccggcauuuucagcgucgaaggcaaguccuguaucaauagaugcuuuuacguggagcugauucgggggagaaaccaggaaaccgagguucucuggaccucuaauagcaucguggucuucuguggaacauccggcaccuaugggacaggaucuuggcccgacggcgcugauauuaaccugaugccuaucuga

SEQ ID NO: 214668 - RNA, 1410 nt, Artificial Sequence
  derived and/or modified CDS sequence (opt5) from neuraminidase__InfluenzaA__AFM72326
augaaccccaaucagaagaucauuaccaucggcagcgugucccugacaauuucuacgaucugcuucuuuaugcaaauugccauccucaucaccacagucacccugcacuucaaacaguacgaguuuaacagcccuccgaauaaccagguuaugcuuugugaacccacaauuaucgagagaaauauuaccgaaaucguguaucugacaaacaccacgauugagaaggaaaucugcccuaaacucgcugaguaccggaauugguccaagccccaguguaacauuaccggguucgccccuuuuucuaaagacaauagcauccgccuguccgcgggaggcgauaucugggugacaagagagcccuaugucucuugcgacccugauaaguguuaccaauucgcucuugggcagggaaccacacugaacaaugugcauagcaacgacaccguucacgaucggacgccguaucgcacacuccugaugaaugaacugggcgugcccuuucaucucgggaccaagcaggucugcauugccugguccucuagcuccugucacgacggaaaagccuggcugcaugugugcguuacaggcgaugacgagaacgcuaccgccagcuucaucuacaauggcagacuuguggauucuauugucuccuggagcaagaaaauccugcggacccaggaaucugagugugugugcauuaacgggacauguacgguggucaugaccgacggauccgcuagcggcaaggccgauacaaaaauccucuuuaucgaggaagggaagauuguucacaccuccacacugucuggaagcgcgcaacacguggaggaaugcuccugcuauccucgcuaccccggcgugagaugugucugccgggacaacuggaaggggagcaaucgcccuaucguggauauuaacaucaaagacuacucuauuguuuccagcuauguguguucuggacuugucggcgacacccccagaaagaaugauagcuccucuagcucccauugccuggacccgaacaaugaggaaggcgggcacggagugaaaggcugggccuucgaugacgggaacgauguuuggaugggacggacgaucagcgagaagcuccgcucuggcuacgagacauuuaaagugaucgaagggugguccaauccuaacagcaaguuccagauuaauagacaggucaucguggaccgggauaaccgcucuggauauuccggcauuuuuagcgucgagggcaaauccuguaucaauagaugcuucuacguggaacugauucgggggagaaaccaggagaccgaaguucuguggaccucuaauagcaucguggucuucuguggaacauccggcaccuaugggacaggaucuuggcccgacggcgcugauauuaaccucaugccuaucuga

SEQ ID NO: 214669 - RNA, 1410 nt, Artificial Sequence
  derived and/or modified CDS sequence (opt5) from neuraminidase__InfluenzaA__AFM72337
augaaccccaaucagaagaucauuaccaucggcagcgugucccugacaauuucuacgaucugcuucuuuaugcaaauugccauccucaucaccacagucacccugcacuucaaacaguacgaguuuaacagcccuccgaauaaccagguuaugcuuugugaacccacaauuaucgagagaaauauuaccgaaaucguguaucugacaaacaccacgauugagaaggaaaucugcccuaaacucgcugaguaccggaauugguccaagccccagugugacauuaccggguucgccccuuuuucuaaagauaacagcauccgccuguccgcgggaggcgacaucugggugacaagagagcccuaugucucuugcgauccugacaaguguuaccaauucgcucuugggcagggaaccacacugaauaacgugcauagcaaugauaccguucgggaccgcacgccguauagaacacuccugaugaacgaacugggcgugcccuuucaccucgggaccaagcaggucugcauugccugguccucuagcuccugucaugauggaaaagccuggcugcacgugugcaucacaggcgacgauaagaaugcuaccgccagcuucauuuacaacggccggcuuguugacucuguggucuccuggagcaaagagauccugcgcacccaggaaucugagugugugugcauuaaugggacauguacgguggucaugaccgauggauccgcuagcggcaaggccgacacaaaaauccucuuuaucgaggaagggaagauuguucauaccuccacacugucuggaagcgcgcaacacguggaggaaugcuccugcuauccuagauaccccggcgugcggugugucugccgcgauaacuggaaggggagcaacagaccuaucguggacauuaauaucaaagaccacucuauuguuuccagcuacguguguucuggacuugucggcgauacgccccggaagaacgacagcuccucuagcucccauugccuggauccgaauaacgaggaaggcgggcacggagugaaaggcugggccuucgacgaugggaaugacguuuggaugggacgcaccaucaacgagacaagcagacucggcuaugagaccuuuaaggugaucgaaggguggucuaauccuaaauccaagcugcagauuaaccggcaggucaucguggaucgcggaaauagaagcggcuacucuggcauuuucuccgucgaggggaaaagcuguaucaaccggugcuuuuauguggaacugauuagaggacgcaaggaggaaaccgagguucucuggacauccaauucuaucguggucuucuguggcaccagcgggacauacggaacgggcuccuggcccgacggggcugaucugaaccuuaugccuauuuga

SEQ ID NO: 214670 - RNA, 1410 nt, Artificial Sequence
  derived and/or modified CDS sequence (opt5) from neuraminidase__InfluenzaA__AFM72348
augaaccccaaucagaagaucauuaccaucggcagcgugucccugacaauugccacgaucugcuuccucaugcaaauugcuauccuggucaccacaguuacccuucacuuuaaacagcaugaguguaacucuccuccgaauaaccaggugaugcugugcgaacccacaaucauugagagaaauaucaccgaaauuguguaccucacaaacaccacgaucgagaaggaaauuuguccuaaacuggccgaguaucggaauuggagcaagccccagugcaacaucaccggguucgcgccuuuuuccaaagacaauucuauucgccuuagcgcuggaggcgauaucugggucacaagagagcccuacguguccugugacccugauaagugcuaucaauucgcccuggggcagggaaccacacucaacaauggccacucuaacgacaccguucaugaucggacgccguaccgcacacugcugaugaaugaacucgggauccccuuucaccugggaaccagacagguguguauugccuggagcuccagcucuugccaugacggcaaggcuuggcuucacgucugugugacaggcgaugacaaaaacgccaccgcuuccuucaucuauaaugggcggcugguugauagcauuggaucuugguccaagaaaauccuccgcacccaggagagcgaaugcguguguauuaacggcacaugcacggucgugaugaccgacgggucugccuccggaaaggcggauacaaaaauccuguuuaucgaggagggcaagauugugcacaucagcacccuuuccgggucugcccaacaugucgaagagugcagcuguuacccuagauaucccggaguucggugcgugugucgcgacaacuggaagggcuccaauagaccuauuguggauaucaacgucaaagacuacagcauugugucuuccuacguuugcagcggccuggugggggacacaccccggaagaaugauucuagcuccucuagccacugucucgacccgaacaaugaagagggaggccauggggucaaaggaugggcuuucgaugacggcaacgauguguggauggggcgcaccaucuccgaaaagcugagaagcggauaugagacguuuaaaguuaucgagggcuggucuaagccuaauuccaaacugcagauuaaccgccaggugaucgucgaacggggcaauagaagcggguacucuggaauuuucuccguggagggcaagagcugcaucaaccgguguuuuuaugucgaacucauuagagggcgcaaggaggaaacagaggugugguggaccuccaauucuaucguuguguucugcggaaccagcggcacauacgggaccggcuccuggcccgacggagccgauauuaaccugaugccuaucuga

SEQ ID NO: 214671 - RNA, 1410 nt, Artificial Sequence
  derived and/or modified CDS sequence (opt5) from neuraminidase__InfluenzaA__AFM72359
augaaccccaaucagaagaucauuaccaucggcagcgugucccugacaauuucuacgaucugcuucuuuaugcaaauugccauccucaucaccacagucacccugcacuucaaacaguacgaguuuaacagcccuccgaauaaccagguuaugcuuugugaacccacaauuaucgagagaaauauuaccgaaaucguguaucugacaaacaccacgauugagaaggaaaucugcccuaaacucgcugaguaccggaauugguccaagccccagugugacauuaccggguucgccccuuuuucuaaagauaacagcauccgccuguccgcgggaggcgacaucugggugacaagagagcccuaugucucuugcgauccugacaaguguuaccaauucgcucuugggcagggaaccacacugaauaacgugcauagcaaugauaccguucacgaccggacgccguaucgcacacuccugaugaacgaacugggcgugcccuuucaucucgggaccaagcaggucugcauugccugguccucuagcuccugucacgauggaaaagccuggcugcaugugugcguuacaggcgacgauaagaaugcuaccgccagcuucaucuacaacggcagacuuguggacucuauugucuccuggagcaaaaagauccugcggacccaggagucugaaugugugugcauuaaugggacauguacgguggucaugaccgauggauccgcuagcggcaaagccgacacaaagauccucuuuaucgaggaggggaagauuguucacaccuccacacugucuggaagcgcgcaacacguggaagagugcuccugcuauccucgcuaccccggcgugagaugugucugccgggauaacuggaaagggagcaaccgcccuaucguggacauuaauaucaaggacuacucuauuguuuccagcuauguguguucuggacuugucggcgauacccccagaaagaacgacagcuccucuagcucccauugccuggauccgaauaacgaagagggcgggcacggagugaaaggcugggccuucgacgaugggaaugacguuuggaugggacggacgaucagcgaaaaacuccgcucuggcuacgagacauuuaaggugaucgaggggugguccaacccuaauagcaaacugcagauuaacagacaggucaucguggaucggggaaaucgcucuggcuauuccggcauuuucagcgucgaagggaaguccuguaucaacagaugcuuuuacguggagcugauucggggaagaaaggaagagaccaaaguucucuggaccucuaauagcaucguggucuucuguggcacauccgggaccuauggaacaggcucuuggcccgacggggcugauauuaaccugaugccuaucuga

SEQ ID NO: 214672 - RNA, 1410 nt, Artificial Sequence; identical to SEQ ID NO: 214671
  derived and/or modified CDS sequence (opt5) from neuraminidase__InfluenzaA__AFM72370

SEQ ID NO: 214673 - RNA, 1410 nt, Artificial Sequence; identical to SEQ ID NO: 211590
  derived and/or modified CDS sequence (opt5) from neuraminidase__InfluenzaA__AFM72381

SEQ ID NO: 214674 - RNA, 1410 nt, Artificial Sequence; identical to SEQ ID NO: 211590
  derived and/or modified CDS sequence (opt5) from neuraminidase__InfluenzaA__AFM72392

SEQ ID NO: 214675 - RNA, 1410 nt, Artificial Sequence; identical to SEQ ID NO: 208474
  derived and/or modified CDS sequence (opt5) from neuraminidase__InfluenzaA__AFM72403

SEQ ID NO: 214676 - RNA, 1410 nt, Artificial Sequence; identical to SEQ ID NO: 208474
  derived and/or modified CDS sequence (opt5) from neuraminidase__InfluenzaA__AFM72414

SEQ ID NO: 214677 - RNA, 1410 nt, Artificial Sequence; identical to SEQ ID NO: 208138
  derived and/or modified CDS sequence (opt5) from neuraminidase__InfluenzaA__AFM72425

SEQ ID NO: 214678 - RNA, 1410 nt, Artificial Sequence; identical to SEQ ID NO: 208138
  derived and/or modified CDS sequence (opt5) from neuraminidase__InfluenzaA__AFM72436

SEQ ID NO: 214679 - RNA, 1410 nt, Artificial Sequence; identical to SEQ ID NO: 208138
  derived and/or modified CDS sequence (opt5) from neuraminidase__InfluenzaA__AFM72447

SEQ ID NO: 214680 - RNA, 1410 nt, Artificial Sequence; identical to SEQ ID NO: 208138
  derived and/or modified CDS sequence (opt5) from neuraminidase__InfluenzaA__AFM72458

SEQ ID NO: 214681 - RNA, 1410 nt, Artificial Sequence; identical to SEQ ID NO: 208138
  derived and/or modified CDS sequence (opt5) from neuraminidase__InfluenzaA__AFM72469

SEQ ID NO: 214682 - RNA, 1410 nt, Artificial Sequence
  derived and/or modified CDS sequence (opt5) from neuraminidase__InfluenzaA__AFM72491
augaaccccaaucagaagaucauuaccaucggcagcgugucccugacaauuucuacgaucugcuucuuuaugcaaauugccauccucaucaccacagucacccugcacuucaaacaguacgaguuuaacagcccuccgaauaaccagguuaugaugugugaacccacaauuaucgagagaaauauuaccgaaaucguguaucuuacaaacaccacgauugagaaggaaaucugcccuaaacuggcugaguaccggaauugguccaagccccagugugacauuaccggguucgccccuuuuucuaaagauaacagcauccgccucuccgcgggaggcgacaucugggugacaagagagcccuaugucucuugcgauccugacaaguguuaccaauucgcucuggggcagggaaccacacuuaauaacgugcauagcaaugauaccguucgggaccgcacgccguauagaacacugcucaugaacgaacugggcgugcccuuucaccuggggaccaagcaggucugcauugccugguccucuagcuccugucaugauggaaaagccuggcuccacgugugcaucacaggcgacgauaagaaugcuaccgccagcuucauuuacaacggccggcugguugacucuaucguguccuggagcaaagagauucuucgcacccaggaaucugagugugucugcaucaaugggacauguacgguggugaugaccgauggauccgcuagcggcaaggccgacacaaaaauccuguuuauugaggaagggaagaucguccauaccuccacacucucuggaagcgcgcaacacguugaggaaugcuccugcuauccuagauaccccggcgugcggugugugugccgcgauaacuggaaggggagcaacagaccuauugucgacaucaauauuaaagaccacucuaucguguccagcuacguuuguucuggacuggugggcgauacgccccggaagaacgacagcuccucuagcucccauugccuugauccgaauaacgaggaaggcgggcacggagucaaaggcugggccuucgacgaugggaaugacguguggaugggacgcaccaucagcgagaagucuagacugggcuaugagacauuuaaaguuauugaagggugguccaacccuaauagcaagcuccagaucaaccgccaggugauugucgaucggggaaauagaucuggcuacuccggcaucuucagcguggaggggaaauccuguauuaaccggugcuuuuaugucgaacugaucagaggacgcaaggaggaaaccgaggugcuguggaccucuaauagcauuguuguguucuguggcacauccgggaccuacggaacaggcucuuggcccgacggggcugauaucaaccucaugccuaucuga

SEQ ID NO: 214683 - RNA, 1410 nt, Artificial Sequence; identical to SEQ ID NO: 214682
  derived and/or modified CDS sequence (opt5) from neuraminidase__InfluenzaA__AFM72502

SEQ ID NO: 214684 - RNA, 1413 nt, Artificial Sequence; identical to SEQ ID NO: 208704
  derived and/or modified CDS sequence (opt5) from neuraminidase__InfluenzaA__AFM72513

SEQ ID NO: 214685 - RNA, 1413 nt, Artificial Sequence; identical to SEQ ID NO: 208704
  derived and/or modified CDS sequence (opt5) from neuraminidase__InfluenzaA__AFM72524

SEQ ID NO: 214686 - RNA, 1413 nt, Artificial Sequence; identical to SEQ ID NO: 208704
  derived and/or modified CDS sequence (opt5) from neuraminidase__InfluenzaA__AFM72535

SEQ ID NO: 214687 - RNA, 1413 nt, Artificial Sequence; identical to SEQ ID NO: 208704
  derived and/or modified CDS sequence (opt5) from neuraminidase__InfluenzaA__AFM72546

SEQ ID NO: 214688 - RNA, 1413 nt, Artificial Sequence; identical to SEQ ID NO: 208704
  derived and/or modified CDS sequence (opt5) from neuraminidase__InfluenzaA__AFM72557

SEQ ID NO: 214689 - RNA, 1410 nt, Artificial Sequence
  derived and/or modified CDS sequence (opt5) from neuraminidase__InfluenzaA__AFM72579
augaaccccaaucagaagaucauuaccaucggcagcgugucccugacaauuucuacgaucugcuucuuuaugcaaaccgccauucucaucacaaccgucacacugcacuucaaacaguacgaguuuaacagcccuccgaauaaccagguuaugcuuugugaacccaccaucauugagagaaauaucacagaaauuguguaucugaccaacacgaccaucgagaaggaaauuugcccuaaacucgcugaguaccggaauugguccaagccccagugugacaucacaggguucgccccuuuuucuaaagauaacagcauucgccuguccgcgggaggcgacaucugggugaccagagagcccuaugucucuugcgauccugacaaguguuaccaauucgcucuugggcagggaacaacccugaauaacgugcauagcaaugauacgguucacgaccggacaccguaucgcacccuccugaugaacgaacugggcgugcccuuucaucucgggacaaagcaggucugcaucgccugguccucuagcuccugucacgauggaaaagccuggcugcaugugugcauuaccggcgacgauaagaaugcuaccgccagcuucaucuacaacggcagacuuguugacucuauuguguccuggagcaaagagauccugcggacacaggaaucugagugugucugcauuaaugggacguguaccguggugaugacagauggauccgcuagcggcaaggccgacaccaaaauccucuuuaucgaggaagggaagauuguccacacauccauccugucuggaagcgcgcaacacguugaggaaugcuccugcuauccucgcuaccccggcgugagaugugugugccgggauaacuggaaggggagcaaccgcccuauugucgacaucaauauuaaagaccauucuaucguguccagcuacguuuguucuggacuugugggcgauacccccagaaagaacgacagcuccucuagcucccacugccuggauccgaauaacgaggaaggcgggcauggagucaaaggcugggccuucgacgaugggaaugacguguggaugggacggacgaucagcgagaagucucgccucggcuaugagacauuuaaaguuauugaagggugguccaacccuaagagcaaacugcagaucaauagacaggugauugucgaucggggaaaccgcucuggcuacuccggcaucuucagcguggaggggaaguccuguauuaauagaugcuuuuaugucgaacugauccggggaagaaaggaggaaaccgaggugcucuggaccucuaacagcauuguuguguucuguggcacauccgggaccuacggaacaggcucuuggcccgacggggcugauaucaaucugaugccuaucuga

SEQ ID NO: 214690 - RNA, 1413 nt, Artificial Sequence
  derived and/or modified CDS sequence (opt5) from neuraminidase__InfluenzaA__AFM72802
augaaccccaaucagaagaucauuaccaucggcagcauuuccaucgccauugggaucaucucucugaugcuccaaauuggaaacaucauuagcaucugggcuucccacucuauucagacaggcagccagaaucauacggggaugugcaaccagagaaucauuaccuacgaaaauuccacaugggugaaccacaccuaugucaauaucaacaauacaaacguuguggccggaaaagacaagaccccugugacacuggcgggcaauucuagccuuuguuccaucagcgggugggcuauucauaccaaagauaacucuauccggauuggauccaagggcgacgucuucgugauccgcgagccguuuauuagcugcucucaccuggaguguaaaacguucuuucucacccaaggcgcccugcuuaaugauaagcauuccaacgggacaguuaaggacagaagccccuaccgggcccugaugucuugcccucucggagaagcucccuccccuuauaauagcaaauucgaguccguggccuggucugcuagcgccugucacgauggcaucggguggcugaccaucggaauuuccggccccgacaacggggcggucgccgugcugaaguacaacggaaucauuacaggcaccaucaaaagcuggaagaaacagauucuccgcacgcaggaaucugagugcguuuguaugaauggcuccugcuuuacaaucaugaccgaugggccuagcaacggagcugccucuuauaagaucuucaagauugagaaaggcaaggugaucaaaagcauggaacugaaugcuccgaacuuucacuacgaggaauguuccugcuaucccgacacagggaccgucaugugugugugcagagauaauuggcauggaucuaaccggccuugggugagcuucaaucagaaccuugacuaccaaauuggcuacaucugcuccggggucuuuggagauaauccccgcccugaggacggcgagggcagcuguaaccccguuaccguggauggggccaauggagugaagggcuucucuuauaaauacgggaacggagucuggauuggcagaacaaaguccaaucggauccgcaaaggguuugaaaugauuugggacccgaacggcuggacgaauaccgacagcgauuucucugugaagcaggacaucguugcgaucacagauugguccggauauagcggcuccuuugugcagcacccugagcugaccgggcucgacugcauuagacccuguuucugggucgaacuggugcggggacuuccucgcgagaacacaaccaucuggacgucuggcagcuccauuucuuucugcgggguuaacagcgauaucgccaauugguccuggcccgacggagcugaacugcccuuuacaauugauaaguga

SEQ ID NO: 214691 - RNA, 1413 nt, Artificial Sequence; identical to SEQ ID NO: 214690
  derived and/or modified CDS sequence (opt5) from neuraminidase__InfluenzaA__AFM72813

SEQ ID NO: 214692 - RNA, 1413 nt, Artificial Sequence; identical to SEQ ID NO: 214690
  derived and/or modified CDS sequence (opt5) from neuraminidase__InfluenzaA__AFM72824

SEQ ID NO: 214693 - RNA, 1410 nt, Artificial Sequence; identical to SEQ ID NO: 208800
  derived and/or modified CDS sequence (opt5) from neuraminidase__InfluenzaA__AFM72835

SEQ ID NO: 214694 - RNA, 1410 nt, Artificial Sequence; identical to SEQ ID NO: 208800
  derived and/or modified CDS sequence (opt5) from neuraminidase__InfluenzaA__AFM72845

SEQ ID NO: 214695 - RNA, 1410 nt, Artificial Sequence; identical to SEQ ID NO: 208800
  derived and/or modified CDS sequence (opt5) from neuraminidase__InfluenzaA__AFM72855

SEQ ID NO: 214696 - RNA, 1410 nt, Artificial Sequence; identical to SEQ ID NO: 208800
  derived and/or modified CDS sequence (opt5) from neuraminidase__InfluenzaA__AFM72865

SEQ ID NO: 214697 - RNA, 1410 nt, Artificial Sequence
  derived and/or modified CDS sequence (opt5) from neuraminidase__InfluenzaA__AFM72875
augaaccccaaucagaagaucauuaccaucggcagcgugucccugacaauuucuacgaucugcuucuuuaugcaaauugccauccucaucaccacagucacccugcacuucaaacaguacgaguuuaacagcccuccgaauaaccagguuaugcuuugugaacccacaauuaucgagagaaauauuaccgaaaucguguaucugacaaacaccacgauugagaaggaaaucugcccuaaacucgcugaguaccggaauugguccaagccccagugugacauuaccggguucgccccuuuuucuaaagauaacagcauccgccuguccgcgggaggcgacaucugggugacaagagagcccuaugucucuugcgauccugacaaguguuaccaauucgcucuugggcagggaaccacacugaauaacgugcauagcaauaacaccguucgggaucgcacgccguauagaacacuccugaugaaugaacugggcgugcccuuucaccucgggaccaagcaggucugcauugccugguccagcagcuccugucaugacggaaaagccuggcugcacgugugcaucacaggcgaugacaagaacgcuaccgccagcuucauuuacaauggccggcuuguugauucuguggucuccuggagcaaagagauccugcgcacccaggaaucugagugugugugcauuaacgggacauguacgguggucaugaccgacggauccgcuagcggcaaggccgauacaaaaauccucuuuaucgaggaagggaagauuguucauaccuccacacugucuggaagcgcgcaacacguggaggaaugcuccugcuauccuagauaccccggcgugcggugugucugccgcgacaacuggaaggggagcaauagaccuaucguggauauuaacaucaaagaccacucuauuguuuccagcuacguguguucuggacuugucggcgacacgccccggaagucugauuccucuagcuccagccauugccuggacccgaauaacgaggaaggcgggcacggagugaaaggcugggccuucgaugacgggaaugauguuuggaugggacgcaccaucucugagaaguccagacucggcuaugagacauuuaaagugaucgaaggguggagcaacccuaagucuaaacugcagauuaaucggcaggucaucguggaccgcggaaacagauccggcuacagcggcauuuucuccgucgaggggaagucuuguaucaaucggugcuuuuauguggaacugauuagaggacgcaaggaggaaaccgagguucucuggaccagcaacuccaucguggucuucuguggcacaucugggaccuacggaacaggcagcuggcccgauggggcugacauuaaucugaugccuguguga

SEQ ID NO: 214698 - RNA, 1410 nt, Artificial Sequence; identical to SEQ ID NO: 208671
  derived and/or modified CDS sequence (opt5) from neuraminidase__InfluenzaA__AFM72886

SEQ ID NO: 214699 - RNA, 1410 nt, Artificial Sequence; identical to SEQ ID NO: 208671
  derived and/or modified CDS sequence (opt5) from neuraminidase__InfluenzaA__AFM72897

SEQ ID NO: 214700 - RNA, 1410 nt, Artificial Sequence
  derived and/or modified CDS sequence (opt5) from neuraminidase__InfluenzaA__AFM72908
augaaccccaaucagaagaucauuaccaucggcagcgugucccugacaauuucuacgaucugcuucuuuaugcaaauugccauccucaucaccacagucacccugcacuucaaacaguacgaguuuaacagcccuccgaauaaccagguuaugcuuugugaacccacaauuaucgagagaaauauuaccgaaaucguguaucugacaaacaccacgauugagaaggaaaucugcccuaaacucgcugaguaccggaauugguccaagccccagugugacauuaccggguucgccccuuuuucuaaagauaacagcauccgccuguccgcgggaggcgacaucugggugacaagagagcccuaugucucuugcgauccugacaaguguuaccaauucgcucuugggcagggaaccacacugaauaacgugcauagcaauaacaccguucgggaucgcacgccguauagaacacuccugaugaaugaacugggcgugcccuuucaccucgggaccaagcaggucugcauugccugguccucuagcuccugucaugacggaaaagccuggcugcacgugugcaucacaggcgaugacaagaacgcuaccgccagcuucauuuacaauggccggcuuguugauucuguggucuccuggagcaaagagauccugcgcacccaggaaucugagugugugugcauuaacgggacauguacgguggucaugaccgacggauccgcuagcggcaaggccgauacaaaaauccucuuuaucgaggaagggaagauuguucauaccuccacacugucuggaagcgcgcaacacguggaggaaugcuccugcuauccuagauaccccggcgugcggugugucugccgcgacaacuggaaggggagcaauagaccuaucguggauauuaacaccaaagaccacucuaucguuuccagcuacguguguucuggacuugucggcgacacgccccggaagaaugauagcuccucuagcucccauugccuggacccgaacaaugaggaaggcgggcacggagugaaaggcugggccuucgaugacgggaacgauguuuggaugggacgcacaauuagcgagaagucuagacucggcuaugagaccuuuaaagugaucgaagggugguccaauccuaagagcaaacugcagaucaaccggcaggucauuguggaccgcggaaauagaucuggcuacuccggcaucuucagcgucgaggggaaguccuguauuaaccggugcuuuuauguggaacugaucagaggacgcaaggaggaaaccgagguucucuggacaucuaauagcauuguggucuucuguggcaccuccgggacauacggaacgggcucuuggcccgauggggcugacaucaaccugaugccuguguga

SEQ ID NO: 214701 - RNA, 1410 nt, Artificial Sequence
  derived and/or modified CDS sequence (opt5) from neuraminidase__InfluenzaA__AFM72919
augaaccccaaucagaagaucauuaccaucggcagcgugucccugacaauuucuacgaucugcuucuuuaugcaaauugccauccucaucaccacagucacccugcacuucaaacagcaugaguuuaacagcccuccgaauaaccagguuaugcuuugugaacccacaauuaucgagagaaauauuaccgaaaucguguaccugacaaacaccacgauugagaaggaaaucugcccuaaacucgcugaguaucggaauugguccaagccccagugugacauuaccggguucgccccuuuuucuaaagauaacagcauccgccuguccgcgggaggcgacaucugggugacaagagagcccuacgucucuugcgauccugacaaguguuaucaauucgcucuugggcagggaaccacacugaauaacgugcacagcaauaacaccguucgggaucgcacgccguacagaacacuccugaugaaugaacugggcgugcccuuucaucucgggaccaagcaggucugcauugccugguccucuagcuccugucacgacggaaaagccuggcugcaugugugcaucacaggcgaugacaagaacgcuaccgccagcuucauuuauaauggccggcuuguugauucuguggucuccuggagcaaagagauccugcgcacccaggaaucugagugugugugcauuaacgggacauguacgguggucaugaccgacggauccgcuagcggcaaggccgauacaaaaauccucuuuaucgaggaagggaagauuguucacaccuccacacugucuggaagcgcgcaacacguggaggaaugcuccugcuacccuagauaucccggcgugcggugugucugccgcgacaacuggaaggggagcaauagaccuaucguggauauuaacaccaaagaccauucuaucguuuccagcuacguguguucuggacuugucggcgacacgccccggaagaaugauagcuccucuagcucccacugccuggacccgaacaaugaggaaggcgggcauggagugaaaggcugggccuucgaugacgggaacgauguuuggaugggacgcacaauuagcgagaagucuagacucggcuacgagaccuuuaaagugaucgaagggugguccaauccuaagagcaaacugcagaucaaccggcaggucauuguggaccgcggaaauagaucuggcuauuccggcaucuucagcgucgaggggaaguccuguauuaaccggugcuuuuacguggaacugaucagaggacgcaaggaggaaaccgagguucucuggacaucuaauagcauuguggucuucuguggcaccuccgggacauauggaacgggcucuuggcccgauggggcugacaucaaccugaugccuguguga

SEQ ID NO: 214702 - RNA, 1410 nt, Artificial Sequence; identical to SEQ ID NO: 209977
  derived and/or modified CDS sequence (opt5) from neuraminidase__InfluenzaA__AFM72930

SEQ ID NO: 214703 - RNA, 1410 nt, Artificial Sequence; identical to SEQ ID NO: 209977
  derived and/or modified CDS sequence (opt5) from neuraminidase__InfluenzaA__AFM72941

SEQ ID NO: 214704 - RNA, 1410 nt, Artificial Sequence; identical to SEQ ID NO: 209977
  derived and/or modified CDS sequence (opt5) from neuraminidase__InfluenzaA__AFM72952

SEQ ID NO: 214705 - RNA, 1410 nt, Artificial Sequence; identical to SEQ ID NO: 209977
  derived and/or modified CDS sequence (opt5) from neuraminidase__InfluenzaA__AFM72963

SEQ ID NO: 214706 - RNA, 1410 nt, Artificial Sequence; identical to SEQ ID NO: 209977
  derived and/or modified CDS sequence (opt5) from neuraminidase__InfluenzaA__AFM72974

SEQ ID NO: 214707 - RNA, 1410 nt, Artificial Sequence; identical to SEQ ID NO: 211590
  derived and/or modified CDS sequence (opt5) from neuraminidase__InfluenzaA__AFM72985

SEQ ID NO: 214708 - RNA, 1410 nt, Artificial Sequence; identical to SEQ ID NO: 211590
  derived and/or modified CDS sequence (opt5) from neuraminidase__InfluenzaA__AFM72996

SEQ ID NO: 214709 - RNA, 1410 nt, Artificial Sequence; identical to SEQ ID NO: 211590
  derived and/or modified CDS sequence (opt5) from neuraminidase__InfluenzaA__AFM73007

SEQ ID NO: 214710 - RNA, 1410 nt, Artificial Sequence
  derived and/or modified CDS sequence (opt5) from neuraminidase__InfluenzaA__AFM73018
augaaccccaaucagaagaucauuaccaucggcagcgugugcaugacaauugggauggccaaccugauccuccaaauuggaaauaucaucuccauuuggaucucucacagcauucagcugggcaaccagucccagaucgagacguguaaucaaucugucauuaccuacgaaaacaauacauggguuaaccagaccuaugugaauaucagcaacacaaauuucgcugccgggcaguccguggucucugugaaacuugcgggaaacagcucccugugcccuguuagcggcugggcuauuuacucuaaggacaauuccaucagaaucgggagcaaaggagauguguuugucauucgggagccguucaucucuuguagcccccucgaaugccgcaccuuuuuccugacacagggcgcccuucugaacgacaagcauuccaauggcaccauuaaagauagaucuccuuaucggacgcucauguccugucccaucggggaggugccuagccccuacaacucccgcuuugaaucuguugccuggagcgcuuccgccugccacgacggaauuaacuggcugaccaucggcaucagcgggccugauaauggagcuguggccguccugaaguauaacggcauuaucacagacaccauuaagucuuggagaaauaacauccuccggacacaagaguccgagugugcgugcgugaaugggagcuguuucaccauuaugacggauggaccgucugacggccaggccagcuacaaaaucuuucgcaucgaaaagggcaaaauugugaaguccgucgagaugaacgcucccaauuaucauuacgaagagugcucuuguuacccugauagcuccgagaucacaugcguuugcagagacaacuggcacgggagcaaucggcccugggugucuuucaaccagaaucuggaauaucagauuggauacaucuguuccggcauuuuuggggauaacccucgccccaaugacaaaaccggaagcugcggcccggugucuuccaacggggccaauggagucaagggcuucagcuuuaaguauggcaacgggaucuggauuggaagaacaaaauccaucucuagccggaagggcuucgagaugaucugggauccuaacggguggaccggaaccgacaauaacuuuuccauuaaacaagacaucgugggcauuaaugaauggucuggguacagcggcuccuucguucagcaucccgagcuuacaggacuggauuguauccgcccuugcuucuggguggaacucauuagaggccggcccaaggagaacacgaucuggaccagcgggucuuccaucagcuuuuguggagucaauucugacacagugggcugguccuggcccgauggggcugagcugccuuucaccauugacaaauga

SEQ ID NO: 214711 - RNA, 1410 nt, Artificial Sequence; identical to SEQ ID NO: 214710
  derived and/or modified CDS sequence (opt5) from neuraminidase__InfluenzaA__AFM73028

SEQ ID NO: 214712 - RNA, 1410 nt, Artificial Sequence; identical to SEQ ID NO: 214710
  derived and/or modified CDS sequence (opt5) from neuraminidase__InfluenzaA__AFM73038

SEQ ID NO: 214713 - RNA, 1410 nt, Artificial Sequence; identical to SEQ ID NO: 210545
  derived and/or modified CDS sequence (opt5) from neuraminidase__InfluenzaA__AFM73048

SEQ ID NO: 214714 - RNA, 1410 nt, Artificial Sequence
  derived and/or modified CDS sequence (opt5) from neuraminidase__InfluenzaA__AFM73058
augaaccccaaucagaagaucauuaccaucggcagcuucugcaugacaauugggcuggccaaccucauccugcaaauuggaaauaucaucuccauuuggaucucucacagcauucagcuuggcaaccagaaucagaucgagacguguaaccaauccgugauuaccuacgaaaauaacacaugggucaaucagaccuauguuaacaucucuaauacaaacuuugcugccgggcagagcgugguguccgucaaacuggcgggaaauucuagccucugcccuguguccggcugggcuauuuacagcaaggacaacucuguuagaaucggguccaaaggagauguguucgucauccgggagccguuuauuagcuguucuccccuggaaugccgcaccuucuuucuuacacagggcgcccugcucaaugacaagcauuccaacggcaccaucaaagauagaagcccuuaucggacgcugaugucuugucccauuggggaggugccuucccccuacaacagccgcuucgaauccguugccuggucugcuagcgccugccacgacggaaucaauuggcugaccauuggcaucuccgggccugauaacggagcuguggccguccucaaguauaauggcaucauuacagacaccaucaagagcuggagaaacaauauucugcggacacaagagucugagugugcgugcgugaacggguccuguuuuaccgugaugacggauggaccgagcgacggccaggccucuuacaaaaucuuccgcauugaaaagggcaaaaucgucaagagcguugagaugaaugcucccaacuaucauuacgaagagugcuccuguuacccugauucuagcgagaucacaugcgugugcagagacaauuggcacggguccaaccggcccugggugagcuuuaaucagaaccuugaauaucgcauuggauacaucuguucuggcauuuucggggauaauccuagacccaacgacaaaaccggauccugcggcccggucagcucuaauggggccaacggagugaagggcuuuuccuucaaguauggcaacgggguuuggaucggacggacaaaaagcauuuccucucgcaauggcuuugagaugaucugggauccuaacggguggaccggaaccgacaagaauuucagcauuaaacaggacaucgugggcaucaacgaaugguccggguacucuggcagcuucguccaacaucccgagcugacaggacucgauuguauuagaccuugcuuuuggguggaacugauccggggccgccccaaggagaauacgauuuggaccuccgggagcucuaucuccuucuguggaguuaacagcgacacagugggcuggucuuggcccgauggggcugagcuuccuuuuaccauugacaaauga

SEQ ID NO: 214715 - RNA, 1410 nt, Artificial Sequence; identical to SEQ ID NO: 210545
  derived and/or modified CDS sequence (opt5) from neuraminidase__InfluenzaA__AFM73068

SEQ ID NO: 214716 - RNA, 1413 nt, Artificial Sequence; identical to SEQ ID NO: 207023
  derived and/or modified CDS sequence (opt5) from neuraminidase__InfluenzaA__AFM73480

SEQ ID NO: 214717 - RNA, 1350 nt, Artificial Sequence
  derived and/or modified CDS sequence (opt5) from neuraminidase__InfluenzaA__AFM78569
augaaccccaaucagaagaucauuaccaucggcagcauuugcauggugaucgggauugucucccugaugcuccaaaucggaaacaugaucucuauuuggguuauccacagcauucagacaggcaaucagcaucaggccgaguccaucucuaacacgaauccucugaccgaaaaagcuguggccagcgugacacuugcggggaacuccucucuguguccgauuagaggaugggcuguccacagcaaggacaauaacauccggauuggcuccaaaggggauguguucguuauccgcgagcccuuuaucagcugcucucaucucgaauguagaaccuucuuucugacacaaggagcccuucugaaugacaagcacuccaacggcaccgugaaagaucggagcccucaucgcacacucaugucuugccccgucggcgaggccccuucccccuacaauagcagauucgaaucuguggcuugguccgccagcgcuugucacgacgggaccuccuggcugacgauuggaaucucuggcccugauaacgaggccguugcggugcugaaguauaaugggauuaucaccgacacaauuaagagcuggcggaacgauauccuccgcacccaggaguccgaaugcgccugugucaauggaagcugcuuuacagugaugaccgacggcccgucuaacgggcaggcuuccuacaaaaucuucaagauggagaaaggaaagguggucaaaagcguugaacuggaugcccccaacuaucacuacgaggaguguucuugcuauccugacgcuggcgaaauuacgugugugugcagagauaauuggcauggcagcaaccggcccuggguguccuuuaaucagaaccuugaguaccaaaucggguauauuugcucuggagucuucggcgacaauccucgccccaacgaugggacaggaagcuguggcccgauguccccuaauggggccuacggagugaagggcuuuagcuucaaguacggcaacgggguuuggaucggaagaaccaaaucuacaaauucccggagcggcuuugaaaugauuugggaccccaacggguggaccggaaccgacucuuccuucagcgugaagcaggauaucgucgcgaucacagacugguccggcuauucugggagcuuugugcagcacccugagcugacgggccucgauugcauucgccccuguuucuggguugaacugaucagaggacggcccaaagaguccaccauuuggacaucuggcagcuccaucagcuucugcggggucaauucugacaccguguccuggagcuggccugauggagccgagcuuccguuuacaauugacaaguga

SEQ ID NO: 214718 - RNA, 1410 nt, Artificial Sequence
  derived and/or modified CDS sequence (opt5) from neuraminidase__InfluenzaA__AFM85180
augaaccccaaucagaagaucauuaccaucggcagcgugucccugacaauugccacgaucugcuuccucacccaaauugcuauccuggucacaaccguuacacuucacuuuaaacaguacgaguguaacucuagcccuaauaaccaggugaugcugugcgaaccgaccaucauugagagaaauaucacagaaauuguguaucucaccaacacgaccaucgagaaggaaauuugucccaaacuggccgaguaccggaauugguccaagccucagugcaacaucacaggguucgcgcccuuuucuaaagacaauagcauucgccuuuccgcuggaggcgauaucugggucaccagagagccuuaugugucuugugggcccgacaagugcuaccaauucgcccugggacagggcacaacccucaacaaugggcauagcaacgauacgguucacgaccggacaccuuaucgcacccugcugaugaaugaacucggagugccguuucaucugggcacaaagcaggucuguaucgccugguccucuagcuccugccacgauggcaaggcuuggcuucauguguguguuaccggggacgauaaaaacgccaccgcuagcuucauuuacaauggaagacugguggacucuaucggcuccuggagcaaaaagauucuccggacacaggagucugaaugcgucuguaucaacgggacgugcaccguggugaugacagauggauccgccagcggcaaagcggacaccaagauucuguuuaucgaggaggggaagaucguccacacaucccuucugucuggaagcgcccaacacguugaagagugcuccuguuauccccgcuacccuggcgugagaugcgugugucgggauaacuggaaaggcagcaaucgccccauugucgacaucaacgugaaggauuacucuauuguuuccagcuaugugugcucugggcucgucggagacaccccucggaaaaaugacagcuccucuagcucccauugucuggaucccaacaaugaagagggcgggcacggagugaagggcugggcuuucgacgaugggaacgacguuuggaugggaagaacgaucagcgaaaaacugcgcucuggcuacgagacauuuaaggugauugagggcugguccaaaccgaauagcaagcuccagaucaacagacaggucaucguggaucgggggaaucgcucuggauauuccggcauuuucagcgucgaagggaaguccugcaucaacagauguuuuuacguggagcugauucggggaagaaaucaggaaaccgagguucuuuggaccucuaacagcaucguggucuucugcggcacauccgggaccuauggcacaggaucuuggccugacggcgccgauauuaaucugaugcccaucuga

SEQ ID NO: 214719 - RNA, 1410 nt, Artificial Sequence; identical to SEQ ID NO: 206175
  derived and/or modified CDS sequence (opt5) from neuraminidase__InfluenzaA__AFN11830

SEQ ID NO: 214720 - RNA, 1410 nt, Artificial Sequence
  derived and/or modified CDS sequence (opt5) from neuraminidase__InfluenzaA__AFN11831
augaaccccaaucagaagaucauuaccaucggcagcgugucccugacaauugccacgaucugcuuccucaugcaaauugcuauccuggucaccacaguuacccuucacuuuaaacaguacgagugugacucuccugccaacaaucaggugaugccgugcgaacccaucauuaucgagagaaacauuacagaaaucguguaucugaccaauacaaccauugagaaggaaaucuguccuaaacucgucgaguaccggaacuggagcaagccccagugcaaaauuacgggguucgcgccuuuuuccaaggauaauucuauccgccugagcgcuggaggcgacaucugggugaccagagagcccuauguuuccugugauccugggaagugcuaccaauucgcccuuggacagggcacaacccuggacaacaaacauucuaaugauacaauucacgaccggaccccgcaucgcacgcuccugaugaacgaacugggggugcccuuucaccucggaacaagacaggucuguaucgccuggagcuccagcucuugccaugauggcaaggcuuggcugcacguguguguuaccggcuaugacaaaaaugccacagcuuccuucauuuacgaugggcggcuuguggacagcaucggaucuugguccaagaacauucugcgcacccaggagagcgaaugcgucuguaucaauggaaccugcacaguggugaugacggaugggucugccuccggcagagcggacaccaaaauccucuuuauugaggagggcaagaucguccacauuagcccucuguccgggucugcccaacauguugaagagugcagcuguuauccccgguacccuggagugcgcugcguguguagagauaacuggaagggcuccaaucggcccgucguggacaucaacguuaaagacuacagcauugugucuuccuaugucugcagcggccuugugggggauacaccgcgcaacaaugacagaucuagcuccucuuacugucggaacccuaauaacgaaaagggaaaucacggcguuaaagggugggcuuucgaugacggaaacgauguguggaugggccgcaccaucagcgaggaauccagaagcggguaugagacauuuaaggucaucggaggcuggucuacccccaauuccaaacugcagauuaacagacaggugaucgucgacagcgauaaucggucuggcuacuccgggauuuucagcguggagggaaaguccugcaucaaccgcuguuuuuauguugaacucauucggggcagagagcaggaaacgcgcgugugguggacaucuaauagcaucgucguguucugcgggaccuccggaaccuacggcacagggucuuggccugacggcgccgauauuaaccugaugcccaucuga

SEQ ID NO: 214721 - RNA, 1410 nt, Artificial Sequence; identical to SEQ ID NO: 206648
  derived and/or modified CDS sequence (opt5) from neuraminidase__InfluenzaA__AFN11833

SEQ ID NO: 214722 - RNA, 1410 nt, Artificial Sequence; identical to SEQ ID NO: 208583
  derived and/or modified CDS sequence (opt5) from neuraminidase__InfluenzaA__AFN11835

SEQ ID NO: 214723 - RNA, 1410 nt, Artificial Sequence
  derived and/or modified CDS sequence (opt5) from neuraminidase__InfluenzaA__AFN11836
augaaccccaaucagaagaucauuaccaucggcagcgugucccugacaauugccacgaugugcuuccucaugcaaaucgcuauucuggucaccacaguuacccuucacuuuaaacaguacgaguguucuagcccuccgaacaaucaggugaugcccugcgaaccuacaaucaucgagagaaacauuaccgaaaucguguaucugacaaauaccacgauugagaaggaaaucugucccaaacucgucgaguaccggaacugguccaagccucagugcaaaauuaccggguucgcccccuuuucuaaggacaauagcauccgccuguccgcgggaggcgauauuugggugacaagagagccuuauguuucuugugacccggggaagugcuaccaauucgcucuuggacagggcaccacacugaacaaucggcauagcaacgauaccgugcacgaccgcacgcccuauagaacacuccugaugaaugaacugggggucccuuuucaucucggaaccaaacagguguguaucgccugguccuccucuuccugccacgauggcaaggccuggcugcauguuugugugacaggccacgacaaaaacgcuaccgccagcuucaucuacgaugggcggcuugucgacucuauuggauccuggagcaagaauauccugcgcacccaggagucugaaugcguguguauuaacggcacaugcacgguggucaugaccgauggguccgcuagcgagagagccgacacaaaaauccucuuuauugaggaaggaaagaucauccacauuagcccccugucuggcagcgcgcaacauguugaggaaugcuccuguuauccucgguaccccggggugcgcugcguguguagagauaauuggaagggaagcaaccggccgaucgucgacauuaacgugaaagauuacucuaucguuuccagcuaugugugcucuggccuugucggcgacaccccucgcaagaaugacagaagcuccucuagcuacugucggaaccccaauaacgagaaagggucccacggagugaagggcugggccuucgaugacgggaaugauguuuggaugggacgcacaauuggcgaggaacugagaagcggguaugagaccuuuaaagugaucggaggcuggucuacgccuaacuccaagcuccagaucaaucggcaggucauuguggacagcggcaacagaucuggguacuccggaaucuucagcgucgaaggcaaauccugcauuaaucgcuguuuuuauguggagcugauccgggggagagaacaggagacacgcguuugguggaccucuaacagcauuguggucuucugcggaaccuccggcacauacgggaccggcucuuggcccgauggagcugacaucaaucugaugcccauuuga

SEQ ID NO: 214724 - RNA, 1410 nt, Artificial Sequence
  derived and/or modified CDS sequence (opt5) from neuraminidase__InfluenzaA__AFN11839
augaaccccaaucagaagaucauuaccaucggcagcgugucccugacaauugccacgaucugcuuccucaugcaaauugcuauccuggucaccacaguuacccuucacuuuaaacaguacgaguguucuagcccuccgaacaaucaggugaugcccugccagccuacaaucauugaaagaaacaucaccgagauuguguaucugacaaauaccacgaucgaaaaggagauuugucccaaacucgucgaauaccggaacugguccaagccucaaugcaaaaucaccggguucgcccccuuuucuaaggacaauagcauucgccuguccgcgggaggcgauaucugggugacaagagagccuuauguuucuugugacccggggaagugcuaccaguucgcucuuggacagggcaccacacugaacaaucggcauagcaacgauaccgugcacgaccgcacgcccuauagaacacuccugaugaaugagcugggggucccuuuucaucucggaaccaaacagguguguaucgccugguccuccucuuccugccacgauggcaaggccuggcugcauguuugugugacaggccacgacgaaaacgcuaccgccagcuucauuuacgaugggcggcuugucgacucuaucggauccuggagcaaaaauauucugcgcacccaagagucugaaugcguguguaucaacggcacaugcacgguggucaugaccgauggguccgcuagcgagagagccgacacaaagauucucuuuaucgaggaaggaaaaaucguucacauuagcccccugucuggcagcgcgcagcauguggaggaaugcuccuguuauccucgguaccccggggugcgcugcgucuguagagauaauuggaagggaagcaaccggccgaucguggacauuaacaugaaggauuacucuaucguuuccagcuaugugugcucuggccuugucggcgacaccccucgcaaaaaugacagcuccucuagcuccuacuguagaaaccccaauaacgagaaggggagccacggagugaaaggcugggccuucgaugacgggaaugauguuuggaugggacggacaauuucugaggaacugcgcuccggcuaugagaccuuuaaggugaucgggggauggagcacgccuaacucuaaacuccagaucaauagacaggucauuguggacuccggcaaccggagcggcuacuccgggaucuucucugucgaaggaaagagcugcauuaauagauguuuuuauguggagcugauccgcggccggaaacaagaaacaaagguuugguggaccuccaacucuauuguggucuucugcgggaccagcggaacauacggcaccggguccuggcccgauggcgcugacaucaaucugaugcccauuuga

SEQ ID NO: 214725 - RNA, 1410 nt, Artificial Sequence
  derived and/or modified CDS sequence (opt5) from neuraminidase__InfluenzaA__AFN11840
augaaccccaaucagaagaucauuaccaucggcagcgugucccugacaauugccacgaucugcuuccucaugcaaauugcuauccuggucaccacaguuacccuucacuuuaaacaguacgaguguaacucuccuccgaauaaccaggugaugcugugcgaacccacaaucauugagagaaauaucaccgaaauuguguaucucacaaacaccacgaucgagaaggaaauuuguccuaaacuggccgaguaccggaauuggagcaagccccagugcaaaaucaccggguucgcgccuuuuuccaaggacaacucuauucgccuuagcgcuggaggcgauaucugggucacaagagagcccuauguguccugugacccugggaagugcuaccaauucgcccugggacagggcaccacacucaauaaccggcauucuaaugauaccguucacgaccgcacgccguauagaacacugcugaugaacgaacucggggugcccuuucaucugggaaccaaacaggucuguaucgccuggagcuccagcucuugccacgauggcaaggcuuggcuucauguguguguuacaggccacgacgagaaugccaccgcuuccuucauuuacgaugggcggcugguggacagcaucggaucuugguccaaaaacauucuccgcacccaggaaagcgagugcgucuguaucaauggcacaugcacgguggugaugaccgaugggucugccuccgagagagcggacacaaagauucuguuuaucgaagagggaaaaaucguccacauuagcccucuuuccggcucugcccaacauguugaagagugcagcuguuauccccgguacccuggggugcgcugcguguguagagauaacuggaagggauccaaccggcccaucgucgacauuaaugugaaggauuacagcaucguuucuuccuaugugugcagcggccuggucggcgacaccccgcgcaaaaacgacucuagcuccucuagcuacuguagaaauccuaacaaugaaaaggggucccacggagugaaaggcugggcuuucgaugacgggaacgauguuuggaugggacggacaauuggcgaggagcuccgcagcggguaugaaaccuuuaaggugaucggaggcuggucuacgcccaauuccaaacugcagaucaacagacaggucauuguggaccggggcaauagaagcggguacucuggaaucuucuccgucgagggcaagagcugcauuaaccgcuguuuuuauguggaacugguucgggggagaaaacaggagacagaagugugguggaccuccaauucuaucgucguguucugcggaaccagcggcacauacgggaccggcuccuggccugauggagccgacauuaaccucaugcccaucuga

SEQ ID NO: 214726 - RNA, 1410 nt, Artificial Sequence; identical to SEQ ID NO: 208001
  derived and/or modified CDS sequence (opt5) from neuraminidase__InfluenzaA__AFN11841

SEQ ID NO: 214727 - RNA, 1410 nt, Artificial Sequence; identical to SEQ ID NO: 214089
  derived and/or modified CDS sequence (opt5) from neuraminidase__InfluenzaA__AFN11842

SEQ ID NO: 214728 - RNA, 1410 nt, Artificial Sequence
  derived and/or modified CDS sequence (opt5) from neuraminidase__InfluenzaA__AFN11844
augaaccccaaucagaagaucauuaccaucggcagcgugucccugacaauuucuacgaucugcuucuuuaugcaaauugccauccucaucaccacagucacccugcacuucaaacaguacgaguuuaacagcccuccgaauaaccagguuaugcuuugugaacccacaauuaucgagagaaauauuaccgaaaucguguaucugacaaacaccacgauugagaaggaaaucugcccuaaacucgcugaguaccggaauugguccaagccccaguguaacauuaccggguucgccccuuuuucuaaagacaauagcauccgccuguccgcgggaggcgauaucugggugacaagagagcccuaugucucuugcgacccugauaaguguuaccaauucgcucuugggcagggaaccacacugaacaaugugcauagcaacgacaccguucgggaucgcacgccguauagaacacuccugaugaaugaacugggcgugcccuuucaccucgggaccaagcaggucugcauugccugguccucuagcuccugucaugacggaaaagccuggcugcacgugugcguuacaggcgaugacaagaacgcuaccgccagcuucaucuacaauggccggcuuguggauucuauugucuccuggagcaaagagauccugcgcacccaggaaucugagugugugugcauuaacgggacauguacgguggucaugaccgacggauccgcuagcggcaaggccgauacaaaaauccucuuuaucgaggaagggaagauuguucauaccuccacacugucuggaagcgcgcaacacguggaggaaugcuccugcuauccuagauaccccggcgugcggugugucugccgcgacaacuggaaggggagcaauagaccuaucguggauauuaacaucaaagacuacucuauuguuuccagcuauguguguucuggacuugucggcgacacgccccggaagaaugauagcuccucuagcucccacugccuggacccgaacaaugaggaaggcgggcauggagugaaaggcugggccuucgaugacgggaacgauguuuggaugggacgcaccaucagcgagaagcucagaucuggcuacgagacauuuaaagugaucgaagggugguccaauccuaacagcaagcugcagauuaaucggcaggucaucguggaccgcggaaacagaucuggcuauuccggcauuuucagcgucgaggggaaauccuguaucaaucggugcuuuuacguggaacugauuagaggacgcaaggaggaaaccgagguucucuggaccucuaacagcaucguggucuucuguggcacauccgggaccuauggaacaggcucuuggcccgauggggcugacauuggccugaugccuauguga

SEQ ID NO: 214729 - RNA, 1410 nt, Artificial Sequence; identical to SEQ ID NO: 214648
  derived and/or modified CDS sequence (opt5) from neuraminidase__InfluenzaA__AFN11845

SEQ ID NO: 214730 - RNA, 1410 nt, Artificial Sequence; identical to SEQ ID NO: 214176
  derived and/or modified CDS sequence (opt5) from neuraminidase__InfluenzaA__AFN11847

SEQ ID NO: 214731 - RNA, 1410 nt, Artificial Sequence
  derived and/or modified CDS sequence (opt5) from neuraminidase__InfluenzaA__AFN11848
augaaccccaaucagaagaucauuaccaucggcagcgugucccugacaauuucuacgaucugcuucuuuaugcaaauugccauccucaucaccacagucacccugcacuucaaacaguacgaguuuaacagcccuccgaauaaccagguuaugcuuugugaacccacaauuaucgagagaaauauuaccgaaaucguguaucugacaaacaccacgauugagaaggaaaucugcccuaaacucgcugaguaccggaauugguccaagccccaguguaacauuaccggguucgccccuuuuucuaaagacaauagcauccgccuguccgcgggaggcgauaucugggugacaagagagcccuaugucucuugcgacccugauaaguguuaccaauucgcucuugggcagggaaccacacugaacaaugugcauagcaacgacaccguucacgaucggacgccguaucgcacacuccugaugaaugaacugggcgugcccuuucaucucgggaccaagcaggucugcauugccugguccucuagcuccugucacgacggaaaagccuggcugcaugugugcguuacaggcgaugacgagaacgcuaccgccagcuucaucuacaauggcagacuuguggauucuauugucuccuggagcaagaaaauccugcggacccaggaaucugagugugugugcauuaacgggacauguacgguggucaugaccgacggauccgcuagcggcaaggccgauacaaaaauccucuuuaucgaggaagggaagauuguucacaccuccacacugucuggaagcgcgcaacacguggaggaaugcuccugcuauccucgcuaccccggcgugagaugugucugccgggacaacuggaaggggagcaaucgcccuaucguggauauuaacaucaaagacuacucuauuguuuccagcuauguguguucuggacuugucggcgacacccccagaaagaaugauagcuccucuagcucccauugccugggcccgaacaaugaggaagggggacacggcgugaaagggugggccuucgacgauggaaacgacguuuggaugggccggacgaucagcgagaagcuccgcucuggguacgagacauuuaaagugaucgaaggaugguccaauccuaacagcaagcugcagauuaauagacaggucaucguggaucggggcaaccgcucuggcuauuccgggauuuucagcgucgagggaaaauccuguaucaauagaugcuuuuacguggaacugauucggggcagaaagcaggagaccgaaguucucuggaccucuaacagcaucguggucuucugugggacauccggaaccuauggcacagggucuuggcccgacggcgcugauauuaaucugaugccuaucuga

SEQ ID NO: 214732 - RNA, 1410 nt, Artificial Sequence
  derived and/or modified CDS sequence (opt5) from neuraminidase__InfluenzaA__AFN11850
augaaccccaaucagaagaucauuaccaucggcagcgugucccugacaauuucuacgaucugcuucuuuaugcaaauugccauccucaucaccacagucacccugcacuucaaacaguacgaguuuaacagcccuccgaauaaccagguuaugcuuugugaacccacaauuaucgagagaaauauuaccgaaaucguguaucugacaaacaccacgauugagaaggaaaucugcccuaaacucgcugaguaccggaauugguccaagccccagugugacauuaccggguucgccccuuuuucuaaagauaacagcauccgccuguccgcgggaggcgacaucugggugacaagagagcccuaugucucuugcgauccugacaaguguuaccaauucgcucuugggcagggaaccacacugaauaacgugcauagcaauaacaccguucggggccgcacgccguauagaacacuccugaugaaugaacugggggugcccuuucaccucggaaccaagcaggucugcauugccugguccucuagcuccugucaugauggcaaagccuggcugcacgugugcaucacaggcgacgauaagaacgcuaccgccagcuucauuuacaaugggcggcuuguugacucuguggucuccuggagcaaagagauccugcgcacccaggaaucugagugugugugcauuaacggaacauguacgguggucaugaccgauggcuccgcuagcgggaaggccgacacaaaaauccucuuuaucgaggaaggaaagauuguucauaccuccacacugucuggcagcgcgcaacacguggaggaaugcuccugcuauccuagauaccccggggugcggugugucugccgcgauaacuggaagggaagcaauagaccuaucguggacauuaacaucaaagaucacucuauuguuuccagcuacguguguucuggccuugucggcgacacgccccggaagaaugacagcuccucuagcucccauugccuggauccgaacaaugaggaagggggacacggcgugaaagggugggccuucgacgauggaaacgacguuuggaugggccgcaccaucagcgagaagucuagacucggguaugagacauuuaaagugaucgaaggaugguccaaucauaagagcaaacugcagauuaaccggcaggucaucguggaucgcggcaauagaucuggcuacuccgggauuuucagcgucgagggaaaguccuguaucaaccggugcuuuuauguggaacugauuagaggccgcaaggaggaaaccgagguucucuggaccucuaauagcaucguggucuucugugggacauccggaaccuacggcacagggucuuggccugacggcgcugaucugaaccuuaugcccauuuga

SEQ ID NO: 214733 - RNA, 1410 nt, Artificial Sequence
  derived and/or modified CDS sequence (opt5) from neuraminidase__InfluenzaA__AFN11851
augaaccccaaucagaagaucauuaccaucggcagcgugucccugacaauugccacgaucugccuccugaugcaaauugcuauccuugucaccacaguuacccugcacuucaaacaguacgaguguaacucuccuccgaauaaccaggugaugcucugcgaacccacaaucauugagagaaauaucaccaagauuguguaucugacaaacaccacgaucgaaaaagagauuuguccuaaacuugccgaauaccggaauuggagcaaaccccagugcaagaucaccggguuugcgccuuucuccaaggacaacucuauucgccugagcgcuggaggcgauaucugggucacaagagagcccuauguguccugugacccugggaaaugcuaccaauuugcccucggacagggcaccacacugaauaaccggcauucuaaugauaccguucacgaccgcacgccguauagaacacugcucaugaacgagcugggggugcccuuccaucuuggaaccaagcaggucuguaucgccuggagcuccagcucuugccacgauggcaaggcuuggcugcauguguguguuacaggccacgacgaaaaugccaccgcuuccuuuauuuacgaugggcggcucguggacagcaucggaucuugguccaagaacauucugcgcacccaggagagcgaaugcgucuguaucaauggcacaugcacgguggugaugaccgaugggucugccuccgagagagcggacacaaaaauucuuuucaucgaggaaggaaagaucguccacauuagcccucuguccggcucugcccaacauguugaggaaugcagcuguuauccccgguacccuggggugcgcugcguguguagagauaacuggaagggauccaaccggcccaucgucgacauuaaugugaaagauuacagcaucguuucuuccuaugugugcagcggccucgucggcgacaccccgcgcaagaacgacucuagcuccucuagcuacuguagaaauccuaacaaugagaaagggucccacggagugaagggcugggcuuuugaugacgggaacgauguuuggaugggacggacaauuagcgaggaacugcgcucuggcuaugagaccuucaaagugaucgggggaugguccaagcccaauagcaaacugcagaucaacagacaggucauuguggaccggggcaauagaucuggcuacuccgggaucuuuagcgucgaaggaaaguccugcauuaaccgcuguuucuauguggagcucauccggggcagaaagcaggaaacggagguuugguggacaucuaauagcauuguggucuuuugcgggaccuccggaaccuacggcacagggucuuggccugauggcgccgacaucaaccugaugcccauuuga

SEQ ID NO: 214734 - RNA, 1410 nt, Artificial Sequence; identical to SEQ ID NO: 206399
  derived and/or modified CDS sequence (opt5) from neuraminidase__InfluenzaA__AFN11853

SEQ ID NO: 214735 - RNA, 1410 nt, Artificial Sequence
  derived and/or modified CDS sequence (opt5) from neuraminidase__InfluenzaA__AFN11855
augaaccccaaucagaagaucauuaccaucggcagcgugucccugacaauuucuacgaucugcuucuuuaugcaaaccgccauucucaucacaaucgucacccugcacuucaaacaguacgaguuuaacagcccuccgaauaaccagguuaugcuuugugaacccacaauuaucgagagaaauauuaccgaaaucguguaucugacaaacaccacgauugagaaggaaaucugcccuaaacucgcugaguaccggaauugguccaagccccagugugacauuaccggguucgccccuuuuucuaaagauaacagcauccgccuguccgcgggaggcgacaucugggugacaagagagcccuaugucucuugcgauccugacaaguguuaccaauucgcucuugggcagggaaccacacugaauaacgugcauagcaaugauaccguucacgaccggacgccguaucgcacacuccugaugaacgaacugggcgugcccuuucaucucgggaccaagcaggucugcauugccugguccucuagcuccugucacgauggaaaagccuggcugcaugugugcaucacaggcgacgauaagaaugcuaccgccagcuucauuuacaacggcagacuuguugacucuaucguguccuggagcaaagagauucugcggacccaggaaucugagugugucugcaucaaugggacauguacgguggugaugaccgauggauccgcuagcggcaaggccgacacaaaaauccucuuuauugaggaagggaagaucguccacaccuccauucugucuggaagcgcgcaacacguugaggaaugcuccugcuauccucgcuaccccggcgugagaugugugugccgggauaacuggaaggggagcaaccgcccuaucgucgacauuaauaucaaagaccauucuaucguguccagcuacguuuguucuggacuugugggcgauacacccagaaagaacgacagcuccucuagcucccacugccuggauccgaauaacgaggaaggcgggcauggagucaaaggcugggccuucgacgaugggaaugacguguggaugggacggaccauuagcgagaagucucgccucggcuaugagacguuuaaaguuaucgaagggugguccaacccuaagagcaaacugcagauuaauagacaggugaucgucgaucggggaaaccgcucuggcuacuccggcauuuucagcguggaggggaaguccuguaucaauagaugcuuuuaugucgaacugauucggggaagaaaggaggaaacagaggugcucuggaccucuaacagcaucguuguguucuguggcaccuccgggacauacggaaccggcucuuggcccgacggggcugauaucaaucugaugccuauuuga

SEQ ID NO: 214736 - RNA, 1410 nt, Artificial Sequence; identical to SEQ ID NO: 208001
  derived and/or modified CDS sequence (opt5) from neuraminidase__InfluenzaA__AFN11857

SEQ ID NO: 214737 - RNA, 1410 nt, Artificial Sequence; identical to SEQ ID NO: 208810
  derived and/or modified CDS sequence (opt5) from neuraminidase__InfluenzaA__AFN17373

SEQ ID NO: 214738 - RNA, 1410 nt, Artificial Sequence; identical to SEQ ID NO: 214443
  derived and/or modified CDS sequence (opt5) from neuraminidase__InfluenzaA__AFN17383

SEQ ID NO: 214739 - RNA, 1410 nt, Artificial Sequence; identical to SEQ ID NO: 208810
  derived and/or modified CDS sequence (opt5) from neuraminidase__InfluenzaA__AFN17393

SEQ ID NO: 214740 - RNA, 1410 nt, Artificial Sequence; identical to SEQ ID NO: 208810
  derived and/or modified CDS sequence (opt5) from neuraminidase__InfluenzaA__AFN17403

SEQ ID NO: 214741 - RNA, 1410 nt, Artificial Sequence; identical to SEQ ID NO: 208810
  derived and/or modified CDS sequence (opt5) from neuraminidase__InfluenzaA__AFN17413

SEQ ID NO: 214742 - RNA, 1410 nt, Artificial Sequence; identical to SEQ ID NO: 208810
  derived and/or modified CDS sequence (opt5) from neuraminidase__InfluenzaA__AFN17423

SEQ ID NO: 214743 - RNA, 1410 nt, Artificial Sequence; identical to SEQ ID NO: 208810
  derived and/or modified CDS sequence (opt5) from neuraminidase__InfluenzaA__AFN17433

SEQ ID NO: 214744 - RNA, 1410 nt, Artificial Sequence; identical to SEQ ID NO: 208810
  derived and/or modified CDS sequence (opt5) from neuraminidase__InfluenzaA__AFN17443

SEQ ID NO: 214745 - RNA, 1410 nt, Artificial Sequence; identical to SEQ ID NO: 208810
  derived and/or modified CDS sequence (opt5) from neuraminidase__InfluenzaA__AFN17453

SEQ ID NO: 214746 - RNA, 1410 nt, Artificial Sequence; identical to SEQ ID NO: 208810
  derived and/or modified CDS sequence (opt5) from neuraminidase__InfluenzaA__AFN17459

SEQ ID NO: 214747 - RNA, 1410 nt, Artificial Sequence; identical to SEQ ID NO: 208810
  derived and/or modified CDS sequence (opt5) from neuraminidase__InfluenzaA__AFN17469

SEQ ID NO: 214748 - RNA, 1410 nt, Artificial Sequence; identical to SEQ ID NO: 208810
  derived and/or modified CDS sequence (opt5) from neuraminidase__InfluenzaA__AFN17479

SEQ ID NO: 214749 - RNA, 1410 nt, Artificial Sequence; identical to SEQ ID NO: 208810
  derived and/or modified CDS sequence (opt5) from neuraminidase__InfluenzaA__AFN17489

SEQ ID NO: 214750 - RNA, 1410 nt, Artificial Sequence; identical to SEQ ID NO: 208810
  derived and/or modified CDS sequence (opt5) from neuraminidase__InfluenzaA__AFN17499

SEQ ID NO: 214751 - RNA, 1410 nt, Artificial Sequence; identical to SEQ ID NO: 208810
  derived and/or modified CDS sequence (opt5) from neuraminidase__InfluenzaA__AFN17509

SEQ ID NO: 214752 - RNA, 1410 nt, Artificial Sequence; identical to SEQ ID NO: 208810
  derived and/or modified CDS sequence (opt5) from neuraminidase__InfluenzaA__AFN17519

SEQ ID NO: 214753 - RNA, 1410 nt, Artificial Sequence; identical to SEQ ID NO: 208810
  derived and/or modified CDS sequence (opt5) from neuraminidase__InfluenzaA__AFN17529

SEQ ID NO: 214754 - RNA, 1410 nt, Artificial Sequence; identical to SEQ ID NO: 208810
  derived and/or modified CDS sequence (opt5) from neuraminidase__InfluenzaA__AFN17539

SEQ ID NO: 214755 - RNA, 1410 nt, Artificial Sequence; identical to SEQ ID NO: 208810
  derived and/or modified CDS sequence (opt5) from neuraminidase__InfluenzaA__AFN17549

SEQ ID NO: 214756 - RNA, 1410 nt, Artificial Sequence; identical to SEQ ID NO: 208810
  derived and/or modified CDS sequence (opt5) from neuraminidase__InfluenzaA__AFN17559

SEQ ID NO: 214757 - RNA, 1410 nt, Artificial Sequence; identical to SEQ ID NO: 208810
  derived and/or modified CDS sequence (opt5) from neuraminidase__InfluenzaA__AFN17569

SEQ ID NO: 214758 - RNA, 1410 nt, Artificial Sequence; identical to SEQ ID NO: 208810
  derived and/or modified CDS sequence (opt5) from neuraminidase__InfluenzaA__AFN17575

SEQ ID NO: 214759 - RNA, 1410 nt, Artificial Sequence; identical to SEQ ID NO: 208810
  derived and/or modified CDS sequence (opt5) from neuraminidase__InfluenzaA__AFN17581

SEQ ID NO: 214760 - RNA, 1410 nt, Artificial Sequence; identical to SEQ ID NO: 208810
  derived and/or modified CDS sequence (opt5) from neuraminidase__InfluenzaA__AFN17587

SEQ ID NO: 214761 - RNA, 1410 nt, Artificial Sequence; identical to SEQ ID NO: 208810
  derived and/or modified CDS sequence (opt5) from neuraminidase__InfluenzaA__AFN17597

SEQ ID NO: 214762 - RNA, 1410 nt, Artificial Sequence; identical to SEQ ID NO: 214443
  derived and/or modified CDS sequence (opt5) from neuraminidase__InfluenzaA__AFN17607

SEQ ID NO: 214763 - RNA, 1410 nt, Artificial Sequence; identical to SEQ ID NO: 208810
  derived and/or modified CDS sequence (opt5) from neuraminidase__InfluenzaA__AFN17617

SEQ ID NO: 214764 - RNA, 1410 nt, Artificial Sequence; identical to SEQ ID NO: 208810
  derived and/or modified CDS sequence (opt5) from neuraminidase__InfluenzaA__AFN17627

SEQ ID NO: 214765 - RNA, 1410 nt, Artificial Sequence; identical to SEQ ID NO: 208810
  derived and/or modified CDS sequence (opt5) from neuraminidase__InfluenzaA__AFN17637

SEQ ID NO: 214766 - RNA, 1410 nt, Artificial Sequence; identical to SEQ ID NO: 208810
  derived and/or modified CDS sequence (opt5) from neuraminidase__InfluenzaA__AFN17647

SEQ ID NO: 214767 - RNA, 1410 nt, Artificial Sequence; identical to SEQ ID NO: 208810
  derived and/or modified CDS sequence (opt5) from neuraminidase__InfluenzaA__AFN17657

SEQ ID NO: 214768 - RNA, 1410 nt, Artificial Sequence; identical to SEQ ID NO: 208810
  derived and/or modified CDS sequence (opt5) from neuraminidase__InfluenzaA__AFN17667

SEQ ID NO: 214769 - RNA, 1410 nt, Artificial Sequence; identical to SEQ ID NO: 208810
  derived and/or modified CDS sequence (opt5) from neuraminidase__InfluenzaA__AFN17677

SEQ ID NO: 214770 - RNA, 1410 nt, Artificial Sequence; identical to SEQ ID NO: 214443
  derived and/or modified CDS sequence (opt5) from neuraminidase__InfluenzaA__AFN17687

SEQ ID NO: 214771 - RNA, 1410 nt, Artificial Sequence; identical to SEQ ID NO: 208810
  derived and/or modified CDS sequence (opt5) from neuraminidase__InfluenzaA__AFN17697

SEQ ID NO: 214772 - RNA, 1410 nt, Artificial Sequence; identical to SEQ ID NO: 214443
  derived and/or modified CDS sequence (opt5) from neuraminidase__InfluenzaA__AFN17707

SEQ ID NO: 214773 - RNA, 1410 nt, Artificial Sequence; identical to SEQ ID NO: 208810
  derived and/or modified CDS sequence (opt5) from neuraminidase__InfluenzaA__AFN17717

SEQ ID NO: 214774 - RNA, 1410 nt, Artificial Sequence; identical to SEQ ID NO: 214443
  derived and/or modified CDS sequence (opt5) from neuraminidase__InfluenzaA__AFN17727

SEQ ID NO: 214775 - RNA, 1410 nt, Artificial Sequence; identical to SEQ ID NO: 208810
  derived and/or modified CDS sequence (opt5) from neuraminidase__InfluenzaA__AFN17737

SEQ ID NO: 214776 - RNA, 1410 nt, Artificial Sequence; identical to SEQ ID NO: 208810
  derived and/or modified CDS sequence (opt5) from neuraminidase__InfluenzaA__AFN17743

SEQ ID NO: 214777 - RNA, 1410 nt, Artificial Sequence; identical to SEQ ID NO: 214443
  derived and/or modified CDS sequence (opt5) from neuraminidase__InfluenzaA__AFN17749

SEQ ID NO: 214778 - RNA, 1410 nt, Artificial Sequence; identical to SEQ ID NO: 208810
  derived and/or modified CDS sequence (opt5) from neuraminidase__InfluenzaA__AFN17759

SEQ ID NO: 214779 - RNA, 1410 nt, Artificial Sequence; identical to SEQ ID NO: 208810
  derived and/or modified CDS sequence (opt5) from neuraminidase__InfluenzaA__AFN17769

SEQ ID NO: 214780 - RNA, 1410 nt, Artificial Sequence; identical to SEQ ID NO: 208810
  derived and/or modified CDS sequence (opt5) from neuraminidase__InfluenzaA__AFN17775

SEQ ID NO: 214781 - RNA, 1410 nt, Artificial Sequence
  derived and/or modified CDS sequence (opt5) from neuraminidase__InfluenzaA__AFN17785
augaaccccaaucagaagaucauuaccaucggcagcgugugcaugacaauugggauggccaaccugauccuccaaauuggaaauaucaucuccauuuggaucucucacagcauucagcugggcaaccagaaucagaucgagacguguaaccaauccgucauuaccuacgaaaauaacacauggguuaaucagaccuaugugaacaucucuaauacaaacuucgcugccgggcagagcguggucuccgugaaacuugcgggaaauucuagccugugcccuguuuccggcugggcuauuuacagcaaggacaacucuaucagaaucggguccaaaggagauguguuugucauucgggagccguucaucagcuguucuccccucgaaugccgcaccuuuuuccugacacagggcgcccuucugaaugacaagcauuccaacggcaccauuaaagauagaagcccuuaucggacgcucaugucuugucccaucggggaggugccuucccccuacaacagccgcuuugaauccguugccuggucugcuagcgccugccacgacggaauuaauuggcugaccaucggcaucuccgggccugauaacggagcuguggccguccugaaguauaauggcauuaucacagacaccauuaagagcuggagaaacaauauccuccggacacaagagucugagugugcgugcgugaacggguccuguuucacccugaugacggauggaccgagcgacggccaggccucuuacaaaauuuuucgcaucgaaaagggcaaaaucgucaagagcguggagaugaaugcucccaacuaucauuacgaagagugcuccuguuacccugauucuagcgagauuacaugcguuugcagagacaauuggcacggguccaaccggcccugggugagcuucaaucagaaccuugaauaucagaucggauacauuuguucuggcaucuuuggggauaauccucgccccaacgacaaaaccggauccugcggcccggugagcucuaauggggccaacggagucaagggcuucuccuuuaaguauggcaacgggguguggauuggaagaacaaaaagcaucuccucucggaauggcuucgagaugauuugggauccuaacggguggaccggaaccgacaauacauuuagcaucaagcaagacaucguuggcauuaacgaaugguccggguacucuggcagcuucgugcagcaucccgagcugacgggacucgauuguauccgcccuugcuucugggucgaacugauuagaggccggcccaaagagaauaccaucuggacauccgggagcucuauuuccuuuuguggagugaacagcgacaccguuggcuggucuuggcccgauggggcugagcuuccuuucacaaucgacaaguga

SEQ ID NO: 214782 - RNA, 1410 nt, Artificial Sequence
  derived and/or modified CDS sequence (opt5) from neuraminidase__InfluenzaA__AFN17795
augaaccccaaucagaagaucauuaccaucggcagcgugugcaugacaauugggauggccaaccugauccuccaaauuggaaauaucaucuccauuuggaucucucacagcauucagcugggcaaccagaaucagaucgagacguguaaccaauccgucauuaccuacgaaaauaacacauggguuaaucagaccuaugugaacaucucuaauacaaacuucgcugccgggcagagcguggucuccgugaaacuugcgggaaauucuagccugugcccuguuggcgggugggcuauuuacuccaaggacaacagcaucagaaucggaucuaaaggcgauguguuugucauucgggagccguucaucuccuguagcccccucgaaugccgcaccuuuuuccugacacagggcgcccuucugaaugacaagcauucuaacgggaccauuaaagauagauccccuuaucggacgcucaugagcugucccaucggagaggugccuucucccuacaacucccgcuuugaaagcguugccugguccgcuucugccugccacgacggcauuaauuggcugaccaucgggaucagcggaccugauaacggcgcuguggccguccugaaguauaaugggauuaucacagacaccauuaaguccuggagaaacaauauccuccggacacaagagagcgagugugcgugcgugaacggaucuuguuucaccgugaugacggauggcccguccgacggccaggccagcuacaaaauuuuucgcaucgaaaaggggaaaaucgucaagucuguugagaugaaugcucccaacuaucauuacgaagagugcagcuguuacccugauuccucugagauuacaugcgugugcagagacaauuggcacggaagcaaccggcccuggguguccuucaaucagaaccuggaauaucagaucggcuacauuuguagcgggaucuuuggagauaauccucgccccaacgacaaaaccggcucuugcgggccggucuccagcaauggagccaacggcgugaagggcuucucuuuuaaguaugggaacggaguuuggauuggcagaacaaaauccaucagcucccggaauggguucgagaugauuugggauccuaacggauggaccggcaccgacaauaacuuuucuaucaagcaagacaucguggggauuaaugaauggagcggcuacuccggaucuuucguccagcaucccgagcuuacaggccuggauuguauccgcccuugcuucuggguggaacucauuagagggcggcccaaagagaacacgaucuggaccagcggauccagcauuucuuuuuguggcguuaauuccgacacagugggguggagcuggcccgauggagcugagcugccuuucaccaucgacaaguga

SEQ ID NO: 214783 - RNA, 1410 nt, Artificial Sequence; identical to SEQ ID NO: 208810
  derived and/or modified CDS sequence (opt5) from neuraminidase__InfluenzaA__AFN17805

SEQ ID NO: 214784 - RNA, 1410 nt, Artificial Sequence
  derived and/or modified CDS sequence (opt5) from neuraminidase__InfluenzaA__AFN17815
augaaccccaaucagaagaucauuaccaucggcagcguguccaugacaauugggauggccaaccugauccuccaaauuggaaauaucaucucuauuuggaucagccacuccauucagcugggcaaccagaaucagaucgagacgugcaaccaaucugucauuaccuacgaaaauaacacauggguuaaucagaccuaugugaacaucagcaauacaaacuucgcugccgggcaguccguggucucugugaaacuugcgggaaauagcucccuguguccuguuagcggcugggcuauuuacucuaaggacaacuccaucagaaucgggagcaaaggagauguguuugucauucgggagccguucaucucuugcagcccccucgaaugucgcaccuuuuuccugacacagggcgcccuucugaaugacaagcauuccaacggcaccauuaaagauagaucuccuuaucggacgcucauguccugccccaucggggaggugccuagccccuacaacucccgcuuugaaucuguugccuggagcgcuuccgccugucacgacggaauuaauuggcugaccaucggcaucagcgggccugauaacggagcuguggccguccugaaguauaauggcauuaucacagacaccauuaagucuuggagaaacaauauccuccggacacaagaguccgagugcgcgugugugaacgggagcugcuucaccgugaugacggauggaccgucugacggccaggccagcuacaaaauuuuucgcaucgaaaagggcaaaaucgucaaguccguugagaugaaugcucccaacuaucauuacgaagaguguucuugcuacccugauagcuccgagauuacaugugugugcagagacaauuggcacgggagcaaccggcccugggugucuuucaaucagaaccuggaauaucagaucggauacauuugcuccggcaucuuuggggauaauccucgccccaacgacaaaaccggaagcuguggcccggucucuuccaauggggccaacggagugaagggcuucagcuuuaaguauggcaacgggguuuggauuggaagaacaaaauccaucucuagccggaauggcuucgagaugauuugggauccuaacggguggaccggaaccgacaauaacuuuuccaucaagcaagacaucgugggcauuaaugaauggucuggguacagcggcuccuucguccagcaucccgagcuuacaggacuggauugcauccgcccuuguuucuggguggaacucauuagaggccggcccaaagagaacacgaucuggaccagcgggucuuccauuagcuuuugcggaguuaauucugacacagugggcugguccuggcccgauggggcugagcugccuuucaccaucgacaaguga

SEQ ID NO: 214785 - RNA, 1410 nt, Artificial Sequence; identical to SEQ ID NO: 208810
  derived and/or modified CDS sequence (opt5) from neuraminidase__InfluenzaA__AFN17825

SEQ ID NO: 214786 - RNA, 1410 nt, Artificial Sequence; identical to SEQ ID NO: 214443
  derived and/or modified CDS sequence (opt5) from neuraminidase__InfluenzaA__AFN17835

SEQ ID NO: 214787 - RNA, 1410 nt, Artificial Sequence; identical to SEQ ID NO: 208810
  derived and/or modified CDS sequence (opt5) from neuraminidase__InfluenzaA__AFN17845

SEQ ID NO: 214788 - RNA, 1410 nt, Artificial Sequence; identical to SEQ ID NO: 208810
  derived and/or modified CDS sequence (opt5) from neuraminidase__InfluenzaA__AFN17855

SEQ ID NO: 214789 - RNA, 1410 nt, Artificial Sequence; identical to SEQ ID NO: 210624
  derived and/or modified CDS sequence (opt5) from neuraminidase__InfluenzaA__AFN17865

SEQ ID NO: 214790 - RNA, 1410 nt, Artificial Sequence; identical to SEQ ID NO: 214443
  derived and/or modified CDS sequence (opt5) from neuraminidase__InfluenzaA__AFN17875

SEQ ID NO: 214791 - RNA, 1410 nt, Artificial Sequence; identical to SEQ ID NO: 214443
  derived and/or modified CDS sequence (opt5) from neuraminidase__InfluenzaA__AFN17885

SEQ ID NO: 214792 - RNA, 1410 nt, Artificial Sequence; identical to SEQ ID NO: 208810
  derived and/or modified CDS sequence (opt5) from neuraminidase__InfluenzaA__AFN17895

SEQ ID NO: 214793 - RNA, 1410 nt, Artificial Sequence; identical to SEQ ID NO: 214443
  derived and/or modified CDS sequence (opt5) from neuraminidase__InfluenzaA__AFN17905

SEQ ID NO: 214794 - RNA, 1410 nt, Artificial Sequence; identical to SEQ ID NO: 208810
  derived and/or modified CDS sequence (opt5) from neuraminidase__InfluenzaA__AFN17911

SEQ ID NO: 214795 - RNA, 1410 nt, Artificial Sequence; identical to SEQ ID NO: 214443
  derived and/or modified CDS sequence (opt5) from neuraminidase__InfluenzaA__AFN17921

SEQ ID NO: 214796 - RNA, 1410 nt, Artificial Sequence
  derived and/or modified CDS sequence (opt5) from neuraminidase__InfluenzaA__AFN17931
augaaccccaaucagaagaucauuaccaucggcagcgugugcaugacaauugggauggccaaccugauccuccaaauuggaaauaucaucuccauuuggaucucucacagcauucagcugggcaaccagaaucagaucgagacguguaaccaauccgucauuaccuacgaaaauaacacauggguuaaucagaccuaugugaacaucucuaauacaaacuucgcugccgggcagagcguggucuccgugaaacuugcgggaaauucuagccugugcccuguuuccggcugggcuauuuacagcaaggacaacucuaucagaaucgggucccggggagauguguuugucauucgcgagccguucaucagcuguucuccccucgaaugcagaaccuuuuuccugacacagggcgcccuucugaaugacaaacauuccaacggcaccauuaaggaucggagcccuuaucgcacgcucaugucuugucccaucggggaggugccuucccccuacaacagcagauuugaauccguugccuggucugcuagcgccugccacgacggaauuaauuggcugaccaucggcaucuccgggccugauaacggagcuguggccguccugaaauauaauggcauuaucacagacaccauuaagagcuggcggaacaauauccuccgcacacaagagucugagugugcgugcgugaacggguccuguuucaccgugaugacggauggaccgagcgacggccaggccucuuacaagauuuuuagaaucgaaaaaggcaagaucgucaaaagcguugagaugaaugcucccaacuaucauuacgaagagugcuccuguuacccugauucuagcgagauuacaugcgugugccgggacaauuggcacggguccaaccgccccugggugagcuucaaucagaaccuggaauauagaaucggauacauuuguucuggcaucuuuggggauaauccucggcccaacgacaagaccggauccugcggcccggucagcucuaauggggccaacggagugaaaggcuucuccuuuaaguauggcaacgggguuuggauuggacgcacaaagagcaucuccucuagaaauggcuucgagaugauuugggauccuaacggguggaccggaaccgacaauaacuuuagcaucaaacaggacaucgugggcauuaaugaaugguccggguacucuggcagcuucguccaacaucccgagcuuacaggacuggauuguauccggccuugcuucuggguggaacucauucgcggcagacccaaggagaacacgaucuggaccuccgggagcucuauuuccuuuuguggaguuaauagcgacacagugggcuggucuuggcccgauggggcugagcugccuuucaccaucgacaaauga

SEQ ID NO: 214797 - RNA, 1410 nt, Artificial Sequence; identical to SEQ ID NO: 208810
  derived and/or modified CDS sequence (opt5) from neuraminidase__InfluenzaA__AFN17941

SEQ ID NO: 214798 - RNA, 1410 nt, Artificial Sequence; identical to SEQ ID NO: 208810
  derived and/or modified CDS sequence (opt5) from neuraminidase__InfluenzaA__AFN17951

SEQ ID NO: 214799 - RNA, 1410 nt, Artificial Sequence
  derived and/or modified CDS sequence (opt5) from neuraminidase__InfluenzaA__AFN17961
augaaccccaaucagaagaucauuaccaucggcagcgugugcaugacaauugggauggccaaccugauccuccaaauuggaaauaucaucuccauuuggaucucucacagcauucagcugggcaaccagaaucagaucgagacguguaaccaauccgucauuaccuacgaaaauaacacauggguuaaucagaccuaugugaacaucucuaauacaaacuucgcugccgggcagagcguggucuccgugaaacuugcgggaaauucuagccugugcccuguuuccggcugggcuauuuacagcaaggacaacucuaucagaaucggguccaaaggagauguguuugucauucgggagccguucaucagcuguucuccccucgaaugccgcaccuuuuuccugacacagggcgcccuucugaaugacaagcauuccaacggcaccauuaaagauagaagcccuuaucggacgcucaugucuugucccaucggggaggugccuucccccuacaacagccgcuuugaauccguugccuggucugcuagcgccugccacgacggaauuaauuggcugaccaucggcaucuccgggccugauaacggagcuguggccguccugaaguauaauggcauuaucacagacaccauuaagagcuggagaaacaauauccuccggacacaagagucugagugugcgugcgugaacggguccuguuucaccgugaugacggauggaccgagcgacggccaggccucuuacaaaauuuuucgcaucgaaaagggcaaaaucgucaauagcguugagaugaacgcucccaauuaucauuacgaagagugcuccuguuacccugauucuagcgagauuacaugcgugugcagagacaacuggcacggguccaaucggcccugggugagcuucaaccagaaucuggaauaucagaucggauacauuuguucuggcaucuuuggggauaacccucgccccaaugacaagaccggauccugcggcccggucagcucuaacggggccaacggagugaaaggcuucuccuuuaaguauggcaaugggguuuggauuggaagaacaaagagcaucuccucucggaacggcuucgagaugauuugggauccuaauggguggaccggaaccgacaacaauuuuagcaucaaacaagacaucgugggcauuaacgaaugguccggguacucuggcagcuucguccagcaucccgagcuuacaggacuggauuguauccgcccuugcuucuggguggaacucauuagaggccggcccaaggagaauacgaucuggaccuccgggagcucuauuuccuuuuguggaguuaacagcgacacagugggcuggucuuggcccgauggggcugagcugccuuucaccaucgacaaauga

SEQ ID NO: 214800 - RNA, 1410 nt, Artificial Sequence; identical to SEQ ID NO: 208810
  derived and/or modified CDS sequence (opt5) from neuraminidase__InfluenzaA__AFN17971

SEQ ID NO: 214801 - RNA, 1410 nt, Artificial Sequence; identical to SEQ ID NO: 208810
  derived and/or modified CDS sequence (opt5) from neuraminidase__InfluenzaA__AFN17981

SEQ ID NO: 214802 - RNA, 1410 nt, Artificial Sequence; identical to SEQ ID NO: 208810
  derived and/or modified CDS sequence (opt5) from neuraminidase__InfluenzaA__AFN17991

SEQ ID NO: 214803 - RNA, 1410 nt, Artificial Sequence
  derived and/or modified CDS sequence (opt5) from neuraminidase__InfluenzaA__AFN18001
augaaccccaaucagaagaucauuaccaucagcuccgugugcaugacaauuggcauggccaaccugauccuccaaauugggaauaucaucucuauuuggaucagccacuccauucagcugggaaaccagaaucagaucgagacguguaaccaaucugucauuaccuacgaaaauaacacauggguuaaucagaccuaugugaacaucagcaauacaaacuucgcugccggccaguccguggucucugugaaacuugcggggaauagcucccugugcccuguuagcggaugggcuauuuacucuaaggacaacuccaucagaaucggcagcaaaggggauguguuugucauucgggagccguucaucucuuguucuccccucgaaugccgcaccuuuuuccugacacagggagcccuucugaaugacaagcauagcaacggcaccauuaaagauagaucuccuuaucggacgcucauguccugucccaucggcgaggugccuagccccuacaacucccgcuuugaaucuguugccuggagcgcuuccgccugccacgacgggauuaauuggcugaccaucggaaucagcggcccugauaacggggcuguggccguccugaaguauaauggaauuaucacagacaccauuaagucuuggagaaacaauauccuccggacacaagaguccgagugugcgugcgugaacggcagcuguuucacccugaugacggaugggccgucugacggacaggccagcuacaaaauuuuucgcaucgaaaagggcaaaaucgugaaguccgucgagaugaaugcucccaacuaucauuacgaagagugcucuuguuacccugauagcuccgagauuacaugcguuugcagagacaauuggcacggcagcaaccggcccugggugucuuucaaucagaaccuugaauaucagaucggguacauuuguuccggaaucuuuggcgauaauccucgccccaacgacaaaaccgggagcugcggaccggugucuuccaauggcgccaacggggucaagggauucagcuuuaaguauggcaacggcguguggauugggagaacaaaauccaucucuagccggaauggauucgagaugauuugggauccuaacggcuggaccgggaccgacaauaacuuuuccaucaagcaagacaucguuggaauuaaugaauggucuggcuacagcggguccuucgugcagcaucccgagcugacaggccucgauuguauccgcccuugcuucugggucgaacugauuagaggacggcccaaagagaacacgaucuggaccagcggcuccuccauuagcuuuugugggguuaauucugacacagugggaugguccuggcccgauggcgcugagcuuccuuucaccaucgacaaguga

SEQ ID NO: 214804 - RNA, 1410 nt, Artificial Sequence; identical to SEQ ID NO: 208810
  derived and/or modified CDS sequence (opt5) from neuraminidase__InfluenzaA__AFN18011

SEQ ID NO: 214805 - RNA, 1410 nt, Artificial Sequence; identical to SEQ ID NO: 208810
  derived and/or modified CDS sequence (opt5) from neuraminidase__InfluenzaA__AFN18021

SEQ ID NO: 214806 - RNA, 1410 nt, Artificial Sequence
  derived and/or modified CDS sequence (opt5) from neuraminidase__InfluenzaA__AFN18031
augaaccccaaucagaagaucauuaccaucggcagcauuugcaugacaaucgggauggccaaccugauucuccaaaucggaaauaucauuuccaucuggauuucucacagcauccagcugggcaaccagaaucagauugagacguguaaccaauccgugaucaccuacgaaaauaacacaugggucaaucagaccuauguuaacauuucuaauacaaacuucgcugccgggcagagcgugguguccgucaaacuugcgggaaauucuagccugugcccuguguccggcugggcuaucuacagcaaggacaacucuaucagaauuggguccaaaggagauguuuuugugauccgggagccguucauuagcuguucuccccucgaaugccgcaccuuuuuccugacacagggcgcccuucugaaugacaagcauuccaacggcaccaucaaagauagaagcccuuaucggacgcucaugucuugucccauuggggaggucccuucccccuacaacagccgcuuugaauccguggccuggucugcuagcgccugccacgacggaaucaauuggcugaccaucggcauuuccgggccugauaacggagcuguugccgugcugaaguauaauggcaucauuacagacaccaucaagagcuggagaaacaauauucuccggacacaagagucugagugugcgugcgucaacggguccuguuucacccugaugacggauggaccgagcgacggccaggccucuuacaaaaucuuucgcaucgaaaagggcaaaauugucaagagcguggagaugaaugcucccaacuaucauuacgaagagugcuccuguuacccugauucuagcgagaucacaugcgugugcagagacaauuggcacggguccaaccggcccuggguuagcuucaaucagaaccuugaauaucagauuggauacaucuguucuggcauuuuuggggauaauccucgccccaacgacaaaaccggauccugcggcccggugagcucuaauggggccaacggagugaagggcuucuccuuuaaguauggcaacggggucuggaucggaagaacaaaaagcauuuccucucggaauggcuucgagaugaucugggauccuaacggguggaccggaaccgacaauaacuuuagcaucaagcaagacauugugggcaucaaugaaugguccggguacucuggcagcuucguucagcaucccgagcugacaggacucgauuguauucgcccuugcuucuggguggaacugaucagaggccggcccaaagagaacacgauuuggaccuccgggagcucuaucuccuuuuguggagucaauagcgacacagugggcuggucuuggcccgauggggcugagcuuccuuucaccaucgacaaguga

SEQ ID NO: 214807 - RNA, 1410 nt, Artificial Sequence; identical to SEQ ID NO: 208810
  derived and/or modified CDS sequence (opt5) from neuraminidase__InfluenzaA__AFN18041

SEQ ID NO: 214808 - RNA, 1410 nt, Artificial Sequence; identical to SEQ ID NO: 214443
  derived and/or modified CDS sequence (opt5) from neuraminidase__InfluenzaA__AFN18051

SEQ ID NO: 214809 - RNA, 1410 nt, Artificial Sequence; identical to SEQ ID NO: 214443
  derived and/or modified CDS sequence (opt5) from neuraminidase__InfluenzaA__AFN18061

SEQ ID NO: 214810 - RNA, 1410 nt, Artificial Sequence; identical to SEQ ID NO: 208810
  derived and/or modified CDS sequence (opt5) from neuraminidase__InfluenzaA__AFN18070

SEQ ID NO: 214811 - RNA, 1410 nt, Artificial Sequence; identical to SEQ ID NO: 208810
  derived and/or modified CDS sequence (opt5) from neuraminidase__InfluenzaA__AFN18080

SEQ ID NO: 214812 - RNA, 1410 nt, Artificial Sequence; identical to SEQ ID NO: 208810
  derived and/or modified CDS sequence (opt5) from neuraminidase__InfluenzaA__AFN18090

SEQ ID NO: 214813 - RNA, 1410 nt, Artificial Sequence; identical to SEQ ID NO: 208810
  derived and/or modified CDS sequence (opt5) from neuraminidase__InfluenzaA__AFN18100

SEQ ID NO: 214814 - RNA, 1410 nt, Artificial Sequence; identical to SEQ ID NO: 208810
  derived and/or modified CDS sequence (opt5) from neuraminidase__InfluenzaA__AFN18106

SEQ ID NO: 214815 - RNA, 1410 nt, Artificial Sequence
  derived and/or modified CDS sequence (opt5) from neuraminidase__InfluenzaA__AFN18108
augaaccccaaucagaagaucauuaccaucggcagcgugugcaugacaauugggauggccaaccugauccuccaaauuggaaauaucaucuccauuuggaucucucacagcauucagcugggcaaccagaaucagaucgagacguguaaccaauccgucauuaccuacgaaaauaacacauggguuaaucagaccuaugugaacaucucuaauacaaacuucgcugccgggcagagcguggucuccgugaaacuugcgggaaauucuagccugugcccuguuuccggcugggcuauuuacagcaaggacaacucuaucagaaucggguccaaaggagauguguuugucauucgggagccguucaucagcuguucuccccucgaaugccgcaccuuuuuccugacacagggcgcccuucugaaugacaagcauuccaacggcaccauuaaagauagaagcccuuaucggacgcucaugucuugucccaucggggaggugccuucccccuacaacagccgcuuugaauccguugccuggucugcuagcgccugccacgacggaauuaauuggcugaccaucggcaucuccgggccugauaacggagcuguggccguccugaaguauaauggcauuaucacagacaccauuaagagcuggagaaacaauauccuccggacacaagagucugagugugcgugcgugaacggguccuguuucaccgugaugacggauggaccgagcgacggccaggccucuuacaaaauuuuucgcaucgaaaagggcaaaaucgucaagagcguugagaugaaugcucccaacuaucauuacgaagagugcuccuguuacccugauucuagcgagauuacaugcgugugcagagacaauuggcacggguccaaccggcccugggugagcuucaaucagaaccuggaauaucgcaucggauacauuuguucuggcaucuuuggggauaauccuagacccaacgacaaaaccggauccugcggcccgguccuuagcaauggggccaacggagugaagggcuucucuuuuaaguauggcaacgggguuuggauuggacggacaaaauccaucagcucccgcaauggcuucgagaugauuugggauccuaacggguggaccggaaccgacaauaacuuuucuaucaagcaggacaucgugggcauuaaugaauggagcggguacuccggcucuuucguccaacaucccgagcugacaggacucgauuguaucagaccuugcuucuggguggaacugauucggggccgccccaaagagaacacgaucuggaccagcggguccagcauuucuuuuuguggaguuaauuccgacacagugggcuggagcuggcccgauggggcugagcuuccuuucaccaucgacaaguga

SEQ ID NO: 214816 - RNA, 1410 nt, Artificial Sequence
  derived and/or modified CDS sequence (opt5) from neuraminidase__InfluenzaA__AFN18118
augaaccccaaucagaagaucauuaccaucggcagcgugugcaugacaauugggauggccaaccugauccuccaaauuggaaauaugaucuccaucuggauuucucacagcauccagcugggcaaccagaaucagauugagacguguaaccaauccgucaucaccuacgaaaauaacacauggguuaaucagaccuaugugaaaauuucuaacacaaauuucgcugccgggcagagcguggucuccgugaaacuugcgggaaacucuagccugugcccuguuuccggcugggcuaucuacagcaaggacaauucuauuagaaucggguccaagggagauguguuugucauccgggagccguucauuagcuguucuccccucgaaugccgcaccuuuuuccugacacagggcgcccuucugaacgacaaacauuccaauggcaccaucaaggauagaagcccuuaucggacgcucaugucuugucccauuggggaggugccuucccccuacaacagccgcuuugaauccguugccuggucugcuagcgccugccacgacggaaucaacuggcugaccauuggcaucuccgggccugauaauggagcuguggccguccugaaguauaacggcaucauuacagacaccaucaaaagcuggagaaauaacauucuccggacacaagagucugagugugcgugcgugaauggguccuguuucacccugaugacggauggaccgagcgacggccaggccucuuacaagaucuuucgcauugaaaaaggcaagaucgugaaaagcgucgagaugaacgcucccaauuaucauuacgaagagugcuccuguuacccugauucuagcgagaucacaugcguuugcagagacaacuggcacggguccaaucggcccugggugagcuucaaccagaaucuugaauaucagauuggauacaucuguucuggcauuuuuggggauaacccucgccccaaugacaagaccggauccugcggcccggugagcucuaacggggccaauggagucaagggcuucuccuuuaaauauggcaacgggguguggaucggaagaacaaagagcauuuccucucggaacggcuucgagaugaucugggauccuaauggguggaccggaaccgacaacaauuuuagcauuaaacaagacaucguuggcaucaacgaaugguccggguacucuggcagcuucgugcagcaucccgagcugacaggacucgauuguauucgcccuugcuucugggucgaacugaucagaggccggcccaaggagaauacgauuuggaccuccgggagcucuaucuccuuuuguggagugaacagcgacacaguuggcuggucuuggcccgauggggcugagcuuccuuucaccauugacaaauga

SEQ ID NO: 214817 - RNA, 1410 nt, Artificial Sequence; identical to SEQ ID NO: 208810
  derived and/or modified CDS sequence (opt5) from neuraminidase__InfluenzaA__AFN18120

SEQ ID NO: 214818 - RNA, 1410 nt, Artificial Sequence; identical to SEQ ID NO: 208810
  derived and/or modified CDS sequence (opt5) from neuraminidase__InfluenzaA__AFN18122

SEQ ID NO: 214819 - RNA, 1410 nt, Artificial Sequence; identical to SEQ ID NO: 214443
  derived and/or modified CDS sequence (opt5) from neuraminidase__InfluenzaA__AFN18128

SEQ ID NO: 214820 - RNA, 1410 nt, Artificial Sequence; identical to SEQ ID NO: 214443
  derived and/or modified CDS sequence (opt5) from neuraminidase__InfluenzaA__AFN18134

SEQ ID NO: 214821 - RNA, 1410 nt, Artificial Sequence; identical to SEQ ID NO: 208810
  derived and/or modified CDS sequence (opt5) from neuraminidase__InfluenzaA__AFN18136

SEQ ID NO: 214822 - RNA, 1410 nt, Artificial Sequence; identical to SEQ ID NO: 208810
  derived and/or modified CDS sequence (opt5) from neuraminidase__InfluenzaA__AFN18138

SEQ ID NO: 214823 - RNA, 1410 nt, Artificial Sequence
  derived and/or modified CDS sequence (opt5) from neuraminidase__InfluenzaA__AFN18140
augaaccccaaucagaagaucauuaccaucggcagcgugugcaugacaauugggauggccaaccugauccuccaaauuggaaauaucaucuccauuuggaucucucacagcauucagcugggcaaccagaaucagaucgagacguguaaccaauccgucauuaccuacgaaaauaacacauggguuaaucagaccuaugugaacaucucuaauacaaacuucgcugccgggcagagcguggucuccgugaaacuugcgggaaauucuagccugugcccuguuuccggcugggcuauuuacagcaaggacaacucuaucagaaucggguccaaaggagauguguuugucauucgggagccguucaucagcuguucuccccucgaaugccgcaccuuuuuccugacacagggcgcccuucugaaugacaagcauuccaacggcaccauuaaagauagaagcccuuaucggacgcucaugucuugucccaucggggaggugccuucccccuacaacagccgcuuugaauccguugccuggucugcuagcgccugccacgacggaauuaauuggcugaccaucggcaucuccgggccugauaacggagcuguggccguccugaaguauaauggcauuaucacagacaccauuaagagcuggagaaacaauauccuccggacacaagagucugagugugcgugcgugaacggguccuguuucaccgugaugacggauggaccgagcgacggccaggccucuuacaaaauuuuucgcaucgaaaagggcaaaaucgucaagagcguugagaugaaugcucccaacuaucauuacgaagagugcuccuguuacccugauucuagcgagauuacaugcgugugcagagacaauuggcacggguccaaccggcccugggugagcuucaaucagaaccuggaauaucgcaucggauacauuuguucuggcaucuuuggggauaauccuagacccaacgacaaaaccggauccugcggcccggucagcucuaauggggccaacggagugaagggcuucuccuuuaaguauggcaacgggauuuggaucggacggacaaaaagcauuuccucucgcaauggcuucgagaugaucugggauccuaacggguggaccggaaccgacaauaacuuuagcaucaagcaggacauuguuggcaucaaugaaugguccggguacucuggcagcuucgugcaacaucccgagcuuacaggacuggauuguauuagaccuugcuucugggucgaacucauccggggccgccccaaagagaacacgauuuggaccuccgggagcucuaucuccuuuuguggagugaauagcgacacaguuggcuggucuuggcccgauggggcugagcugccuuucaccaucgacaaguga

SEQ ID NO: 214824 - RNA, 1410 nt, Artificial Sequence; identical to SEQ ID NO: 208810
  derived and/or modified CDS sequence (opt5) from neuraminidase__InfluenzaA__AFN18144

SEQ ID NO: 214825 - RNA, 1410 nt, Artificial Sequence; identical to SEQ ID NO: 208810
  derived and/or modified CDS sequence (opt5) from neuraminidase__InfluenzaA__AFN18150

SEQ ID NO: 214826 - RNA, 1410 nt, Artificial Sequence; identical to SEQ ID NO: 208810
  derived and/or modified CDS sequence (opt5) from neuraminidase__InfluenzaA__AFN18156

SEQ ID NO: 214827 - RNA, 1410 nt, Artificial Sequence; identical to SEQ ID NO: 208810
  derived and/or modified CDS sequence (opt5) from neuraminidase__InfluenzaA__AFN18158

SEQ ID NO: 214828 - RNA, 1410 nt, Artificial Sequence; identical to SEQ ID NO: 210624
  derived and/or modified CDS sequence (opt5) from neuraminidase__InfluenzaA__AFN18160

SEQ ID NO: 214829 - RNA, 1410 nt, Artificial Sequence
  derived and/or modified CDS sequence (opt5) from neuraminidase__InfluenzaA__AFN18166
augaaccccaaucagaagaucauuaccaucggcagcgugugcaugacaauugggauggccaaccugauccuccaaauuggaaauaucaucuccauuuggaucucucacagcauucagcugggcaaccagaaucagaucgagacguguaaccaauccgucauuaccuacgaaaauaaaacauggguuaaccagaccuaugugaauaucucuaacgcuaauuucgccgcggggcagagcguggucuccgugaaacuugcuggaaacucuagccugugcccuguuuccggcugggccauuuacagcaaggacaauucuaucagaaucggguccaagggagauguguuugucauucgggagccguucaucagcuguucuccccucgaaugccgcacauuuuuccugacccagggcgcccuucugaacgacaaacauuccaauggcacaauuaaggauagaagcccuuaucggacccucaugucuugucccaucggggaggugccuucccccuacaacagcaaguuugaauccguugcuuggucugccagcgcuugccacgacggaauuaacuggcugacgaucggcaucuccgggccugauaauggagccguggcgguccugaaauauaacggcauuaucaccgacacaauuaagagcuggcgcaauaacauccucagaacccaagagucugagugugccugcgugaauggguccuguuucacagugaugaccgauggaccgagcgacggccaggcuucuuacaaaauuuuucggaucgaaaagggcaaaaucgucaagagcguugagaugaacgcccccaauuaucauuacgaagagugcuccuguuacccugauucuagcgagauuacgugcgugugccgcgacaacuggcacggguccaauagacccugggugagcuucaaccagaaucuggaauaucagaucggauacauuuguucuggcaucuuuggggauaacccucggcccaaugacaagacaggauccugcggcccggucagcucuaacggggcuaauggagugaaaggcuucuccuuuaaguauggcaacgggguuuggauuggacgcaccaaaagcaucuccucuagaaacggcuucgagaugauuugggauccuaauggguggacaggaaccgacaacaauuuuagcaucaagcaagacaucgugggcauuaacgaaugguccggguacucuggcagcuucguccagcaucccgagcuuaccggacuggauuguauccggccuugcuucuggguggaacucauucgcggcagacccaaagagaauacaaucuggacguccgggagcucuauuuccuuuuguggaguuaacagcgacaccgugggcuggucuuggcccgauggggccgagcugccuuucacaaucgacaaguga

SEQ ID NO: 214830 - RNA, 1410 nt, Artificial Sequence; identical to SEQ ID NO: 208810
  derived and/or modified CDS sequence (opt5) from neuraminidase__InfluenzaA__AFN18172

SEQ ID NO: 214831 - RNA, 1410 nt, Artificial Sequence; identical to SEQ ID NO: 209828
  derived and/or modified CDS sequence (opt5) from neuraminidase__InfluenzaA__AFN18178

SEQ ID NO: 214832 - RNA, 1410 nt, Artificial Sequence
  derived and/or modified CDS sequence (opt5) from neuraminidase__InfluenzaA__AFN18184
augaaccccaaucagaagaucauuaccaucggcagcgugugcaugacaauugggauggccaaccugauccuccaaauuggaaauaucaucuccauuuggaucucucacagcauucagcugggcaaccagaaucagaucgagacguguaaccaauccgucauuaccuacgaaaauaacacauggguuaaucagaccuaugugaacaucucuaauacaaacuucgcugccgggcagagcaugguguccgucaaacuugcgggaaauucuagccugugcccuguguccggcugggcuauuuacagcaaggacaacucuaucagaaucggguccaaaggagauguuuuugugauucgggagccguucaucagcuguucuccccucgaaugccgcaccuuuuuccugacacagggcgcccuucugaaugacaagcauuccaacggcaccauuaaagauagaagcccuuaucggacgcucaugucuugucccaucggggaggucccuucccccuacaacagccgcuuugaauccguggccuggucugcuagcgccugccacgacggaauuaauuggcugaccaucggcaucuccgggccugauaacggagcuguugccgugcugaaguauaauggcauuaucacagacaccauuaagagcuggagaaacaauauccuccggacacaagagucugagugugcgugcgucaacggguccuguuucaccgugaugacggauggaccgagcgacggccaggccucuuacaaaauuuuucgcaucgaaaagggcaaaaucgucaagagcguggagaugaaugcucccaacuaucauuacgaagagugcuccuguuacccugauucuagcgagauuacaugcguuugcagagacaauuggcacggguccaaccggcccugggugagcuucaaucagaaccuggaauaucagaucggauacauuuguucuggcaucuuuggggauaauccucgccccaacgacaaaaccggauccugcggcccggugagcucuaauggggccaacggagucaagggcuucuccuuuaaguauggcaacgggguguggauuggaagaacaaaaagcaucuccucucggaauggcuucgagaugauuugggauccuaacggguggaccggaaccgacaauaacuuuagcaucaagcaagacaucguuggcauuaaugaaugguccggguacucuggcagcuucgugcagcaucccgagcuuacaggacuggauuguauccgcccuugcuucugggucgaacucauuagaggccggcccaaagagaacacgaucuggaccuccgggagcucuauuuccuuuuguggagugaauagcgacacaguuggcuggucuuggcccgauggggcugagcugccuuucaccaucgacaaguga

SEQ ID NO: 214833 - RNA, 1410 nt, Artificial Sequence; identical to SEQ ID NO: 211802
  derived and/or modified CDS sequence (opt5) from neuraminidase__InfluenzaA__AFN18190

SEQ ID NO: 214834 - RNA, 1410 nt, Artificial Sequence; identical to SEQ ID NO: 212823
  derived and/or modified CDS sequence (opt5) from neuraminidase__InfluenzaA__AFN18196

SEQ ID NO: 214835 - RNA, 1410 nt, Artificial Sequence
  derived and/or modified CDS sequence (opt5) from neuraminidase__InfluenzaA__AFN18202
augaaccccaaucagaagaucauuaccaucggcagcgugugcaugacaauugggauggccaaccugauccuccaaauuggaaauaucaucuccauuuggaucucucacagcauucagcugggcaaccagaaucagaucgagacguguaaccaauccgucauuaccuacgaaaauaacacauggguuaaucagaccuaugugaacaucucuaauacaaacuucgcugccgggagaagcguggucuccgugaaacuugcgggaaauucuagccugugcccuguuuccggcugggcuauuuacagcaaggacaacucuauccggaucggguccaaaggagauguguuugucauucgcgagccguucaucagcuguucuccccucgaaugcagaaccuuuuuccugacacagggcgcccuucugaaugacaagcauuccaacggcaccauuaaagaucggagcccuuaucgcacgcucaugucuugucccaucggggaggugccuucccccuacaacagcagauuugaauccguugccuggucugcuagcgccugccacgacggaauuaauuggcugaccaucggcaucuccgggccugauaacggagcuguggccguccugaaguauaauggcauuaucacagacaccauuaagagcuggcggaacaauauccuccgcacacaggagucugagugugcgugcgugaacggguccuguuucaccgugaugacggauggaccgagcgacggccaagccucuuacaaaauuuuuagaaucgaaaagggcaaaaucgucaagagcguugagaugaaugcucccaacuaucauuacgaagagugcuccuguuacccugauucuagcgagauuacaugcgugugccgggacaauuggcacggguccaaccgccccugggugagcuucaaucagaaccuggaauaucagaucggauacauuuguucuggcaucuuuggggauaauccuagacccaacgacaaaaccggauccugcggcccggucagcucuaauggggccaacggagugaagggcuucuccuuuaaguauggcaacgggguuuggauuggacggacaaaaagcaucuccucucgcaauggcuucgagaugauuugggauccuaacggguggaccggaaccgacaauaacuuuagcaucaagcaggacaucgugggcauuaaugaaugguccggguacucuggcagcuucguccaacaucccgagcuuacaggacuggauuguaucagaccuugcuucuggguggaacucauucggggccgccccaaagagaacacgaucuggaccuccgggagcucuauuuccuuuuguggaguuaauagcgacacagugggcuggucuuggcccgauggggcugagcugccuuucaccaucgacaaguga

SEQ ID NO: 214836 - RNA, 1410 nt, Artificial Sequence; identical to SEQ ID NO: 208810
  derived and/or modified CDS sequence (opt5) from neuraminidase__InfluenzaA__AFN18208

SEQ ID NO: 214837 - RNA, 1410 nt, Artificial Sequence
  derived and/or modified CDS sequence (opt5) from neuraminidase__InfluenzaA__AFN18210
augaaccccaaucagaagaucauuaccaucggcagcgugugcaugacaauugggauggccaaccugauccuccaaauuggaaauaucaucuccauuuggaucucucacagcauucagcugggcaaccagaaucagaucgagacguguaaccaauccgucauuaccuacgaaaauaacacauggguuaaucagaccuaugugaacaucucuaauacaaacuucgcugccgggcagagcguggucuccgugaaacuugcgggaaauucuagccugugcccuguuuccggcugggcuauuuacagcaaggacaacucuaucagaaucggguccaaaggagauguguuugucauucgggagccguucaucagcuguucuccccucgaaugccgcgccuuuuuccugacccagggcgcccuucugaaugacaagcauuccaacggcacaauuaaagauagaagcccuuaucggacccucaugucuugucccaucggggaggugccuucccccuacaacagccgcuuugaauccguugcuuggucugccagcgcuugccacgacggaauuaauuggcugacgaucggcaucuccgggccugauaacggagccguggcgguccugaaguauaauggcauuaucaccgacacaauuaagagcuggagaaacaauauccuccggacccaagagucugagugugccugcgugaacggguccuguuucacagugaugaccgauggaccgagcgacggccaggcuucuuacaaaauuuuucgcaucgaaaagggcaaaaucgucaagagcguugagaugaaugcccccaacuaucauuacgaagagugcuccuguuacccugauucuagcgagauuacgugcgugugcagagacaauuggcacggguccaaccggcccugggugagcuucaaucagaaccuggaauaucgcaucggauacauuuguucuggcaucuuuggggauaauccuagacccaacgacaaaacaggauccugcggcccggucagcucuaauggggcuaacggagugaagggcuucuccuuuaaguauggcaacgggguuuggauuggacggaccaaaagcaucuccucucgcaauggcuucgagaugauuugggauccuaacggguggacaggaaccgacaauaacuuuagcaucaagcaggacaucgugggcauuaaugaaugguccggguacucuggcagcuucguccaacaucccgagcuuaccggacuggauuguaucagaccuugcuucuggguggaacucauucggggccgccugaaagagaacacaaucuggacguccgggagcucuauuuccuuuuguggaguuaauagcgacaccgugggcuggucuuggcccgauggggccgagcuucccuucacaaucgacaaguga

SEQ ID NO: 214838 - RNA, 1410 nt, Artificial Sequence; identical to SEQ ID NO: 209393
  derived and/or modified CDS sequence (opt5) from neuraminidase__InfluenzaA__AFN18216

SEQ ID NO: 214839 - RNA, 1410 nt, Artificial Sequence; identical to SEQ ID NO: 211139
  derived and/or modified CDS sequence (opt5) from neuraminidase__InfluenzaA__AFN18226

SEQ ID NO: 214840 - RNA, 1410 nt, Artificial Sequence; identical to SEQ ID NO: 208810
  derived and/or modified CDS sequence (opt5) from neuraminidase__InfluenzaA__AFN18232

SEQ ID NO: 214841 - RNA, 1410 nt, Artificial Sequence; identical to SEQ ID NO: 208810
  derived and/or modified CDS sequence (opt5) from neuraminidase__InfluenzaA__AFN18234

SEQ ID NO: 214842 - RNA, 1410 nt, Artificial Sequence; identical to SEQ ID NO: 208810
  derived and/or modified CDS sequence (opt5) from neuraminidase__InfluenzaA__AFN18244

SEQ ID NO: 214843 - RNA, 1410 nt, Artificial Sequence; identical to SEQ ID NO: 208810
  derived and/or modified CDS sequence (opt5) from neuraminidase__InfluenzaA__AFN18246

SEQ ID NO: 214844 - RNA, 1410 nt, Artificial Sequence; identical to SEQ ID NO: 211139
  derived and/or modified CDS sequence (opt5) from neuraminidase__InfluenzaA__AFN18256

SEQ ID NO: 214845 - RNA, 1410 nt, Artificial Sequence; identical to SEQ ID NO: 208810
  derived and/or modified CDS sequence (opt5) from neuraminidase__InfluenzaA__AFN18262

SEQ ID NO: 214846 - RNA, 1410 nt, Artificial Sequence; identical to SEQ ID NO: 208810
  derived and/or modified CDS sequence (opt5) from neuraminidase__InfluenzaA__AFN18268

SEQ ID NO: 214847 - RNA, 1410 nt, Artificial Sequence; identical to SEQ ID NO: 208810
  derived and/or modified CDS sequence (opt5) from neuraminidase__InfluenzaA__AFN18270

SEQ ID NO: 214848 - RNA, 1410 nt, Artificial Sequence; identical to SEQ ID NO: 211799
  derived and/or modified CDS sequence (opt5) from neuraminidase__InfluenzaA__AFN18272

SEQ ID NO: 214849 - RNA, 1410 nt, Artificial Sequence; identical to SEQ ID NO: 208810
  derived and/or modified CDS sequence (opt5) from neuraminidase__InfluenzaA__AFN18274

SEQ ID NO: 214850 - RNA, 1410 nt, Artificial Sequence; identical to SEQ ID NO: 208810
  derived and/or modified CDS sequence (opt5) from neuraminidase__InfluenzaA__AFN18282

SEQ ID NO: 214851 - RNA, 1410 nt, Artificial Sequence; identical to SEQ ID NO: 208810
  derived and/or modified CDS sequence (opt5) from neuraminidase__InfluenzaA__AFN18304

SEQ ID NO: 214852 - RNA, 1410 nt, Artificial Sequence
  derived and/or modified CDS sequence (opt5) from neuraminidase__InfluenzaA__AFN18306
augaaccccaaucagaagaucauuaccaucggcagcgugugcaugacaauugggaucgccaaccugauucuccaaaucggaaauaucauuuccaucuggauuucucacagcauccagcugggcaaccagaaucagauugagacguguaaccaauccgucaucaccuacgaaaauaacacauggguuaaucagaccuaugugaacauuucuaauacaaacuucgcugccgggcagagcguggucuccgugaaacuugcgggaaauucuagccugugcccuguuuccggcugggcuaucuacagcaaggacaacucuaucagaauuggguccaaaggagauguguuugucauccgggagccguucauuagcuguucuccccucgaaugccgcaccuuuuuccugacacagggcgcccuucugaaugacaagcauuccaacggcaccaucaaagauagaagcccuuaucggacgcucaugucuugucccauuggggaggugccuucccccuacaacagccgcuuugaauccguugccuggucugcuagcgccugccacgacggaaucaauuggcugaccaucggcauuuccgggccugauaacggagcuguggccguccugaaguauaauggcaucauuacagacaccaucaagagcuggagaaacaauauucuccggacacaagagucugagugugcgugcgugaacggguccuguuucaccgugaugacggauggaccgagcgacggccaggccucuuacaaaaucuuucgcaucgaaaagggcaaaauugucaagagcguugagaugaaugcucccaacuaucauuacgaagagugcuccuguuacccugauucuagcgagaucacaugcgugugcagagacaauuggcacggguccaaccggcccugggugagcuucaaucagaaccuggaauaucagauuggauacaucuguucuggcauuuuuggggauaauccucgccccaacgacaaaaccggauccugcggcccggucagcucuaauggggccaacggagugaagggcuucuccuuuaaguauggcaacgggguuuggaucggaagaacaaaaagcauuuccucucggaauggcuucgagaugaucugggauccuaacggguggaccggaaccgacaauaacuuuagcaucaagcaagacauugugggcaucaaugaaugguccggguacucuggcagcuucguccagcaucccgagcuuacaggacuggauuguauucgcccuugcuucuggguggaacucaucagaggccggcccaaagagaacacgauuuggaccuccgggagcucuaucuccuuuuguggaguuaauagcgacacagugggcuggucuuggcccgauggggcugagcugccuuucaccaucgacaaguga

SEQ ID NO: 214853 - RNA, 1410 nt, Artificial Sequence
  derived and/or modified CDS sequence (opt5) from neuraminidase__InfluenzaA__AFN18308
augaaccccaaucagaagaucauuaccaucggcagcgugugcaugacaauugggauggccaaccugauccuccaaauuggaaauaucaucuccauuuggaucucucacagcauucagcugggcaaccagaaucagaucgagacguguaaccaauccgucauuaccuacgaaaauaacacauggguuaaucagaccuaugugaacaucucuaauacaaacuucgcugccgggcagagcguggucuccgugaaacuugcgggaaauucuagccugugcccuguuuccggcugggcuauuuacagcaaggacaacucuaucagaaucggguccaaaggagauguguuugucauucgggagccguucaucagcuguucuccccucgaaugccgcaccuuuuuccugacacagggcgcccuucugaaugacaagcauuccaacggcaccauuaaagauagaagcccuuaucggacgcucaugucuugucccaucggggaggugccuucccccuacaacagccgcuuugaauccguugccuggucugcuagcgccugccacgacggaauuaauuggcugaccaucggcaucuccgggccugauaacggagcuguggccguccugaaguauaauggcauuaucacagacaccauuaagagcuggagaaacaauauccuccggacacaagagucugagugugcgugcgugaacggguccuguuucaccgugaugacggauggaccgagcgacggccaggccucuuacaaaauuuuucgcaucgaaaagggcaaaaucgucaagagcguugagaugaaugcucccaacuaucauuacgaagagugcuccuguuacccugauucuagcgagauuacaugcgugugcagagacaauuggcacggguccaaccggcccugggugagcuucaaucagaaccuggaauaucagaucggauacauuuguucuggcaucuuuggggauaauccucgccccaacgacaaaaccggauccugcggcccggucagcucuaagggggccaauggagugaagggcuucuccuuuaaauauggcaacgggguuuggauuggaagaacaaagagcaucuccucucggaacggcuucgagaugauuugggauccuaauggguggaccggaaccgacaacaauuuuagcaucaaacaagacaucgugggcauuaacgaaugguccggguacucuggcagcuucguccagcaucccgagcuuacaggacuggauuguauccgcccuugcuucuggguggaacucauuagaggccggcccaaggagaauacgaucuggaccuccgggagcucuauuuccuuuuguggaguuaacagcgacacagugggcuggucuuggcccgauggggcugagcugccuuucaccaucgacaaauga

SEQ ID NO: 214854 - RNA, 1410 nt, Artificial Sequence
  derived and/or modified CDS sequence (opt5) from neuraminidase__InfluenzaA__AFN18314
augaaccccaaucagaagaucauuaccaucggcagcgugugcaugacaauugggauggccaaccugauccuccaaauuggaaauaucaucuccauuuggaucucucacagcauucagcugggcaaccagaaucagaucgagacguguaaccaauccgucauuaccuacgaaaauaacacauggguuaaucagaccuaugugaacaucucuaauacaaacuucgcugccgggcagagcguggucuccgugaaacuugcgggaaauucuagccugugcccuguuuccggcugggcuauuuacagcaaggacaacucuaucagaaucggguccaaaggagauguguuugucauucgggagccguucaucagcuguucuccccucgaaugccgcaccuuuuuccugacacagggcgcccuucugaaugacaagcauuccaacggcaccauuaaagauagaagcccuuaucggacgcucaugucuugucccaucggggaggugccuucccccuacaacagccgcuuugaauccguugccuggucugcuagcgccugccacgacggaauuaauuggcugaccaucggcaucuccgggccugauaacggagcuguggccguccugaaguauaauggcauuaucacagacaccauuaagagcuggagaaacaauauccuccggacacaagagucugagugugcgugcgugaacggguccuguuucaccgugaugacggauggaccgagcgacggccaggccucuuacaaaauuuuucgcaucgaaaagggcaaaaucgucaagagcguugagaugaaugcucccaacuaucauuacgaagagugcuccuguuacccugauucuagcgagauuacaugcgugugcagagacaauuggcacggguccaaccggcccugggugagcuucaaucagaaccuggaauaucagaucggauacauuuguucuggcaucuuuggggauaauccucgccccaacgacaaaaccggauccugcggcccggucagcucuaauggggccaacggagugaagggcuucuccuuuaaguauggcaacgggguuuggauuggaagaacaaaaagcaucuccucucggaauggcuucgagaugauuugggauccuaacggguggaccggaaccgacaauaacuuuagcaucaagcaagacaucgugggcauuaaugaaugguccggguacucuggcagcuucguccagcaucccgagcuuacaggacuggauuguauccgcccuugcuucuggguggaacucauuagaggccggcccaaagagaagacgaucuggaccuccgggagcucuauuuccuuuuguggaguuaacagcgacacagugggcuggucuuggcccgauggggcugagcugccuuucaccaucgacaaauga

SEQ ID NO: 214855 - RNA, 1410 nt, Artificial Sequence; identical to SEQ ID NO: 208810
  derived and/or modified CDS sequence (opt5) from neuraminidase__InfluenzaA__AFN18320

SEQ ID NO: 214856 - RNA, 1410 nt, Artificial Sequence
  derived and/or modified CDS sequence (opt5) from neuraminidase__InfluenzaA__AFN18326
augaaccccaaucagaagaucauuaccaucggcagcgugugcaugacaauugggauggccaaccugcuccugcaaaucggaaauauuaucuccaucuggauuucucacagcauccagcuuggcaaccagaaucagauugagacguguaaccaauccgucaucaccuacgaaaauaacacauggguuaaucagaccuaugugaacauuucuaauacaaacuucgcugccgggcagagcguggucuccgugaaacuggcgggaaauucuagccucugcccuguuuccggcugggcuaucuacagcaaggacaacucuauuagaaucggguccaaaggagauguguuugucauccgggagccguucauuagcuguucuccccuggaaugccgcaccuuuuuccuuacacagggcgcccugcucaaugacaagcauuccaacggcaccaucaaagauagaagcccuuaucggacgcugaugucuugucccauuggggaggugccuucccccuacaacagccgcuuugaauccguugccuggucugcuagcgccugccacgacggaaucaauuggcugaccauuggcaucuccgggccugauaacggagcuguggccguccucaaguauaauggcaucauuacagacaccaucaagagcuggagaaacaauauucugcggacacaagagucugagugugcgugcgugaacggguccuguuucaccgugaugacggauggaccgagcgacggccaggccucuuacaaaaucuuucgcauugaaaagggcaaaaucgucaagagcguugagaugaaugcucccaacuaucauuacgaagagugcuccuguuacccugauucuagcgagaucacaugcgugugcagagacaauuggcacggguccaaccggcccugggugagcuucaaucagaaccuugaauaucagauuggauacaucuguucuggcauuuuuggggauaauccucgccccaacgacaaaaccggauccugcggcccggucagcucuaauggggccaacggagugaagggcuucuccuuuaaguauggcaacgggguuuggaucggaagaacaaaaagcauuuccucucggaauggcuucgagaugaucugggauccuaacggguggaccggaaccgacaauaacuuuagcauuaagcaagacaucgugggcaucaaugaaugguccggguacucuggcagcuucguccagcaucccgagcugacaggacucgauuguauucgcccuugcuucuggguggaacugaucagaggccggcccaaagagaacacgauuuggaccuccgggagcucuaucuccuuuuguggaguuaauagcgacacagugggcuggucuuggcccgauggggcugagcuuccuuucaccauugacaaguga

SEQ ID NO: 214857 - RNA, 1410 nt, Artificial Sequence; identical to SEQ ID NO: 208810
  derived and/or modified CDS sequence (opt5) from neuraminidase__InfluenzaA__AFN18336

SEQ ID NO: 214858 - RNA, 1410 nt, Artificial Sequence; identical to SEQ ID NO: 208810
  derived and/or modified CDS sequence (opt5) from neuraminidase__InfluenzaA__AFN18346

SEQ ID NO: 214859 - RNA, 1410 nt, Artificial Sequence; identical to SEQ ID NO: 214443
  derived and/or modified CDS sequence (opt5) from neuraminidase__InfluenzaA__AFN18356

SEQ ID NO: 214860 - RNA, 1410 nt, Artificial Sequence
  derived and/or modified CDS sequence (opt5) from neuraminidase__InfluenzaA__AFN18366
augaaccccaaucagaagaucauuaccaucggcagcgugugcaugacaauugggauggccaaccugauccuccaaauuggaaauaucaucuccauuuggaucucucacagcauucagcugggcaaccagaaucagaucgagacguguaaccaauccgucauuaccuacgaaaauaacacauggguuaaucagaccuaugugaacaucucuaauacaaacuucgcugccgagcagagcguggucuccgugaaacuugcgggaaauucuagccugugcccuguuuccgggugggcuauuuacagcaaggacaacucuaucagaaucggcuccaaaggggauguguuugucauucgggaaccguucaucagcuguucuccccucgagugccgcaccuuuuuccugacacagggagcccuucugaaugacaagcauuccaacggcaccauuaaagauagaagcccuuaucggacgcucaugucuugucccaucggcgaagugccuucccccuacaacagccgcuuugaguccguugccuggucugcuagcgccugccacgacgggauuaauuggcugaccaucggaaucuccggcccugauaacggggcuguggccguccugaaguauaauggaauuaucacagacaccauuaagagcuggagaaacaauauccuccggacacaagagucugaaugugcgugcgugaacggcuccuguuucaccgugaugacggaugggccgagcgacggacaggccucuuacaaaauuuuucgcaucgagaagggcaaaaucgucaagagcguugaaaugaaugcucccaacuaucauuacgaggagugcuccuguuacccugauucuagcgaagugacaugcgugugcagagacaauuggcacggcuccaaccggcccugggucagcuucaaucagaaccuggaguaucagauuggguacaucuguucuggaauuuuuggcgauaauccucgccccaacgacaaaaccggguccugcggaccggugagcucuaauggcgccaacgggguuaagggauucuccuuuaaguauggcaacggcguguggaucgggagaacaaaaagcauuuccucucggaauggauucgaaaugaucugggauccuaacggcuggaccgggaccgacaauaacuuuagcauuaagcaagacaucgucggaaucaaugagugguccggcuacucugggagcuucgugcagcaucccgaacuuacaggccuggauuguauucgcccuugcuucuggguugagcucaucagaggacggcccaaagagaacacgauuuggaccuccggcagcucuaucuccuuuuguggggugaauagcgacacagucggauggucuuggcccgauggcgcugaacugccuuucaccauugacaaguga

SEQ ID NO: 214861 - RNA, 1410 nt, Artificial Sequence; identical to SEQ ID NO: 214443
  derived and/or modified CDS sequence (opt5) from neuraminidase__InfluenzaA__AFN18376

SEQ ID NO: 214862 - RNA, 1410 nt, Artificial Sequence; identical to SEQ ID NO: 208810
  derived and/or modified CDS sequence (opt5) from neuraminidase__InfluenzaA__AFN18382

SEQ ID NO: 214863 - RNA, 1410 nt, Artificial Sequence; identical to SEQ ID NO: 208810
  derived and/or modified CDS sequence (opt5) from neuraminidase__InfluenzaA__AFN18392

SEQ ID NO: 214864 - RNA, 1410 nt, Artificial Sequence; identical to SEQ ID NO: 208810
  derived and/or modified CDS sequence (opt5) from neuraminidase__InfluenzaA__AFN18402

SEQ ID NO: 214865 - RNA, 1410 nt, Artificial Sequence; identical to SEQ ID NO: 208810
  derived and/or modified CDS sequence (opt5) from neuraminidase__InfluenzaA__AFN18412

SEQ ID NO: 214866 - RNA, 1410 nt, Artificial Sequence; identical to SEQ ID NO: 208810
  derived and/or modified CDS sequence (opt5) from neuraminidase__InfluenzaA__AFN18422

SEQ ID NO: 214867 - RNA, 1410 nt, Artificial Sequence; identical to SEQ ID NO: 208810
  derived and/or modified CDS sequence (opt5) from neuraminidase__InfluenzaA__AFN18432

SEQ ID NO: 214868 - RNA, 1410 nt, Artificial Sequence; identical to SEQ ID NO: 208810
  derived and/or modified CDS sequence (opt5) from neuraminidase__InfluenzaA__AFN18442

SEQ ID NO: 214869 - RNA, 1410 nt, Artificial Sequence; identical to SEQ ID NO: 208810
  derived and/or modified CDS sequence (opt5) from neuraminidase__InfluenzaA__AFN18452

SEQ ID NO: 214870 - RNA, 1410 nt, Artificial Sequence; identical to SEQ ID NO: 208810
  derived and/or modified CDS sequence (opt5) from neuraminidase__InfluenzaA__AFN18462

SEQ ID NO: 214871 - RNA, 1410 nt, Artificial Sequence
  derived and/or modified CDS sequence (opt5) from neuraminidase__InfluenzaA__AFN18472
augaaccccaaucagaagaucauuaccaucggcagcgugugcaugacaauugggauggccaaccugauccuccaaauuggaaauaucaucuccauuuggaucucucacagcauucagcugggcaaccagaaucagaucgagacguguaaccaauccgucauuaccuacgaaaauaacacauggguuaaucagaccuaugugaacaucucuaauacaaacuucgcugccgggcagagcguggucuccgugaaacuugcgggaaauucuagccugugcccuguuuccggcugggcuauuuacagcaaggacaacucuaucagaaucggguccaaaggagauguguuugucauucgggagccguucaucagcuguucuccccucgaaugccgcaccuuuuuccugacacagggcgcccuucugaaugacaagcauuccaacggcaccauuaaagauagaagcccuuaucggacgcucaugucuugucccaucggggaggugccuucccccuacaacagccgcuuugaauccguugccuggucugcuagcgccugccacgacggaauuaauuggcugaccaucggcaucuccgggccugauaacggagcuguggccguccugaaguauaauggcauuaucacagacaccauuaagagcuggagaaacaauauccuccggacacaagagucugagugugcgugcgugaacggguccuguuucaccgugaugacggauggaccgagcgacggccaggccucuuacaaaauuuuucgcaucgaaaagggcaaaaucgucaagagcguugagaugaaugcucccaacuaucauuacgaagagugcuccuguuacccugauucuagcgagauuacaugcgugugcagagacaauuggcacggguccaaccggcccugggugagcuucaaucagaaccuggaauaucagaucggauacauuuguucuggcaucuuuggggauaauccucgccccaacgacaaaaccggauccugcggcccggucagcucuaauggggccaagggagugaagggcuucuccuuuaaauauggcaacgggguuuggauuggaagaacaaagagcaucuccucucggaacggcuucgagaugauuugggauccuaauggguggaccggaaccgacaacaauuuuagcaucaaacaagacaucgugggcauuaacgaaugguccggguacucuggcagcuucguccagcaucccgagcuuacaggacuggauuguauccgcccuugcuucuggguggaacucauuagaggccggcccaaggagaauacgaucuggaccuccgggagcucuauuuccuuuuguggaguuaacagcgacacagugggcuggucuuggcccgauggggcugagcugccuuucaccaucgacaaauga

SEQ ID NO: 214872 - RNA, 1410 nt, Artificial Sequence; identical to SEQ ID NO: 208810
  derived and/or modified CDS sequence (opt5) from neuraminidase__InfluenzaA__AFN18482

SEQ ID NO: 214873 - RNA, 1410 nt, Artificial Sequence; identical to SEQ ID NO: 208810
  derived and/or modified CDS sequence (opt5) from neuraminidase__InfluenzaA__AFN18492

SEQ ID NO: 214874 - RNA, 1410 nt, Artificial Sequence
  derived and/or modified CDS sequence (opt5) from neuraminidase__InfluenzaA__AFN18514
augaaccccaaucagaagaucauuaccaucggcagcgugugcaugacaauugggauggccaaccugauccuccaaauuggaaauaucaucuccauuuggaucucucacagcauucagcugggcaaccagaaucagaucgagacguguaaccaauccgucauuaccuacgaaaauaacacauggguuaaucagaccuaugugaacaucucuaauacaaacuucgcugccgggcagagcguggucuccgugaaacuuguuggaaauucuagccugugcccuguguccggcugggcgauuuacagcaaggacaacucuaucagaaucggguccaaaggagaugucuuugugauucgggagccguucaucagcuguucuccccucgaaugccgcaccuuuuuccugacacagggcgcccuucugaaugacaagcauuccaacggcaccauuaaagauagaagcccuuaucggacgcucaugucuugucccaucggggagguuccuucccccuacaacagccgcuuugaauccguggcuuggucugccagcgcuugccacgacggaauuaauuggcugaccaucggcaucuccgggccugauaacggagccgucgcugugcugaaguauaauggcauuaucacagacaccauuaagagcuggagaaacaauauccuccggacacaagagucugagugugccugcgugaacggguccuguuucaccgucaugacggauggaccgagcgacggccaggcgucuuacaaaauuuuucgcaucgaaaagggcaaaaucguuaagagcguggagaugaaugcccccaacuaucauuacgaagagugcuccuguuacccugauucuagcgagauuacaugcgugugcagagacaauuggcacggguccaaccggcccugggucagcuucaaucagaaccuggaauaucagaucggauacauuuguucuggcaucuuuggggauaauccucgccccaacgacaaaaccggauccugcggcccggugagcucuaauggggcuaacggaguuaagggcuucuccuuuaaguauggcaacgggguguggauuggaagaacaaaaagcaucuccucucggaauggcuucgagaugauuugggauccuaacggguggaccggaaccgacaauaacuuuagcaucaagcaagacaucgucggcauuaaugaaugguccggguacucuggcagcuucgugcagcaucccgagcuuacaggacuggauuguauccgcccuugcuucuggguugaacucauuagaggccggcccaaagagaacacgaucuggaccuccgggagcucuauuuccuuuuguggagugaauagcgacacagucggcuggucuuggcccgauggggccgagcugccuuucaccaucgacaaguga

SEQ ID NO: 214875 - RNA, 1410 nt, Artificial Sequence
  derived and/or modified CDS sequence (opt5) from neuraminidase__InfluenzaA__AFN18520
augaaccccaaucagaagaucauuaccaucggcagcgugugcaugacaauugggauggccaaccugauccuccaaauuggaaauaucaucuccauuuggaucucucacagcauucagcugggcaaccagaaucagaucgagacguguaaccaauccgucauuaccuacgaaaauaacacauggguuaaucagaccuaugugaacaucucuaauacaaacuucgcugccgggcagagcguggucuccgugaaacuugcgggaaauucuagccugugcccuguuuccggcugggcuauuuacagcaaggacaacucuaucagaaucggguccaaaggagauguguuugucauucgggagccguucaucagcuguucuccccucgaaugccgcaccuuuuuccugacacagggcgcccuucugaaugacaagcauuccaacggcaccauuaaagauagaagcccuuaucggacgcucaugucuugucccaucggggaggugccuucccccuacaacagccgcuuugaauccguugccuggucugcuagcgccugccacgacggaauuaauuggcugaccaucggcaucuccgggccugauaacggagcuguggccguccugaaguauaauggcgugauuacagacaccaucaagagcuggagaaacaauauucuccggacacaagagucugagugugcgugcgugaacggguccuguuucacccugaugacggauggaccgagcgacggccaggccucuuacaaaaucuuucgcauugaaaagggcaaaaucgucaagagcguugagaugaaugcucccaacuaucauuacgaagagugcuccuguuacccugauucuagcgagaucacaugcgugugcagagacaauuggcacggguccaaccggcccugggugagcuucaaucagaaccuugaauaucagauuggauacaucuguucuggcauuuuuggggauaauccucgccccaacgacaaaaccggauccugcggcccggucagcucuaauggggccaacggagugaagggcuucuccuuuaaguauggcaacgggguuuggaucggaagaacaaaaagcauuuccucucggaauggcuucgagaugaucugggauccuaacggguggaccggaaccgacaauaacuuuagcauuaagcaagacaucgugggcaucaaugaaugguccggguacucuggcagcuucguccagcaucccgagcugacaggacucgauuguauucgcccuugcuucuggguggaacugaucagaggccggcccaaagagaacacgauuuggaccuccgggagcucuaucuccuuuuguggaguuaauagcgacacagugggcuggucuuggcccgauggggcugagcuuccuuucaccauugacaaguga

SEQ ID NO: 214876 - RNA, 1410 nt, Artificial Sequence; identical to SEQ ID NO: 208810
  derived and/or modified CDS sequence (opt5) from neuraminidase__InfluenzaA__AFN18522

SEQ ID NO: 214877 - RNA, 1410 nt, Artificial Sequence; identical to SEQ ID NO: 208810
  derived and/or modified CDS sequence (opt5) from neuraminidase__InfluenzaA__AFN18524

SEQ ID NO: 214878 - RNA, 1410 nt, Artificial Sequence; identical to SEQ ID NO: 214443
  derived and/or modified CDS sequence (opt5) from neuraminidase__InfluenzaA__AFN18530

SEQ ID NO: 214879 - RNA, 1410 nt, Artificial Sequence; identical to SEQ ID NO: 208810
  derived and/or modified CDS sequence (opt5) from neuraminidase__InfluenzaA__AFN18532

SEQ ID NO: 214880 - RNA, 1410 nt, Artificial Sequence; identical to SEQ ID NO: 208810
  derived and/or modified CDS sequence (opt5) from neuraminidase__InfluenzaA__AFN18538

SEQ ID NO: 214881 - RNA, 1410 nt, Artificial Sequence; identical to SEQ ID NO: 208810
  derived and/or modified CDS sequence (opt5) from neuraminidase__InfluenzaA__AFN18544

SEQ ID NO: 214882 - RNA, 1410 nt, Artificial Sequence; identical to SEQ ID NO: 208810
  derived and/or modified CDS sequence (opt5) from neuraminidase__InfluenzaA__AFN18546

SEQ ID NO: 214883 - RNA, 1410 nt, Artificial Sequence; identical to SEQ ID NO: 208810
  derived and/or modified CDS sequence (opt5) from neuraminidase__InfluenzaA__AFN18552

SEQ ID NO: 214884 - RNA, 1410 nt, Artificial Sequence; identical to SEQ ID NO: 208810
  derived and/or modified CDS sequence (opt5) from neuraminidase__InfluenzaA__AFN18558

SEQ ID NO: 214885 - RNA, 1410 nt, Artificial Sequence; identical to SEQ ID NO: 208810
  derived and/or modified CDS sequence (opt5) from neuraminidase__InfluenzaA__AFN18560

SEQ ID NO: 214886 - RNA, 1410 nt, Artificial Sequence; identical to SEQ ID NO: 208810
  derived and/or modified CDS sequence (opt5) from neuraminidase__InfluenzaA__AFN18562

SEQ ID NO: 214887 - RNA, 1410 nt, Artificial Sequence; identical to SEQ ID NO: 208810
  derived and/or modified CDS sequence (opt5) from neuraminidase__InfluenzaA__AFN18564

SEQ ID NO: 214888 - RNA, 1410 nt, Artificial Sequence; identical to SEQ ID NO: 208810
  derived and/or modified CDS sequence (opt5) from neuraminidase__InfluenzaA__AFN18566

SEQ ID NO: 214889 - RNA, 1410 nt, Artificial Sequence; identical to SEQ ID NO: 208810
  derived and/or modified CDS sequence (opt5) from neuraminidase__InfluenzaA__AFN18572

SEQ ID NO: 214890 - RNA, 1410 nt, Artificial Sequence; identical to SEQ ID NO: 208810
  derived and/or modified CDS sequence (opt5) from neuraminidase__InfluenzaA__AFN18582

SEQ ID NO: 214891 - RNA, 1410 nt, Artificial Sequence; identical to SEQ ID NO: 208810
  derived and/or modified CDS sequence (opt5) from neuraminidase__InfluenzaA__AFN18592

SEQ ID NO: 214892 - RNA, 1410 nt, Artificial Sequence; identical to SEQ ID NO: 214443
  derived and/or modified CDS sequence (opt5) from neuraminidase__InfluenzaA__AFN18602

SEQ ID NO: 214893 - RNA, 1410 nt, Artificial Sequence
  derived and/or modified CDS sequence (opt5) from neuraminidase__InfluenzaA__AFN18612
augaaccccaaucagaagaucauuaccaucggcagcgugugcaugacaauugggauggccaaccugauccuccaaauuggaaauaucaucuccauuuggaucucucacagcauucagcugggcaaccagaaucagaucgagacguguaaccaauccgucauuaccuacgaaaauaacacauggguuaaucagaccuaugugaacaucucuaauacaaacuucgcugccgggcagagcguggucuccgugaaacuugcgggaaauucuagccugugcccuguuuccggcugggcuauuuacagcaaggacaacucuaucagaaucggguccaaaggagauguguuugucauucgggagccguucaucagcuguucuccccucgaaugccgcaccuuuuuccugacacagggcgcccuucugaaugacaagcauuccaacggcaccauuaaagauagaagcccuuaucggacgcucaugucuugucccaucggggaggugccuucccccuacaacagccgcuuugaauccguugccuggucugcuagcgccugccacgacggaauuaauuggcugaccaucggcaucuccgggccugauaacggagcuguggccguccugaaguauaauggcauuaucacagacaccauuaagagcuggagaaacaauauccuccggacacaagagucugagugugcgugcgugaacggguccuguuucaccgugaugacggauggaccgagcgacggccaggccucuuacaaaauuuuucgcaucgaaaagggcaaaaucauuaagagcgucgagaugaaugcucccaacuaucauuacgaagagugcuccuguuacccugauucuagcgagaucacaugcguuugcagagacaauuggcacggguccaaccggcccugggugagcuucaaucagaaccuggaauaucagauuggauacaucuguucuggcauuuuuggggauaauccucgccccaacgacaaaaccggauccugcggcccggugagcucuaauggggccaacggagucaagggcuucuccuuuaaguauggcaacgggguguggaucggaagaacaaaaagcauuuccucucggaauggcuucgagaugaucugggauccuaacggguggaccggaaccgacaauaacuuuagcaucaagcaagacauuguuggcaucaaugaaugguccggguacucuggcagcuucgugcagcaucccgagcuuacaggacuggauuguauucgcccuugcuucugggucgaacucaucagaggccggcccaaagagaacacgauuuggaccuccgggagcucuaucuccuuuuguggagugaauagcgacacaguuggcuggucuuggcccgauggggcugagcugccuuucaccaucgacaaguga

SEQ ID NO: 214894 - RNA, 1410 nt, Artificial Sequence; identical to SEQ ID NO: 208810
  derived and/or modified CDS sequence (opt5) from neuraminidase__InfluenzaA__AFN18618

SEQ ID NO: 214895 - RNA, 1410 nt, Artificial Sequence; identical to SEQ ID NO: 209636
  derived and/or modified CDS sequence (opt5) from neuraminidase__InfluenzaA__AFN18624

SEQ ID NO: 214896 - RNA, 1410 nt, Artificial Sequence
  derived and/or modified CDS sequence (opt5) from neuraminidase__InfluenzaA__AFN18630
augaaccccaaucagaagaucauuaccaucggcagcgugugcaugacaauugggauggccaaccugauccuccaaauuggaaauaucaucuccauuuggaucucucacagcauucagcugggcaaccagaaucagaucgagacguguaaccaauccgucauuaccuacgaaaauaacacauggguuaaucagaccuaugugaacaucucuaauacaaacuucgcugccgggcagagcguggucuccgugaaacuugcgggaaauucuagccugugcccuguuuccggcugggcuauuuacagcaaggacaacucuaucagaaucggguccaaaggagauguguuugucauucgggagccguucaucagcuguucuccccucgaaugccgcaccuuuuuccugacacagggcgcccuucugaaugacaagcauuccaacggcaccauuaaagauagaagcccuuaucggacgcucaugucuugucccaucggggaggugccuucccccuacaacagccgcuuugaauccguugccuggucugcuagcgccugccacgacggaauuaauuggcugaccaucggcaucuccgggccugauaacggagcuguggccguccugaaguauaauggcauuaucacagacaccauuaagagcuggagaaacaauauccuccggacacaagagucugagugugcgugcgugaacggguccuguuucaccgugaugacggauggaccgagcgacggccaggccucuuacaaaauuuuucgcaucgaaaagggcaaaaucgucaagagcguugagaugaaugcucccaacuaucauuacgaagagugcuccuguuacccugauucuagcgagauuacaugcgugugcagagacaauuggcacggguccaaccggcccugggugagcuucaaucagaaccuggaauaucagaucggauacauuuguucuggcaucuuuggggauaauccucgccccaacgacaaaaccggauccugcggcccggucagcucuaauggggccaacggagugaagggcuucuccuuuaaguauggcaacgggguuuggauuggaagaacaaaaagcaucuccucucggaauggcuucgagaugauuugggauccuaacggguggaccggaaccgacaauaacuuuagcaucaagcaagacaucgugggcauuaaugaaugguccggguacucuggcagcuucguccagcaucccgagcuuacaggacugggcuguauccgcccuugcuucuggguggaacucauuagagggcggcccaaagagaacacgaucuggaccuccggaagcucuauuuccuuuuguggcguuaauagcgauacagugggguggucuuggcccgacggagcugagcugccuuucaccaucgauaaguga

SEQ ID NO: 214897 - RNA, 1410 nt, Artificial Sequence
  derived and/or modified CDS sequence (opt5) from neuraminidase__InfluenzaA__AFN18636
augaaccccaaucagaagaucauuaccaucggcagcgugugcaugacaauugggauggccaaccugauccuccaaauuggaaauaucaucuccauuuggaucucucacagcauucagcugggcaaccagaaucagaucgagacguguaaccaauccgucauuaccuacgaaaauaacacauggguuaaucagaccuaugugaacaucucuaauacaaacuucgcugccgggcagagcguggucuccgugaaacuugcgggaaauucuagccugugcccuguuuccggcugggcuauuuacagcaaggacaacucuaucagaaucggguccaaaggagauguguuugucauucgggagccguucaucagcuguucuccccucgaaugccgcaccuuuuuccugacacagggcgcccuucugaaugacaagcauuccaacggcaccauuaaagauagaagcccuuaucggacgcucaugucuugucccaucggggaggugccuucccccuacaacagccgcuuugaauccguugccuggucugcuagcgccugccacgacggaauuaauuggcugaccaucggcaucuccgggccugauaacggagcuguggccguccugaaguauaauggcauuaucacagacaccauuaagagcuggagaaacaauauccuccggacacaagagucugagugugcgugcgugaacggguccuguuucaccgugaugacggauggaccgagcgacggccaggccucuuacaaaauuuuucgcaucgaaaagggcaaaaucgucaagagcguugagaugaaugcucccaacuaucauuacgaagagugcuccuguuacccugauucuagcgagauuacaugcgugugcagagacaauuggcacggguccaaccggcccugggugagcuucaaucagaaccuggaauaucgcaucggauacauuuguucuggcaucuuuggggauaauccuagacccaacgacaaaaccggauccugcggcccggucagcucuaauggggccaacggagugaagggcuucuccuuuaaguauggcaacgggguuuggauuggacggacaaaaagcaucuccucucgcaauggcuucgagaugauuugggauccuaacggguggaccggaaccgacaauaacuuuagcaucaagcaggacaucgugggcauuaaugaaugguccggguacucuggcagcuucguccaacaucccgagcuuacaggacuggauuguaucagaccuugcuucuggguggaacucauucggggccgcuccaaagagaacacgaucuggaccagcgggucuuccauuagcuuuuguggaguuaauucugacacagugggcugguccuggcccgauggggcugagcugcccuucaccaucgacaaguga

SEQ ID NO: 214898 - RNA, 1410 nt, Artificial Sequence; identical to SEQ ID NO: 208810
  derived and/or modified CDS sequence (opt5) from neuraminidase__InfluenzaA__AFN18646

SEQ ID NO: 214899 - RNA, 1410 nt, Artificial Sequence; identical to SEQ ID NO: 208810
  derived and/or modified CDS sequence (opt5) from neuraminidase__InfluenzaA__AFN18656

SEQ ID NO: 214900 - RNA, 1410 nt, Artificial Sequence
  derived and/or modified CDS sequence (opt5) from neuraminidase__InfluenzaA__AFN18666
augaaccccaaucagaagaucauuaccaucggcagcgugugcaugacaauugggauggccaaccugauccuccaaauuggaaauaucaucuccauuuggaucucucacagcauucagcugggcaaccagaaucagaucgagacguguaaccaauccgucauuaccuacgaaaauaacacauggguuaaucagaccuaugugaacaucucuaauacaaacuucgcugccgggcagagcguggucuccgugaaacuugcgggaaauucuagccugugcccuguuuccggcugggcuauuuacagcaaggacaacucuaucagaaucggguccaaaggagauguguuugucauucgggagccguucaucagcuguucuccccucgaaugccgcaccuuuuuccugacacagggcgcccuucugaaugacaagcauuccaacggcaccauuaaagauagaagcccuuaucggacgcucaugucuugucccaucggggaggugccuucccccuacaacagccgcuuugaauccguugccuggucugcuagcgccugccacgacggaauuaauuggcugaccaucggcaucuccgggccugauaacggagcuguggccguccugaaguauaauggcauuaucacagacaccauuaagagcuggagaaacaauauccuccggacacaagagucugagugugcgugcgugaacggguccuguuucaccgugaugacggauggaccgagcgacggccaggccucuuacaaaauuuuucgcaucgaaaagggcaaaaucgucaagagcguugagaugaaugcucccaacuaucauuacgaagagugcuccuguuacccugauucuagcgagauuacaugcgugugcagagacaauuggcacggguccaaccggcccugggugagcuucaaucagaaccuggaauaucagaucggauacauuuguucuggcaucuuuggggauaauccucgccccaacgacaaaaccggauccugcggcccggucagcucuaauggggccaacggagugaagggcuucuccuuuaaguauggcaacgggguuuggauuggaagaacaaaaagcaucuccucucggaauggcuucgagaugauuugggauccuaacggguggaccggaaccgacaauaacuuuagcaucaagcaagacaucgugggcauuaaugaaugguccggguacucuggcagcuucguccagcaucccgagcuuacaggacuggauuguauccgcccuugcuucuggguggaacucauuagaggccggcccaaagagaacacgaucuggaccuccgggagcucuauuuccuuuuguggaguuaauagcgacacagugggcuggucuuggcccgauggggcugagcugccuuucaucaucgacaaguga

SEQ ID NO: 214901 - RNA, 1410 nt, Artificial Sequence
  derived and/or modified CDS sequence (opt5) from neuraminidase__InfluenzaA__AFN18676
augaaccccaaucagaagaucauuaccaucggcagcgugugcaugacaauugggauggccaaccugauccuccaaauuggaaauaucaucuccauuuggaucucucacagcauucagcugggcaaccagaaucagaucgagacguguaaccaauccgucauuaccuacgaaaauaacacauggguuaaucagaccuaugugaacaucucuaauacaaacuucgcugccgggcagagcguggucuccgugaaacuugcgggaaauucuagccugugcccuguuuccggcugggcuauuuacagcaaggacaacucuaucagaaucggguccaaaggagauguguuugucauucgggagccguucaucagcuguucuccccucgaaugccgcaccuuuuuccugacacagggcgcccuucugaaugacaagcauuccaacggcaccauuaaagauagaagcccuuaucggacgcucaugucuugucccaucggggaggugccuucccccuacaacagccgcuuugaauccguugccuggucugcuagcgccugccacgacggaauuaauuggcugaccaucggcaucuccgggccugauaacggagcuguggccguccugaaguauaauggcauuaucacagacaccauuaagagcuggagaaacaauauccuccggacacaagagucugagugugcgugcgugaacggguccuguuucaccgugaugacggauggaccgagcgacggccaggccucuuacaaaauuuuucgcaucgaaaagggcaaaaucgucaagagcguugagaugaaugcucccaacuaucauuacgaagagugcuccuguuacccugauucuagcgagauuacaugcgugugcagagacaauuggcacggguccaaccggcccugggugagcuucaaucagaaccuggaauaucgcaucggauacauuuguucuggcaucuuuggggauaauccuagacccaacgacaaaaccggauccugcggcccggucagcucuaauggggccaacggagugaagggcuucuccuuuaaguauggcaacgggguuuggauuggacggacaaaaagcaucuccucucgcaauggcuucgagaugauuugggauccuaacggguggaccgaaaccgacaauaacuuuagcaucaagcaggacaucgugggaauuaaugagugguccggcuacucugggagcuucguccaacaucccgaacuuacaggccuggauuguaucagaccuugcuucuggguggagcucauucggggacgccccaaagagaacacgaucuggaccuccggcagcucuauuuccuuuugugggguuaauagcgacacagugggauggucuuggcccgauggcgcugaacugccuuucaccaucgacaaguga

SEQ ID NO: 214902 - RNA, 1410 nt, Artificial Sequence
  derived and/or modified CDS sequence (opt5) from neuraminidase__InfluenzaA__AFN18686
augaaccccaaucagaagaucauuaccaucggcagcgugugcaugacaauugggauggccaaccugauccuccaaauuggaaauaucaucuccauuuggaucucucacagcauucagcugggcaaccagaaucagaucgagacguguaaccaauccgucauuaccuacgaaaauaacacauggguuaaucagaccuaugugaacaucucuagcacaaauuucgcugccgggcaguccguggucucugugaaacuugcgggaaacagcucccugugcccuguuagcggcugggcuauuuacucuaaggacaauuccaucagaaucgggagcaaaggagauguguuugucauucgggagccguucaucucuuguagcccccucgaaugccgcaccuuuuuccugacacagggcgcccuucugaacgacaagcauuccaauggcaccauuaaagauagaucuccuuaucggacgcucauguccugucccaucggggaggugccuagccccuacaacucccgcuuugaaucuguugccuggagcgcuuccgccugccacgacggaauuaacuggcugaccaucggcaucagcgggccugauaauggagcuguggccguccugaaguauaacggcauuaucacagacaccauuaagucuuggagaaauaacauccuccggacacaagaguccgagugugcgugcgugaaugggagcuguuucacccugaugacggauggaccgucugacggccaggccagcuacaaaauuuuucgcaucgaaaagggcaaaaucgugaaguccgucgagaugaacgcucccaauuaucauuacgaagagugcucuuguuacccugauagcuccgagauuacaugcguuugcagagacaacuggcacgggagcaaucggcccugggugucuuucaaccagaaucuugaauaucagaucggauacauuuguuccggcaucuuuggggauaacccucgccccaaugacaaaaccggaagcugcggcccggugucuuccaacggggccaauggagucaagggcuucagcuuuaaguauggcaacgggguguggauuggaagaacaaaauccaucucuagccggaacggcuucgagaugauuugggauccuaauggguggaccggaaccgacaacaauuuuuccaucaagcaagacaucguuggcauuaacgaauggucuggguacagcggcuccuucgugcagcaucccgagcugacaggacucgauuguauccgcccuugcuucugggucgaacugauuagaggccggcccaaagagaauacgaucuggaccagcgggucuuccauuagcuuuuguggagugaacucugacacaguuggcugguccuggcccgauggggcugagcuuccuuucaccaucgacaaguga

SEQ ID NO: 214903 - RNA, 1410 nt, Artificial Sequence; identical to SEQ ID NO: 208810
  derived and/or modified CDS sequence (opt5) from neuraminidase__InfluenzaA__AFN18696

SEQ ID NO: 214904 - RNA, 1410 nt, Artificial Sequence; identical to SEQ ID NO: 211397
  derived and/or modified CDS sequence (opt5) from neuraminidase__InfluenzaA__AFN18706

SEQ ID NO: 214905 - RNA, 1410 nt, Artificial Sequence; identical to SEQ ID NO: 208810
  derived and/or modified CDS sequence (opt5) from neuraminidase__InfluenzaA__AFN18716

SEQ ID NO: 214906 - RNA, 1410 nt, Artificial Sequence; identical to SEQ ID NO: 208810
  derived and/or modified CDS sequence (opt5) from neuraminidase__InfluenzaA__AFN18727

SEQ ID NO: 214907 - RNA, 1410 nt, Artificial Sequence
  derived and/or modified CDS sequence (opt5) from neuraminidase__InfluenzaA__AFN18737
augaaccccaaucagaagaucauuaccaucggcagcgugugcaugacaauugggauggccaaccugauccuccaaauuggaaauaucaucuccauuuggaucucucacagcauucagcugggcaaccagaaucagaucgagacguguaaccaauccgucauuaccuacgaaaauaacacauggguuaaucagaccuaugugaacaucucuaauacaaacuucgcugccgggcagagcguggucuccgugaaacuugcgggaaauucuagccugugcccuguuuccggcugggcuauuuacagcaaggacaacucuaucagaaucggguccaaaggagauguguuugucauucgggagccguucaucagcuguucuccccucgaaugccgcaccuuuuuccugacacagggcgcccuucugaaugacaagcauuccaacggcaccauuaaagauagaagcccuuaucggacgcucaugucuugucccaucggggaggugccuucccccuacaacagccgcuuugaauccguugccuggucugcuagcgccugccacgacggaauuaauuggcugaccaucggcaucuccgggccugauaacggagcuguggccguccugaaguauaauggcauuaucacagacaccauuaagagcuggagaaacaauauccuccggacacaagagucugagugugcgugcgugaacggguccuguuucaccgugaugacggauggaccgagcgacggccaggccucuuacaaaauuuuucgcaucgaaaagggcaaaaucgucaagagcguugagaugaaugcucccaacuaucauuacgaagagugcuccuguuacccugauucuagcgagauuacaugcgugugcagagacaauuggcacggguccaaccggcccugggugagcuucaaucagaaccuggaauaucagaucggauacauuuguucuggcaucuuuggggauaauccucgccccaacgacaaaaccggauccugcggcccggucagcucuaauggggccaacggagugaagggcuucuccuuuaaguauggcaacgggguuuggauuggaagaacaaaaagcaucuccucucggaauggcuucgagauggugugggauccuaacggguggaccggaaccgacaauaacuuuagcauuaagcaagacaucgucggcaucaaugaaugguccggguacucuggcagcuucgugcagcaucccgagcuuacaggacuggauuguauucgcccuugcuucuggguugaacucaucagaggccggcccaaagagaacacgauuuggaccuccgggagcucuaucuccuuuuguggagugaauagcgacacagucggcuggucuuggcccgauggggcugagcugccuuucaccauugacaaguga

SEQ ID NO: 214908 - RNA, 1410 nt, Artificial Sequence; identical to SEQ ID NO: 208810
  derived and/or modified CDS sequence (opt5) from neuraminidase__InfluenzaA__AFN18743

SEQ ID NO: 214909 - RNA, 1410 nt, Artificial Sequence; identical to SEQ ID NO: 208810
  derived and/or modified CDS sequence (opt5) from neuraminidase__InfluenzaA__AFN18749

SEQ ID NO: 214910 - RNA, 1410 nt, Artificial Sequence; identical to SEQ ID NO: 208810
  derived and/or modified CDS sequence (opt5) from neuraminidase__InfluenzaA__AFN18759

SEQ ID NO: 214911 - RNA, 1410 nt, Artificial Sequence
  derived and/or modified CDS sequence (opt5) from neuraminidase__InfluenzaA__AFN18769
augaaccccaaucagaagaucauuaccaucggcagcgugugcaugacaauugggauggccaaccugauccuccaaauuggaaauaucaucuccauuuggaucucucacagcauucagcugggcaaccagaaucagaucgagacguguaaccaauccgucauuaccuacgaaaauaacacauggguuaaucagaccuaugugaacaucucuaauacaaacuucgcugccgggcagagcguggucuccgugaaacuugcgggaaauucuagccugugcccuguuuccggcugggcuauuuacagcaaggacaacucuaucagaaucggguccaaaggagauguguuugucauucgggagccguucaucagcuguucuccccucgaaugccgcaccuuuuuccugacacagggcgcccuucugaaugacaagcauuccaacggcaccauuaaagauagaagcccuuaucggacgcucaugucuugucccaucggggaggugccuucccccuacaacagccgcuuugaauccguugccuggucugcuagcgccugccacgacggaauuaauuggcugaccaucggcaucuccgggccugauaacggagcuguggccguccugaaguauaauggcauuaucacagacaccauuaagagcuggagaaacaauauccuccggacacaagagucugagugugcgugcgugaacggguccuguuucacccugaugacggauggaccgagcgacggccaggccucuuacaaaauuuuucgcaucgaaaagggcaaaaucgucaagagcguggagaugaaugcucccaacuaucauuacgaagagugcuccuguuacccugauucuaaugagauuacaugcguuugcagagacaacuggcacgggagcaaucggcccuggguguccuucaaccagaaucuugaauaucagaucggauacauuuguagcggcaucuuuggggauaacccucgccccaaugacaaaaccggaucuugcggcccgguguccagcaacggggccaacggagucaagggcuucucuuuuaaguauggcaaugggguguggauuggaagaacaaaauccaucagcucccggaacggcuucgagaugauuugggauccuaauggguggaccggaaccgacaacaauuuuucuaucaagcaagacaucguuggcauuaacgaauggagcggguacuccggcucuuucgugcagcaucccgagcugacaggacucgauuguauccgcccuugcuucugggucgaacugauuagaggccggcccaaagagaauacgaucuggaccagcggguccagcauuucuuuuuguggagugaacuccgacacaguuggcuggagcuggcccgauggggcugagcuuccuuucaccaucgacaaguga

SEQ ID NO: 214912 - RNA, 1410 nt, Artificial Sequence; identical to SEQ ID NO: 210712
  derived and/or modified CDS sequence (opt5) from neuraminidase__InfluenzaA__AFN18775

SEQ ID NO: 214913 - RNA, 1410 nt, Artificial Sequence; identical to SEQ ID NO: 208810
  derived and/or modified CDS sequence (opt5) from neuraminidase__InfluenzaA__AFN18777

SEQ ID NO: 214914 - RNA, 1410 nt, Artificial Sequence; identical to SEQ ID NO: 208810
  derived and/or modified CDS sequence (opt5) from neuraminidase__InfluenzaA__AFN18779

SEQ ID NO: 214915 - RNA, 1410 nt, Artificial Sequence
  derived and/or modified CDS sequence (opt5) from neuraminidase__InfluenzaA__AFN18785
augaaccccaaucagaagaucauuaccaucggcagcgugugcaugacaauugggauggccaaccugauccuccaaauuggaaauaucaucuccauuuggaucucucacagcauucagcugggcaaccagaaucagaucgagacguguaaccaauccgucauuaccuacgaaaauaacacauggguuaaucagaccuaugugaacaucucuaauacaaacuucgcugccgggcagagcguggucuccgugaaacuugcgggaaauucuagccugugcccuguuuccggcugggcuauuuacagcaaggacaacucuaucagaaucggguccaaaggagauguguuugucauucgggagccguucaucagcuguucuccccucgaaugccgcaccuuuuuccugacacagggcgcccuucugaaugacaagcauuccaacggcaccauuaaagauagaagcccuuaucggacgcucaugucuugucccaucggggaggugccuucccccuacaacagccgcuuugaauccguugccuggucugcuagcgccugccacgacggaauuaauuggcugaccaucggcaucuccgggccugauaacggagcuguggccguccugaaguauaauggcauuaucacagacaccauuaagagcuggagaaacaauauccuccggacacaagagucugagugugcgugcgugaacggguccuguuucaccgugaugacggauggaccgagcgacggccaggccucuuacaaaauuuuucgcaucgaaaagggcaaaaucgucaagagcguugagaugaaugcucccaacuaucauuacgaagagugcuccuguuacccugauucuagcgagauuacaugcgugugcagagacaauuggcacggguccaaccggcccugggugagcuucaaucagaaccuggaauaucagaucggauacauuuguucuggcaucuuuggggauaauccucgccccaacgacaaaaccggauccugcggcccggucagcucuaauggggccaacggagugaagggcuucuccuuuaaguauggcaacgggguuuggauuggaagaacaaaaagcaucuccucucggaauggcuucgagaugauuugggauccuaacggguggaccggaaccgacaauaacuuuagcauccgccaagacaucgugggcauuaaugaaugguccggguacucuggcagcuucguccagcaucccgagcuuacaggacuggauuguaucagaccuugcuucuggguggaacucauucggggccgccccaaggagaacacgaucuggaccuccgggagcucuauuuccuuuuguggaguuaauagcgacacagugggcuggucuuggcccgauggggcugagcugccuuucaccaucgacaaauga

SEQ ID NO: 214916 - RNA, 1410 nt, Artificial Sequence
  derived and/or modified CDS sequence (opt5) from neuraminidase__InfluenzaA__AFN18791
augaaccccaaucagaagaucauuaccaucggcagcgugugcaugacaauugggauggccaaccugauccuccaaauuggaaauaucaucuccauuuggaucucucacagcauucagcugggcaaccagaaucagaucgagacguguaaccaauccgucauuaccuacgaaaauaacacauggguuaaucagaccuaugugaacaucucuaauacaaacuucgcugccgggcagagcguggucuccgugaaacuugcgggaaauucuagccugugcccuguuuccggcugggcuauuuacagcaaggacaacucuaucagaaucggguccaaaggagauguguuugucauucgggagccguucaucagcuguucuccccucgaaugccgcaccuuuuuccugacacagggcgcccuucugaaugacaagcauuccaacggcaccauuaaagauagaagcccuuaucggacgcucaugucuugucccaucggggaggugccuucccccuacaacagccgcuuugaauccguugccuggucugcuagcgccugccacgacggaauuaauuggcugaccaucggcaucuccgggccugauaacggagcuguggccguccugaaguauaauggcauuaucacagacaccauuaagagcuggagaaacaauauccuccggacacaagagucugagugugcgugcgugaacggguccuguuucaccgugaugacggauggaccgagcgacggccaggccucuuacaaaauuuuucgcaucgaaaagggcaaaaucgucaagagcguugagaugaaugcucccaacuaucauuacgaagagugcuccuguuacccugagucuagcgaaauuacaugcgugugcagagauaauuggcacggguccaaccggcccugggugagcuucaaucagaaccuggaguaucagaucggauacauuuguucuggcaucuuuggggacaauccucgccccaacgauaaaaccggauccugcggcccggucagcucuaauggggccaacggagugaagggcuucuccuuuaaguauggcaacgggguuuggauuggaagaacaaaaagcaucuccucucggaauggcuucgaaaugauuugggacccuaacggguggaccggaaccgauaauaacuuuagcaucaagcaagacaucgugggcauuaaugagugguccggguacucuggcagcuucguccagcaucccgaacuuacaggacuggacuguauccgcccuugcuucuggguggagcucauuagaggccggcccaaagagaacacgaucuggaccuccgggagcucuauuuccuuuuguggaguuaauagcgauacagugggcuggucuuggcccgacggggcugaacugccuuucaccaucgauaaguga

SEQ ID NO: 214917 - RNA, 1410 nt, Artificial Sequence; identical to SEQ ID NO: 208810
  derived and/or modified CDS sequence (opt5) from neuraminidase__InfluenzaA__AFN18801

SEQ ID NO: 214918 - RNA, 1410 nt, Artificial Sequence; identical to SEQ ID NO: 211229
  derived and/or modified CDS sequence (opt5) from neuraminidase__InfluenzaA__AFN18811

SEQ ID NO: 214919 - RNA, 1410 nt, Artificial Sequence; identical to SEQ ID NO: 208810
  derived and/or modified CDS sequence (opt5) from neuraminidase__InfluenzaA__AFN18817

SEQ ID NO: 214920 - RNA, 1410 nt, Artificial Sequence; identical to SEQ ID NO: 208810
  derived and/or modified CDS sequence (opt5) from neuraminidase__InfluenzaA__AFN18819

SEQ ID NO: 214921 - RNA, 1410 nt, Artificial Sequence; identical to SEQ ID NO: 211802
  derived and/or modified CDS sequence (opt5) from neuraminidase__InfluenzaA__AFN18821

SEQ ID NO: 214922 - RNA, 1410 nt, Artificial Sequence; identical to SEQ ID NO: 208810
  derived and/or modified CDS sequence (opt5) from neuraminidase__InfluenzaA__AFN18823

SEQ ID NO: 214923 - RNA, 1410 nt, Artificial Sequence; identical to SEQ ID NO: 208810
  derived and/or modified CDS sequence (opt5) from neuraminidase__InfluenzaA__AFN18825

SEQ ID NO: 214924 - RNA, 1410 nt, Artificial Sequence; identical to SEQ ID NO: 208810
  derived and/or modified CDS sequence (opt5) from neuraminidase__InfluenzaA__AFN18827

SEQ ID NO: 214925 - RNA, 1410 nt, Artificial Sequence; identical to SEQ ID NO: 208810
  derived and/or modified CDS sequence (opt5) from neuraminidase__InfluenzaA__AFN18829

SEQ ID NO: 214926 - RNA, 1410 nt, Artificial Sequence; identical to SEQ ID NO: 208810
  derived and/or modified CDS sequence (opt5) from neuraminidase__InfluenzaA__AFN18831

SEQ ID NO: 214927 - RNA, 1410 nt, Artificial Sequence; identical to SEQ ID NO: 209947
  derived and/or modified CDS sequence (opt5) from neuraminidase__InfluenzaA__AFN18833

SEQ ID NO: 214928 - RNA, 1410 nt, Artificial Sequence; identical to SEQ ID NO: 209985
  derived and/or modified CDS sequence (opt5) from neuraminidase__InfluenzaA__AFN18835

SEQ ID NO: 214929 - RNA, 1410 nt, Artificial Sequence; identical to SEQ ID NO: 208810
  derived and/or modified CDS sequence (opt5) from neuraminidase__InfluenzaA__AFN18841

SEQ ID NO: 214930 - RNA, 1410 nt, Artificial Sequence
  derived and/or modified CDS sequence (opt5) from neuraminidase__InfluenzaA__AFN18851
augaaccccaaucagaagaucauuaccaucggcagcgugugcaugacaauugggauggccaaccugauccuccaaauuggaaauaugaucuccaucuggauuucucacagcauccagcugggcaaccagaaucagauugagacguguaaccaauccgucaucaccuacgaaaauaacacauggguuaaucagaccuaugugaacauuucuaauacaaacuucgcugccgggcagagcguggucuccgugaaacuugcgggaaauucuagccugugcccuguuuccggcugggcuaucuacagcaaggacaacucuauuagaaucggguccaaaggagauguguuugucauccgggagccguucauuagcuguucuccccucgaaugccgcaccuuuuuccugacacagggcgcccuucugaaugacaagcauuccaacggcaccaucaaagauagaagcccuuaucggacgcucaugucuugucccauuggggaggugccuucccccuacaacagccgcuuugaauccguugccuggucugcuagcgccugccacgacggaaucaauuggcugaccauuggcaucuccgggccugauaacggagcuguggccguccugaaguauaauggcaucauuacagacaccaucaagagcuggagaaacaauauucuccggacacaagagucugagugugcgugcgugaacggguccuguuucaccgugaugacggauggaccgagcgacggccaggccucuuacaaaaucuuucgcauugaaaagggcaaaaucgucaagagcguugagaugaaugcucccaacuaucauuacgaagagugcuccuguuacccugauucuagcgagaucacaugcgugugcagagacaauuggcacggguccaaccggcccugggugagcuucaaucagaaccuggaauaucagauuggauacaucuguucuggcauuuuuggggauaauccucgccccaacgacaaaaccggauccugcggcccggucagcucuaauggggccaacggagugaagggcuucuccuuuaaguauggcaacgggguuuggaucggaagaacaaaaagcauuuccucucggaauggcuucgagaugaucugggauccuaacggguggaccggaaccgacaauaacuuuagcauuaagcaagacaucgugggcaucaaugaaugguccggguacucuggcagcuucguccagcaucccgagcuuacaggacuggauuguauucgcccuugcuucuggguggaacucaucagaggccggcccaaagagaacacgauuuggaccuccgggagcucuaucuccuuuuguggaguuaauagcgacacagugggcuggucuuggcccgauggggcugagcugccuuucaccauugacaaguga

SEQ ID NO: 214931 - RNA, 1410 nt, Artificial Sequence; identical to SEQ ID NO: 208810
  derived and/or modified CDS sequence (opt5) from neuraminidase__InfluenzaA__AFN18857

SEQ ID NO: 214932 - RNA, 1410 nt, Artificial Sequence
  derived and/or modified CDS sequence (opt5) from neuraminidase__InfluenzaA__AFN18859
augaaccccaaucagaagaucauuaccaucggcagcgugugcaugacaauugggcuggccaaccucauccugcaaauuggaaauaucaucuccauuuggaucucucacagcauucagcuuggcaaccagaaucagaucgagacguguaaccaauccgucauuaccuacgaaaauaacacauggguuaaucagaccuaugugaacaucucuaauacaaacuucgcugccgggcagagcguggucuccgugaaacuggcgggaaauucuagccucugcccuguuuccggcugggcuauuuacagcaaggacaacucuaucagaaucggguccaaaggagauguguuugucauucgggagccguucaucagcuguucuccccuggaaugccgcaccuuuuuccuuacacagggcgcccugcucaaugacaagcauuccaacggcaccauuaaagauagaagcccuuaucggacgcugaugucuugucccaucggggaggugccuucccccuacaacagccgcuuugaauccguugccuggucugcuagcgccugccacgacggaauuaauuggcugaccaucggcaucuccgggccugauaacggagcuguggccguccucaaguauaauggcauuaucacagacaccauuaagagcuggagaaacaauauccugcggacacaagagucugagugugcgugcgugaacggguccuguuucaccgugaugacggauggaccgagcgacggccaggccucuuacaaaauuuuucgcaucgaaaagggcaaaaucgucaagagcguugagaugaaugcucccaacuaucauuacgaagagugcuccuguuacccugauucuagcgagauuacaugcgugugcagagacaauuggcacggguccaaccggcccugggugagcuucaaucagaaccuugaauaucagaucggauacauuuguucuggcaucuuuggggauaauccucgccccaacgacaaaaccggauccugcggcccggucagcucuaauggggccaacggagugaagggcuucuccuuuaaguauggcaacgggguuuggauuggaagaacaaaaagcaucuccucucggaauggcuucgagaugauuugggauccuaacggguggaccggaaccgacaauaacuuuagcaucaagcaagacaucgugggcauuaaugaaugguccggguacucuggcagcuucguccagcaucccgagcugacaggacucgauuguauccgcccuugcuucuggguggaacugauuagaggccggcccaaagagaacacgaucuggaccuccgggagcucuauuuccuuuuguggaguuaauagcgacacagugggcuggucuuggcccgauggggcugagcuuccuuucaccaucgacaaguga

SEQ ID NO: 214933 - RNA, 1410 nt, Artificial Sequence
  derived and/or modified CDS sequence (opt5) from neuraminidase__InfluenzaA__AFN18861
augaaccccaaucagaagaucauuaccaucggcagcgugugcaugacaauugggauggccaaccugauccuccaaauuggaaauaucaucuccauuuggaucucucacagcauucagcugggcaaccagaaucagaucgagacguguaaccaauccgucauuaccuacgaaaauaacacauggguuaaucagaccuaugugaacaucucuaauacaaacuucgcugccgggcagagcguggucuccgugaaacuugcgggaaauucuagccugugcuccguuagcggcugggcuauuuacucuaaggacaacuccaucagaaucgggagcaaaggagauguguuugucauucgggagccuuucaucucuuguuccccgcucgaaugccgcaccuuuuuccugacacagggcgcccuucugaaugacaagcauagcaacggcaccauuaaagauagaucucccuaucggacgcucauguccuguccuaucggggaggugcccagcccuuacaacucccgcuuugaaucuguugccuggagcgcuuccgccugccacgacggaauuaauuggcugaccaucggcaucagcgggcccgauaacggagcuguggccguccugaaguauaauggcauuaucacagacaccauuaagucuuggagaaacaauauccuccggacacaagaguccgagugugcgugcgugaacgggagcuguuucaccgugaugacggauggaccuucugacggccaggccagcuacaaaauuuuucgcaucgaaaagggcaaaaucgucaaguccguugagaugaaugcuccgaacuaucauuacgaagagugcucuuguuaccccgauagcuccgagauuacaugcgugugcagagacaauuggcacgggagcaaccggccuugggugucuuucaaucagaaccuggaauaucagaucggauacauuuguuccggcaucuuuggggauaauccccgcccuaacgacaaaaccggaagcugcggccccgucucuuccaauggggccaacggagugaagggcuucagcuuuaaguauggcaacgggguuuggauuggaagaacaaaauccaucucuagccggaauggcuucgagaugauuugggauccgaacggguggaccggaaccgacaauaacuuuuccaucaagcaagacaucgugggcauuaaugaauggucuggguacagcggcuccuucguccagcauccugagcuuacaggacuggauuguauccgccccugcuucuggguggaacucauuagaggccggccuaaagagaacacgaucuggaccagcgggucuuccauuagcuuuuguggaguuaauucugacacagugggcugguccuggcccgauggggcugagcugcccuucaccaucgacaaguga

SEQ ID NO: 214934 - RNA, 1410 nt, Artificial Sequence; identical to SEQ ID NO: 208810
  derived and/or modified CDS sequence (opt5) from neuraminidase__InfluenzaA__AFN18867

SEQ ID NO: 214935 - RNA, 1410 nt, Artificial Sequence; identical to SEQ ID NO: 210624
  derived and/or modified CDS sequence (opt5) from neuraminidase__InfluenzaA__AFN18877

SEQ ID NO: 214936 - RNA, 1410 nt, Artificial Sequence; identical to SEQ ID NO: 208810
  derived and/or modified CDS sequence (opt5) from neuraminidase__InfluenzaA__AFN18887

SEQ ID NO: 214937 - RNA, 1410 nt, Artificial Sequence; identical to SEQ ID NO: 209828
  derived and/or modified CDS sequence (opt5) from neuraminidase__InfluenzaA__AFN18893

SEQ ID NO: 214938 - RNA, 1410 nt, Artificial Sequence
  derived and/or modified CDS sequence (opt5) from neuraminidase__InfluenzaA__AFN18895
augaaccccaaucagaagaucauuaccaucggcagcgugugcaugacaauugggauggccaaccugauccuccaaauuggaaauaucaucuccauuuggaucucucacagcauucagcugggcaaccagaaucagaucgagacguguaaccaauccgucauuaccuacgaaaauaacacauggguuaaucagaccuaugugaacaucucuaauacaaacuucgcugccgggcagagcguggucuccgugaaacuugcgggaaauucuagccugugcccuguuuccggcugggcuauuuacagcaaggacaacucuaucagaaucggguccaaaggagauguguuugucauucgggagccguucaucagcuguucuccccucgaaugccgcaccuuuuuccugacacagggcgcccuucugaaugacaagcauuccaacggcaccauuaaagauagaagcccuuaucggacgcucaugucuugucccaucggggaggugccuucccccuacaacagccgcuuugaauccguugccuggucugcuagcgccugccacgacggaauuaauuggcugaccaucggcaucuccgggccugauaacggagcuguggccguccugaaguauaauggcauuaucacagacaccauuaagagcuggagaaacaauauccuccggacacaagagucugagugugcgugcgugaacggguccuguuucaccgugaugacggauggaccgagcgacggccaggccucuuacaaaauuuuucgcaucgaaaagggcaaaaucgucaagagcguugagaugaaugcucccaacuaucauuacgaagagugcuccuguuacccugauucuagcgagauuacaugcgugugcagagacaauuggcacggguccaaccggcccugggugagcuucaaucagaaccuggaauaucgcaucggauacauuuguucuggcaucuuuggggauaauccuagacccaacgacaaaaccggauccugcggcccggucagcucuaauggggccaacggagugaagggcuucuccuuuaaguauggcaacgggguuuggauuggacggacaaaaagcaucuccucucgcaauggcuucgagaugauuugggauccuaacggguggaccggaaccgacaauaacuuuagcaucaagcaggacaucgugggcauuaaugaaugguccggguacucuggcagcuucguccaacaucccgagcuuacaggacuggauuguaucagaccuugcuucuggguggaacucauuaaaggccggcccaaggagaacacgaucuggaccuccgggagcucuauuuccuuuuguggaguuaauagcgacacagugggcuggucuuggcccgauggggcugagcugccuuucaccaucgacaaauga

SEQ ID NO: 214939 - RNA, 1410 nt, Artificial Sequence; identical to SEQ ID NO: 210712
  derived and/or modified CDS sequence (opt5) from neuraminidase__InfluenzaA__AFN18905

SEQ ID NO: 214940 - RNA, 1410 nt, Artificial Sequence; identical to SEQ ID NO: 210624
  derived and/or modified CDS sequence (opt5) from neuraminidase__InfluenzaA__AFN18913

SEQ ID NO: 214941 - RNA, 1410 nt, Artificial Sequence
  derived and/or modified CDS sequence (opt5) from neuraminidase__InfluenzaA__AFN18919
augaaccccaaucagaagaucauuaccaucggcagcgugugcaugacaauugggauggccaaccugauccuccaaauuggaaauaucaucuccauuuggaucucucacagcauucagcugggcaaccagaaucagaucgagacguguaaccaauccgucauuaccuacgaaaauaacacauggguuaaucagaccuaugugaacaucucuaauacaaacuucgcugccgggcagagcguggucuccgugaaacuugcgggaaauucuagccugugcccuguuuccggcugggcuauuuacagcaaggacaacucuaucagaaucggguccaaaggagauguguuugucauucgggagccguucaucagcuguucuccccucgaaugccgcaccuuuuuccugacacagggcgcccuucugaaugacaagcauuccaacggcaccauuaaagauagaagcccuuaucggacgcucaugucuugucccaucggggaggugccuucccccuacaacagccgcuuugaauccguugccuggucugcuagcgccugccacgacggaauuaauuggcugaccaucggcaucuccgggccugauaacggagcuguggccguccugaaguauaauggcauuaucacagacaccauuaagagcuggagaaacaauauccuccggacacaagagucugagugugcgugcgugaacggguccuguuucaccgugaugacggauggaccgagcgacggccaggccucuuacaaaauuuuucgcaucgaaaagggcaaaaucgucaagagcguugagaugaaugcucccaacuaucauuacgaagagugcuccuguuacccugauucuagcgagauuacaugcgugugcagagacaauuggcacggguccaaccggcccugggugagcuucaaucagaaccuggaauaucagaucggauacauuuguucuggcaucuuuggggauaauccucgccccaacgacaaaaccggauccugcggcccggucagcucuaauggggagaacggagugaagggcuucuccuuuaaguauggcaacgggguuuggauuggaagaacaaaaagcaucuccucucggaauggcuucgaaaugauuugggauccuaacggguggaccggaaccgacaauaacuuuagcaucaagcaagacaucgugggcauuaaugagugguccggguacucuggcagcuucguccagcaucccgaacuuacaggacuggauuguauccgcccuugcuucuggguggagcucauuagaggccggcccaaagagaacacgaucuggaccuccgggagcucuauuuccuuuuguggaguuaauagcgacacagugggcuggucuuggcccgauggggccgaacugccuuucaccaucgacaaguga

SEQ ID NO: 214942 - RNA, 1410 nt, Artificial Sequence
  derived and/or modified CDS sequence (opt5) from neuraminidase__InfluenzaA__AFN18929
augaaccccaaucagaagaucauuaccaucggcagcgugugcaugacaauugggauggccaaccugauccuccaaauuggaaauaucaucuccauuuggaucucucacagcauucagcugggcaaccagaaucagaucgagacguguaaccaauccgucauuaccuacgaaaauaacacauggguuaaucagaccuaugugaacaucucuaauacaaacuucgcugccgggcagagcguggucuccgugaaacuugcgggaaauucuagccugugcccuguuuccggcugggcuauuuacagcaaggacaacucuaucagaaucggguccaaaggagauguguuugucauucgggagccguucaucagcuguucuccccucgaaugccgcaccuuuuuccugacacagggcgcccuucugaaugacaagcauuccaacggcaccauuaaagauagaagcccuuaucggacgcucaugucuugucccaucggggaggugccuucccccuacaacagccgcuuugaauccguugccuggucugcuagcgccugccacgacggaauuaauuggcugaccaucggcaucuccgggccugauaacggagcuguggccguccugaaguauaauggcauuaucacagacaccauuaagagcuggagaaacaauauccuccggacacaagagucugagugugcgugcgugaacggguccuguuucacccugaugacggauggaccgagcgacggccaggccucuuacaaaauuuuucgcaucgaaaagggcaaaaucgucaagagcguggagaugaaugcucccaacuaucauuacgaagagugcuccuguuacccugauucuagcgagauuacaugcguuugcagagacaauuggcacggguccaaccggcccugggugagcuucaaucagaaccuugaauaucagaucggauacauuuguucuggcaucuuuggggauaauccucgccccaacgacaaaaccggauccugcggcccggugagcucuaauggggccaacggagucaagggcuucuccuuuaaguauggcaacgggguguggauuggaagaacaaaaagcaucuccucucggaauggcuucgagaugauuugggauccuaacggguggaccggaaccgacaauaacuuuagcaucaagcaagacaucguuggcauuaaugaaugguccggguacucuggcagcuucgugcagcaucccgagcugacaggacucgauuguauccgcccuugcuucugggucgaacugauuagaggccggcccaaagagaacacgaucuggaccuccgggagcucuauuuccuuuuguggagugaauagcgacacaguuggcuggucuugguccgauggggcugagcuucccuucaccaucgacaaguga

SEQ ID NO: 214943 - RNA, 1410 nt, Artificial Sequence; identical to SEQ ID NO: 208810
  derived and/or modified CDS sequence (opt5) from neuraminidase__InfluenzaA__AFN18939

SEQ ID NO: 214944 - RNA, 1410 nt, Artificial Sequence; identical to SEQ ID NO: 208810
  derived and/or modified CDS sequence (opt5) from neuraminidase__InfluenzaA__AFN18953

SEQ ID NO: 214945 - RNA, 1410 nt, Artificial Sequence; identical to SEQ ID NO: 208810
  derived and/or modified CDS sequence (opt5) from neuraminidase__InfluenzaA__AFN18959

SEQ ID NO: 214946 - RNA, 1410 nt, Artificial Sequence; identical to SEQ ID NO: 208810
  derived and/or modified CDS sequence (opt5) from neuraminidase__InfluenzaA__AFN18965

SEQ ID NO: 214947 - RNA, 1410 nt, Artificial Sequence; identical to SEQ ID NO: 212880
  derived and/or modified CDS sequence (opt5) from neuraminidase__InfluenzaA__AFN18975

SEQ ID NO: 214948 - RNA, 1410 nt, Artificial Sequence; identical to SEQ ID NO: 208810
  derived and/or modified CDS sequence (opt5) from neuraminidase__InfluenzaA__AFN18981

SEQ ID NO: 214949 - RNA, 1410 nt, Artificial Sequence
  derived and/or modified CDS sequence (opt5) from neuraminidase__InfluenzaA__AFN18983
augaaccccaaucagaagaucauuaccaucggcagcgugugcaugacaauugggauggccaaccugauccuccaaauuggaaauaucaucuccauuuggaucucucacagcauucagcugggcaaccagaaucagaucgagacguguaaccaauccgucauuaccuacgaaaauaacacauggguuaaucagaccuaugugaacaucucuaauacaaacuucgcugccgggcagagcguggucuccgugaaacuugcgggaaauucuagccugugcccuguuuccggcugggcuauuuacagcaaggacaacucuaucagaaucggguccaaaggagauguguuugucauucgggagccguucaucagcuguucuccccucgaaugccgcaccuuuuuccugacacagggcgcccuucugaaugacaagcauuccaacggcaccauuaaagauagaagcccuuaucggacgcucaugucuugucccaucggggaggugccuucccccuacaacagccgcuuugaauccguugccuggucugcuagcgccugccacgacggaauuaauuggcugaccaucggcaucuccgggccugauaacggagcuguggccguccugaaguauaauggcauuaucacagacaccauuaagagcuggagaaacaauauccuccggacacaagagucugagugugcgugcgugaacggguccuguuucaccgugaugacggauggaccgagcgacggccaggccucuuacaaaauuuuucgcaucgaaaagggcaaaaucgucaagagcguugagaugaaugcuuccaacuaucauuacgaagagugcucuuguuaccccgauagcuccgagauuacaugcgugugcagagacaauuggcacgggagcaaccggccuugggugucuuucaaucagaaccuggaauaucagaucggauacauuuguuccggcaucuuuggggauaauccccgcccuaacgacaaaaccggaagcugcggccccgucucuuccaauggggccaacggagugaagggcuucagcuuuaaguauggcaacgggguuuggauuggaagaacaaaauccaucucuagccggaauggcuucgagaugauuugggauccgaacggguggaccggaaccgacaauaacuuuuccaucaagcaagacaucgugggcauuaaugaauggucuggguacagcggcuccuucguccagcauccugagcuuacaggacuggauuguauccgccccugcuucuggguggaacucauuagaggccggccuaaagagaacacgaucuggaccagcgggucuauuaucuccuuuuguggaguuaauagcgacacagugggcuggucuuggcccgauggggcugagcugcccuucaccaucgacaaguga

SEQ ID NO: 214950 - RNA, 1410 nt, Artificial Sequence; identical to SEQ ID NO: 208810
  derived and/or modified CDS sequence (opt5) from neuraminidase__InfluenzaA__AFN18985

SEQ ID NO: 214951 - RNA, 1410 nt, Artificial Sequence
  derived and/or modified CDS sequence (opt5) from neuraminidase__InfluenzaA__AFN18987
augaaccccaaucagaagaucauuaccaucggcagcgugugcaugacaauugggauggccaaccugauccuccaaauuggaaauaucaucuccauuuggaucucucacagcauucagcugggcaaccagaaucagaucgagacguguaaccaauccgucauuaccuacgaaaauaacacauggguuaaucagaccuaugugaacaucucuaauacaaacuucgcugccgggcagagcguggucuccgugaaacuugcgggaaauucuagccugugcccuguuuccggcugggcuauuuacagcaaggacaacucuaucagaaucggguccaaaggagauguguuugucauucgggagccguucaucagcuguucuccccucgaaugccgcaccuuuuuccugacacagggcgcccuucugaaugacaagcauuccaacggcaccauuaaagauagaagcccuuaucggacgcucaugucuugucccaucggggaggugccuucccccuacaacagccgcuuugaauccguugccuggucugcuagcgccugccacgacggaauuaauuggcugaccaucggcaucuccgggccugauaacggagcuguggccguccugaaguauaauggcauuaucacagacaccauuaagagcuggagaaacaauauccuccggacacaagagucugagugugcgugcgugaacggguccuguuucaccgugaugacggauggaccgagcgacggccaggccucuuacaaaauuuuucgcaucgaaaagggcaaaaucgucaagagcguugagaugaaugcucccaacuaucauuacgaagagugcuccuguuacccugauucuagcgagauuacaugcgugugcagagacaauuggcacggguccaaccggcccugggugagcuucaaucagaaccuggaauaucagaucggauacauuuguucuggcaucuuuggggauaauccucgccccauugacaaaaccggauccugcggcccggucagcucuaacggggccaauggagugaagggcuucuccuuuaaguauggcaacgggguuuggaucggaagaacaaaaagcauuuccucucggaacggcuucgagaugaucugggauccuaauggguggaccggaaccgacaacaauuuuagcaucaagcaagacauugugggcaucaacgaaugguccggguacucuggcagcuucguccagcaucccgagcuuacaggacuggauuguauucgcccuugcuucuggguggaacucaucagaggccggcccaaagagaauacgauuuggaccuccgggagcucuaucuccuuuuguggaguuaacagcgacacagugggcuggucuuggcccgauggggcugagcugccuuucaccaucgacaaguga

SEQ ID NO: 214952 - RNA, 1410 nt, Artificial Sequence; identical to SEQ ID NO: 208810
  derived and/or modified CDS sequence (opt5) from neuraminidase__InfluenzaA__AFN18989

SEQ ID NO: 214953 - RNA, 1410 nt, Artificial Sequence; identical to SEQ ID NO: 208810
  derived and/or modified CDS sequence (opt5) from neuraminidase__InfluenzaA__AFN18995

SEQ ID NO: 214954 - RNA, 1410 nt, Artificial Sequence; identical to SEQ ID NO: 214932
  derived and/or modified CDS sequence (opt5) from neuraminidase__InfluenzaA__AFN19001

SEQ ID NO: 214955 - RNA, 1410 nt, Artificial Sequence; identical to SEQ ID NO: 208810
  derived and/or modified CDS sequence (opt5) from neuraminidase__InfluenzaA__AFN19007

SEQ ID NO: 214956 - RNA, 1410 nt, Artificial Sequence; identical to SEQ ID NO: 208810
  derived and/or modified CDS sequence (opt5) from neuraminidase__InfluenzaA__AFN19024

SEQ ID NO: 214957 - RNA, 1410 nt, Artificial Sequence
  derived and/or modified CDS sequence (opt5) from neuraminidase__InfluenzaA__AFN19025
augaaccccaaucagaagaucauuaccaucggcagcgugugcaugacaauugggauggccaaccugauccuccaaauuggaaauaucaucuccauuuggaucucucacagcauucagcugggcaaccagaaucagaucgagacguguaaccaauccgucauuaccuacgaaaauaacacauggguuaaucagaccuaugugaacaucucuaauacaaacuucgcugccgggcagagcguggucuccgugaaacuugcgggaaauucuagccugugcccuguuuccggcugggcuauuuacagcaaggacaacucuaucagaaucggguccaaaggagauguguuugucauucgggagccguucaucagcuguucuccccucgaaugccgcaccuuuuuccugacacagggcgcccuucugaaugacaagcauuccaacggcaccauuaaagauagaagcccuuaucggacgcucaugucuugucccaucggggaggugccuucccccuacaacagccgcuuugaauccguugccuggucugcuagcgccugccacgacggaauuaauuggcugaccaucggcaucuccgggccugauaacggagcuguggccguccugaaguauaauggcauuaucacagacaccauuaagagcuggagaaacaaaauccuccggacacaagagucugagugugcgugcgugaauggguccuguuucaccgugaugacggauggaccgagcgacggccaggccucuuacaagauuuuucgcaucgaaaaaggcaagaucgucaaaagcguugagaugaacgcucccaauuaucauuacgaagagugcuccuguuacccugauucuagcgagauuacaugcgugugcagagacaacuggcacggguccaaucggcccugggugagcuucaaccagaaucuggaauaucagaucggauacauuuguucuggcaucuuuggggauaacccucgccccaaugacaagaccggauccugcggcccggucagcucuaacggggccaauggagugaagggcuucuccuuuaaauauggcaacgggguuuggauuggaagaacaaagagcaucuccucucggaacggcuucgagaugauuugggauccuaauggguggaccggaaccgacaacaauuuuagcaucaaacaagacaucgugggcauuaacgaaugguccggguacucuggcagcuucguccagcaucccgagcuuacaggacuggauuguauccgcccuugcuucuggguggaacucauuagaggccggcccaaggagaauacgaucuggaccuccgggagcucuauuuccuuuuguggaguuaacagcgacacagugggcuggucuuggcccgauggggcugagcugccuuucaccaucgacaaauga

SEQ ID NO: 214958 - RNA, 1410 nt, Artificial Sequence; identical to SEQ ID NO: 208810
  derived and/or modified CDS sequence (opt5) from neuraminidase__InfluenzaA__AFN19027

SEQ ID NO: 214959 - RNA, 1410 nt, Artificial Sequence; identical to SEQ ID NO: 208810
  derived and/or modified CDS sequence (opt5) from neuraminidase__InfluenzaA__AFN19032

SEQ ID NO: 214960 - RNA, 1410 nt, Artificial Sequence; identical to SEQ ID NO: 208810
  derived and/or modified CDS sequence (opt5) from neuraminidase__InfluenzaA__AFN19038

SEQ ID NO: 214961 - RNA, 1410 nt, Artificial Sequence; identical to SEQ ID NO: 214443
  derived and/or modified CDS sequence (opt5) from neuraminidase__InfluenzaA__AFN19049

SEQ ID NO: 214962 - RNA, 1410 nt, Artificial Sequence; identical to SEQ ID NO: 208810
  derived and/or modified CDS sequence (opt5) from neuraminidase__InfluenzaA__AFN19055

SEQ ID NO: 214963 - RNA, 1410 nt, Artificial Sequence; identical to SEQ ID NO: 208810
  derived and/or modified CDS sequence (opt5) from neuraminidase__InfluenzaA__AFN19065

SEQ ID NO: 214964 - RNA, 1410 nt, Artificial Sequence; identical to SEQ ID NO: 208810
  derived and/or modified CDS sequence (opt5) from neuraminidase__InfluenzaA__AFN19071

SEQ ID NO: 214965 - RNA, 1410 nt, Artificial Sequence; identical to SEQ ID NO: 208810
  derived and/or modified CDS sequence (opt5) from neuraminidase__InfluenzaA__AFN19077

SEQ ID NO: 214966 - RNA, 1410 nt, Artificial Sequence; identical to SEQ ID NO: 208810
  derived and/or modified CDS sequence (opt5) from neuraminidase__InfluenzaA__AFN19083

SEQ ID NO: 214967 - RNA, 1410 nt, Artificial Sequence; identical to SEQ ID NO: 208810
  derived and/or modified CDS sequence (opt5) from neuraminidase__InfluenzaA__AFN19089

SEQ ID NO: 214968 - RNA, 1410 nt, Artificial Sequence; identical to SEQ ID NO: 208810
  derived and/or modified CDS sequence (opt5) from neuraminidase__InfluenzaA__AFN19099

SEQ ID NO: 214969 - RNA, 1410 nt, Artificial Sequence; identical to SEQ ID NO: 208810
  derived and/or modified CDS sequence (opt5) from neuraminidase__InfluenzaA__AFN19105

SEQ ID NO: 214970 - RNA, 1410 nt, Artificial Sequence; identical to SEQ ID NO: 208810
  derived and/or modified CDS sequence (opt5) from neuraminidase__InfluenzaA__AFN19114

SEQ ID NO: 214971 - RNA, 1410 nt, Artificial Sequence; identical to SEQ ID NO: 208810
  derived and/or modified CDS sequence (opt5) from neuraminidase__InfluenzaA__AFN19126

SEQ ID NO: 214972 - RNA, 1410 nt, Artificial Sequence; identical to SEQ ID NO: 208810
  derived and/or modified CDS sequence (opt5) from neuraminidase__InfluenzaA__AFN19136

SEQ ID NO: 214973 - RNA, 1410 nt, Artificial Sequence; identical to SEQ ID NO: 208810
  derived and/or modified CDS sequence (opt5) from neuraminidase__InfluenzaA__AFN19146

SEQ ID NO: 214974 - RNA, 1410 nt, Artificial Sequence; identical to SEQ ID NO: 208810
  derived and/or modified CDS sequence (opt5) from neuraminidase__InfluenzaA__AFN19156

SEQ ID NO: 214975 - RNA, 1410 nt, Artificial Sequence; identical to SEQ ID NO: 208810
  derived and/or modified CDS sequence (opt5) from neuraminidase__InfluenzaA__AFN19166

SEQ ID NO: 214976 - RNA, 1410 nt, Artificial Sequence; identical to SEQ ID NO: 208810
  derived and/or modified CDS sequence (opt5) from neuraminidase__InfluenzaA__AFN19186

SEQ ID NO: 214977 - RNA, 1410 nt, Artificial Sequence; identical to SEQ ID NO: 214443
  derived and/or modified CDS sequence (opt5) from neuraminidase__InfluenzaA__AFN19196

SEQ ID NO: 214978 - RNA, 1410 nt, Artificial Sequence; identical to SEQ ID NO: 208810
  derived and/or modified CDS sequence (opt5) from neuraminidase__InfluenzaA__AFN19205

SEQ ID NO: 214979 - RNA, 1410 nt, Artificial Sequence; identical to SEQ ID NO: 208810
  derived and/or modified CDS sequence (opt5) from neuraminidase__InfluenzaA__AFN19215

SEQ ID NO: 214980 - RNA, 1410 nt, Artificial Sequence; identical to SEQ ID NO: 208810
  derived and/or modified CDS sequence (opt5) from neuraminidase__InfluenzaA__AFN19225

SEQ ID NO: 214981 - RNA, 1410 nt, Artificial Sequence; identical to SEQ ID NO: 208810
  derived and/or modified CDS sequence (opt5) from neuraminidase__InfluenzaA__AFN19235

SEQ ID NO: 214982 - RNA, 1410 nt, Artificial Sequence; identical to SEQ ID NO: 208810
  derived and/or modified CDS sequence (opt5) from neuraminidase__InfluenzaA__AFN19245

SEQ ID NO: 214983 - RNA, 1410 nt, Artificial Sequence; identical to SEQ ID NO: 208810
  derived and/or modified CDS sequence (opt5) from neuraminidase__InfluenzaA__AFN19251

SEQ ID NO: 214984 - RNA, 1410 nt, Artificial Sequence; identical to SEQ ID NO: 208810
  derived and/or modified CDS sequence (opt5) from neuraminidase__InfluenzaA__AFN19261

SEQ ID NO: 214985 - RNA, 1410 nt, Artificial Sequence; identical to SEQ ID NO: 214443
  derived and/or modified CDS sequence (opt5) from neuraminidase__InfluenzaA__AFN19271

SEQ ID NO: 214986 - RNA, 1410 nt, Artificial Sequence; identical to SEQ ID NO: 210541
  derived and/or modified CDS sequence (opt5) from neuraminidase__InfluenzaA__AFN19281

SEQ ID NO: 214987 - RNA, 1410 nt, Artificial Sequence
  derived and/or modified CDS sequence (opt5) from neuraminidase__InfluenzaA__AFN19287
augaaccccaaucagaagaucauuaccaucggcagcgugugcaugacaauugggauggccaaccugauccuccaaauuggaaauaucaucuccauuuggaucucucacagcauucagcugggcaaccagaaucagaucgagacguguaaccaauccgucauuaccuacgaaaauaacacauggguuaaucagaccuaugugaacaucucuaauacaaacuucgcugccgggcagagcguggucuccgugaaacuugcgggaaauucuagccugugcccuguuuccggcugggcuauuuacagcaaggacaacucuaucagaaucggguccaaaggagauguguuugucauucgggagccguucaucagcuguucuccccucgaaugccgcaccuuuuuccugacacagggcgcccuucuguccgacaagcauagcaauggcaccauuaaagauagaucuccuuaucggacgcucauguccugucccaucggggaggugccuagccccuacaacucccgcuuugaaucuguugccuggagcgcuuccgccugccacgacggaauuaacuggcugaccaucggcaucagcgggccugauaauggagcuguggccguccugaaguauaacggcauuaucacagacaccauuaagucuuggagaaauaacauccuccggacacaagaguccgagugugcgugcgugaaugggagcuguuucaccgugaugacggauggaccgucugacggccaggccagcuacaaaauuuuucgcaucgaaaagggcaaaaucgucaaguccguugagaugaacgcucccaauuaucauuacgaagagugcucuuguuacccugauagcuccgagauuacaugcgugugcagagacaacuggcacgggagcaaucggcccugggugucuuucaaccagaaucuggaauaucagaucggauacauuuguuccggcaucuuuggggauaacccucgccccaaugacaaaaccggaagcugcggcccggucucuuccaacggggccaauggagugaagggcuucagcuuuaaguauggcaacgggguuuggauuggaagaacaaaauccaucucuagccggaacggcuucgagaugauuugggauccuaauggguggaccggaaccgacaacaauuuuuccaucaagcaagacaucgugggcauuaacgaauggucuggguacagcggcuccuucguccagcaucccgagcuuacaggacuggauuguauccgcccuugcuucuggguggaacucauuagaggccggcccaaagagaauacgaucuggaccagcgggucuuccauuagcuuuuguggaguuaacucugacacagugggcugguccuggcccgauggggcugagcugccuuucaccaucgacaaguga

SEQ ID NO: 214988 - RNA, 1410 nt, Artificial Sequence; identical to SEQ ID NO: 208810
  derived and/or modified CDS sequence (opt5) from neuraminidase__InfluenzaA__AFN19297

SEQ ID NO: 214989 - RNA, 1410 nt, Artificial Sequence; identical to SEQ ID NO: 208810
  derived and/or modified CDS sequence (opt5) from neuraminidase__InfluenzaA__AFN19307

SEQ ID NO: 214990 - RNA, 1410 nt, Artificial Sequence; identical to SEQ ID NO: 208810
  derived and/or modified CDS sequence (opt5) from neuraminidase__InfluenzaA__AFN19317

SEQ ID NO: 214991 - RNA, 1410 nt, Artificial Sequence; identical to SEQ ID NO: 214443
  derived and/or modified CDS sequence (opt5) from neuraminidase__InfluenzaA__AFN19327

SEQ ID NO: 214992 - RNA, 1410 nt, Artificial Sequence; identical to SEQ ID NO: 208810
  derived and/or modified CDS sequence (opt5) from neuraminidase__InfluenzaA__AFN19346

SEQ ID NO: 214993 - RNA, 1410 nt, Artificial Sequence
  derived and/or modified CDS sequence (opt5) from neuraminidase__InfluenzaA__AFN19352
augaaccccaaucagaagaucauuaccaucggcagcgugucccugacaauuucuacgaucugcuucuuuaugcaaauugccauccucaucaccacagucacccugcacuucaaacaguacgaguuuaacagcccuccgaauaaccagguuaugcuuugugaacccacaauuaucgagagaaauaugaccgaaauuguguaucugacaaacaccacgaucgagaaggaaauuugcccuaaacccgcugaguaccggaauugguccaagccucagugugacaucaccggguucgcccccuuuucuaaagauaacagcauucgccucuccgcgggaggcgacaucugggugacaagagagccuuaugucucuugcgauccggacaaguguuaccaauucgcucuggggcagggaaccacacuuaauaacgugcauagcaauaacaccguucgggaucgcacgcccuauagaacacugcucaugaaugaacugggcgugccuuuucaccuggggaccaagcaggucugcaucgccugguccucuagcuccugucaugacggaaaagccuggcuccacgugugcauuacaggcgaugacaagaacgcuaccgccagcuucaucuacaauggccggcugguugauucuguggucuccuggagcaaagagauucuucgcacccaggaaucugagugugugugcaucaacgggacauguacgguggucaugaccgacggauccgcuagcggcaaggccgauacaaaaauucuguuuaucgaggaagggaagaucguucauaccuccacacucucuggaagcgcgcaacacguggaggaaugcuccugcuaucccagauacccuggcgugcggugugucugccgcgacaacuggaaggggagcaauagacccauuguggauaucaacauuaaagaccacucuaucguuuccagcuacguguguucuggacuggucggcgacaccccgcggaagaaugauagcuccucuagcggccauugccuugacccuaacaaugaggaagggggacacggcgugaaagggugggccuucgaugacggaaacgauguuuggaugggccgcacgauuaaugagacauccagacugggguaugagaccuuuaaggugaucgaaggauggagcaaccccaaaucuaagcuccagaucaaucggcaggucauuguggaccgcuccgauagaagcggcuacucuggcaucuucuccgucgaggggaaaagcuguauuaaccggugcuuuuauguggaacugaucagaggacgcaaggaggaaaccgagguucuguggacauccaauucuauuguggucuucuguggcaccagcgggacauacggaacgggcuccuggccugacggggcugaucucaaccugaugcccaucuga

SEQ ID NO: 214994 - RNA, 1410 nt, Artificial Sequence
  derived and/or modified CDS sequence (opt5) from neuraminidase__InfluenzaA__AFN19354
augaaccccaaucagaagaucauuaccaucggcagcgugucccugacaauuucuacgaucugcuucuuuaugcaaauugccauccucaucaccacagucacccugcacuucaaacaguacgaguuuaacagcccuccgaauaaccagguuaugcuuugugaacccacaauuaucgagagaaauauuaccgaaaucguguaucugacaaacaccacgauugagaaggaaaucugcccuaaacccgcugaguaccggaauugguccaagccucagugugacauuaccggguucgcccccuuuucuaaagauaacagcauccgccucuccgcgggaggcgacaucugggugacaagagagccuuaugucucuugcgauccggacaaguguuaccaauucgcucuggggcagggaaccacacuuaauaacgugcauagcaauaacaccguucgggaucgcacgcccuauagaacacugcucaugaaugaacugggcgugccuuuucaccuggggaccaagcaggucugcauugccugguccucuagcuccugucaugacggaaaagccuggcuccacgugugcaucacaggcgaugacaagaacgcuaccgccagcuucauuuacaauggccggcugguugauucuguggucuccuggagcaaagagauccuucgcacccaggaaucugagugugugugcauuaacgggacauguacgguggucaugaccgacggauccgcuagcggcaaggccgauacaaaaauccuguuuaucgaggaagggaagauuguucauaccuccacacucucuggaagcgcgcaacacguggaggaaugcuccugcuaucccagauacccuggcgugcggugugucugccgcgacaacuggaaggggagcaauagacccaucguggauauuaacaucaaagaccacucuauuguuuccagcuacguguguucuggacuggucggcgacaccccgcggaagaaugauagcuccucuagcucccauugccuugacccuaacaaugaggaaggcgggcacggagugaaaggcugggccuucgaugacgggaacgauguuuggaugggacgcacgaucaaugagacaagcagacugggcuaugagaccuuuaaggugaucgaaggguggucuaaccccaaauccaagcuccagauuaaucggcaggucaucguggaccgcggagauagaagcggcuacucuggcauuuucuccgucgaggggaaaagcuguaucaaccggugcuuuuauguggaacugauuagaggacgcaaggaggaaaccgagguucuguggacauccaauucuaucguggucuucuguggcaccagcgggacauacggaacgggcuccuggccugacggggcugaucucaaccugaugcccauuuga

SEQ ID NO: 214995 - RNA, 1410 nt, Artificial Sequence; identical to SEQ ID NO: 214994
  derived and/or modified CDS sequence (opt5) from neuraminidase__InfluenzaA__AFN19356

SEQ ID NO: 214996 - RNA, 1410 nt, Artificial Sequence; identical to SEQ ID NO: 214994
  derived and/or modified CDS sequence (opt5) from neuraminidase__InfluenzaA__AFN19358

SEQ ID NO: 214997 - RNA, 1410 nt, Artificial Sequence; identical to SEQ ID NO: 214994
  derived and/or modified CDS sequence (opt5) from neuraminidase__InfluenzaA__AFN19360

SEQ ID NO: 214998 - RNA, 1410 nt, Artificial Sequence
  derived and/or modified CDS sequence (opt5) from neuraminidase__InfluenzaA__AFN19362
augaaccccaaucagaagaucauuaccaucggcagcgugucccugacaauuucuacgaucugcuucuuuaugcaaauugccauccucaucaccacagucacccugcacuucaaacaguacgaguuuaacagcccuccgaauaaccagguuaugcuuugugaacccacaauuaucgagagaaauauuaccgaaaucguguaucugacaaacaccacgauugagaaggaaaucugcccuaaacccgcugaguaccggaauugguccaagccucagugugacauuaccggguucgcccccuuuucuaaagauaacagcauccgccucuccgcgggaggcgacaucugggugacaagagagccuuaugucucuugcgauccggacaaguguuaccaauucgcucuggggcagggaaccacacuuaauaacgugcauagcaauaacaccguucgggaucgcacgcccuauagaacacugcucaugaaugaacugggcgugccuuuucaccuggggaccaagcaggucugcauugccugguccucuagcuccugucaugacggaaaagccuggcuccacgugugcaucacaggcgaugacaagaacgcuaccgccagcuucauuuacaauggccggcugguugauucuguggucuccuggagcaaagagauccuucgcacccaggaaucugagugugugugcauuaacgggacauguacgguggucaugaccgacggauccgcuagcggcaaggccgauacaaaaauccuguuuaucgaggaagggaagauuguucauaccuccacacucucuggaagcgcgcaacacguggaggaaugcuccugcuaucccagauacccuggcgugcggugugucugccgcgacaacuggaaggggagcaauagacccaucguggauauuaacaucaaagaccacucuauuguuuccagcuacguguguucuggacuggucggcgacaccccgcggaagaaugauagcuccucuagcucccauugccuugacccuaacaaugaggaaggcgggcacggagugaaaggcugggccuucgaugacgggaacgauguuuggaugggacgcacgaucaaugagacaagcagacugggcuaugagaccuuuaaggugaucgaaggguggucuaaccccaaauccaagcuccagauuaaucggcaggucaucguggaccgcggagauagaagcggcuacucuggcauuuucuccgucgaggggaaacgguguaucaacagaugcuuuuauguggaacugauucgcggacggaaggaggaaaccgagguucuguggacaagcaauuccaucguggucuucuguggcaccucugggacauacggaacgggcagcuggccugacggggcugaucucaaccugaugcccauuuga

SEQ ID NO: 214999 - RNA, 1410 nt, Artificial Sequence; identical to SEQ ID NO: 214994
  derived and/or modified CDS sequence (opt5) from neuraminidase__InfluenzaA__AFN19364

SEQ ID NO: 215000 - RNA, 1410 nt, Artificial Sequence; identical to SEQ ID NO: 211590
  derived and/or modified CDS sequence (opt5) from neuraminidase__InfluenzaA__AFN19366

SEQ ID NO: 215001 - RNA, 1410 nt, Artificial Sequence; identical to SEQ ID NO: 214994
  derived and/or modified CDS sequence (opt5) from neuraminidase__InfluenzaA__AFN19370

SEQ ID NO: 215002 - RNA, 1410 nt, Artificial Sequence
  derived and/or modified CDS sequence (opt5) from neuraminidase__InfluenzaA__AFN19374
augaaccccaaucagaagaucauuaccaucggcagcgugucccugacaauuucuacgaucugcuucuuuaugcaaauugccauccucaucaccacagucacccugcacuucaaacaguacgaguuuaacagcccuccgaauaaccagguuaugcuuugugaacccacaauuaucgagagaaauauuaccgaaaucguguaucugacaaacaccacgauugagaaggaaaucugcccuaaacccgcugaguaccggaauugguccaagccucagugugggauuaccggauucgcccccuuuucuaaagacaacagcauccgccucuccgcgggcggggauaucugggugacaagagagccuuaugucucuugcgacccggauaaguguuaccaauucgcucugggacagggcaccacacuuaauaacgugcauagcaauaacaccguucgggaccgcacgcccuauagaacacugcucaugaaugaacugggggugccuuuucaccugggaaccaagcaggucugcauugccugguccucuagcuccugucaugauggcaaagccuggcuccacgugugcaucacaggcgacgauaagaacgcuaccgccagcuucauuuacaaugggcggcugguugacucuguggucuccuggagcaaagagauccuucgcacccaggaaucugagugugugugcauuaacggaacauguacgguggucaugaccgauggcuccgcuagcgggaaggccgacacaaaaauccuguuuaucaaggagggaaagauuguucauaccuccacacucucuggcagcgcgcaacacguggaagagugcuccugcuaucccagauacccuggggugcggugugucugccgcgauaacuggaaaggaagcaauagacccaucguggacauuaacaucaaggaucacucuauuguuuccagcuacguguguucuggccuggucggcgacaccccgcggaaaacggacagcuccucuagcucccauugccuugauccuaauaacgaagaagggggacacggcgugaaggggugggccuucgacgauggaaaugacguuuggaugggccgcacaaucaacgagaccagcagacugggguaugagaccuuuaaagugaucgagggauggucuaaucccaaguccaaacuccagauuaaccggcaggucaucguggaucgcggcgacagaagcggcuacucugggauuuucuccgucgaaggaaagagcuguaucaaucggugcuuuuauguggagcugauuagaggccgcaaggaagagacagaaguucuguggaccuccaacucuaucguggucuucugugggacaagcggaacguacggcaccggguccuggccugauggcgcugaccucaaucugaugcccauuuga

SEQ ID NO: 215003 - RNA, 1410 nt, Artificial Sequence; identical to SEQ ID NO: 214994
  derived and/or modified CDS sequence (opt5) from neuraminidase__InfluenzaA__AFN19376

SEQ ID NO: 215004 - RNA, 1410 nt, Artificial Sequence; identical to SEQ ID NO: 214994
  derived and/or modified CDS sequence (opt5) from neuraminidase__InfluenzaA__AFN19378

SEQ ID NO: 215005 - RNA, 1410 nt, Artificial Sequence
  derived and/or modified CDS sequence (opt5) from neuraminidase__InfluenzaA__AFN19380
augaaccccaaucagaagaucauuaccaucggcagcgugucccugacaauuucuacgaucugcuucuuuaugcaaauugccauccucaucaccacagucacccugcacuucaaacaguacgaguuuaacagcccuccgaauaaccagguuaugcuuugugaacccacaauuaucgagagaaauauuaccgaaaucguguaucugacaaacaccacgauugagaaggaaaucugcccuaaacccuccgaguaccggaauuggucuaagccucagugugacauuaccggguucgcucccuuuagcaaagauaacuccauccgccucucugccggaggcgacaucugggugacaagagagccuuaugucagcugcgauccggacaaguguuaccaauucgcgcuggggcagggaaccacacuuaauaacgugcauuccaauaacaccguucgggaucgcacgcccuauagaacacugcucaugaaugaacugggcgugccuuuucaccuggggaccaagcaggucugcauugcuuggucuagcuccagcugucaugacggaaaagccuggcuccacgugugcaucacaggcgaugacaagaacgccaccgcuucuuucauuuacaauggccggcugguugauuccguggucagcuggucuaaagagauccuucgcacccaggaauccgagugugugugcauuaacgggacauguacgguggucaugaccgacggaagcgccuccggcaaggcugauacaaaaauccuguuuaucgaggaagggaagauuguucauaccucuacacucagcggauccgcccaacacguggaggaaugcagcugcuaucccagauacccuggcgugcggugugucugccgcgacaacuggaaggggucuaauagacccaucguggauauuaacaucaaagaccacuccauuguuagcucuuacguguguagcggacuggucggcgacaccccgcggaagaaugauuccucuagcuccagccauugccuugacccuaacaaugaggaaggcgggcacggagugaaaggcugggcguucgaugacgggaacgauguuuggaugggacgcacgaucaaugagacaucuagacugggcuaugagaccuuuaaggugaucgaagggugguccaaccccaaaagcaagcuccagauuaaucggcaggucaucguggaccgcggagauagaucuggcuacuccggcauuuucagcgucgaggggaaauccuguaucaaccggugcuuuuauguggaacugauuagaggacgcaaggaggaaaccgagguucuguggacaucuaauagcaucguggucuucuguggcaccuccgggacauacggaacgggcucuuggccugacggggccgaucucaaccugaugcccauuuga

SEQ ID NO: 215006 - RNA, 1410 nt, Artificial Sequence; identical to SEQ ID NO: 215002
  derived and/or modified CDS sequence (opt5) from neuraminidase__InfluenzaA__AFN19382

SEQ ID NO: 215007 - RNA, 1410 nt, Artificial Sequence; identical to SEQ ID NO: 214994
  derived and/or modified CDS sequence (opt5) from neuraminidase__InfluenzaA__AFN19384

SEQ ID NO: 215008 - RNA, 1410 nt, Artificial Sequence
  derived and/or modified CDS sequence (opt5) from neuraminidase__InfluenzaA__AFN19386
augaaccccaaucagaagaucauuaccaucggcagcgugucccugacaauuucuacgaucugcuucuuuaugcaaauugccauccucaucaccacagucacccugcacuucaaacaguacgaguuuaacagcccuccgaauaaccagguuaugcuuugugaacccacaauuaucgagagaaauauuaccgaaaucguguaucugacaaacaccacgauugagaaggaaaucugcccuaaacccgcugaguaccggaauugguccaagccucagugugacauuaccggguucgcccccuuuucuaaagauaacagcauccgccucuccgcgggaggcgacaucugggugacaagagagccuuaugucucuugcgauccggacaaguguuaccaauucgcucuggggcagggaaccacacuuaauaacgugcauagcaauaacaccguucgggaucgcacgcccuauagaacacugcucaugaaugaacugggcgugccuuuucaccuggggaccaagcaggucugcauugccugguccucuagcuccugucaugacggaaaagccuggcuccacgugugcaucacaggcgaugacaagaacgcuaccgccagcuucauuuacaauggccggcugguugauucuguggucuccuggagcaaagagauccuucgcacccaggaaucugagugugugugcauuaacgggacauguacgguggucaugaccgacggauccgcuagcggcaaggccgauacaaaaauccuguuuaucgaggaagggaagauuguucauaccuccacacucucuggaagcgcgcaacacguggaggaaugcuccugcuaucccagauacccuggcgugcggugugucugccgcgacaacuggaaggggagcaauagacccaucguggauauuaacaucaaagaccacucuauuguuuccagcuacguguguucuggacuggucggcgacaccccgcggaagaaugauagcuccucuagcucccauugccuugacccuaacaaugaggaaggcgggcacggagugaaaggcugggccuucgaugacgggaacgauguuuggaugggacgcacgaucaaugagacaagcagacugggcuaugagaccuuuaaggugaucgaaggguggucuaaccccaaauccaagcuccagauuaaucggcagaucauugucgaccgcggagauagaagcggcuacucuggcaucuucuccguggaggggaaaagcuguauuaaccggugcuuuuaugucgaacugaucagaggacgcaaggaggaaaccgaggugcuguggacauccaauucuauuguuguguucuguggcaccagcgggacauacggaacgggcuccuggccugacggggcugaucucaaccugaugcccaucuga

SEQ ID NO: 215009 - RNA, 1410 nt, Artificial Sequence; identical to SEQ ID NO: 214994
  derived and/or modified CDS sequence (opt5) from neuraminidase__InfluenzaA__AFN19388

SEQ ID NO: 215010 - RNA, 1410 nt, Artificial Sequence; identical to SEQ ID NO: 214994
  derived and/or modified CDS sequence (opt5) from neuraminidase__InfluenzaA__AFN19390

SEQ ID NO: 215011 - RNA, 1410 nt, Artificial Sequence
  derived and/or modified CDS sequence (opt5) from neuraminidase__InfluenzaA__AFN19392
augaaccccaaucagaagaucauuaccaucggcagcgugucccugacaauuucuacgaucugcuucuuuaugcaaauugccguccucaucaccacaguuacccugcacuucaaacaguacgaguuuaacagcccuccgaauaaccaggugaugcuuugugaacccacaaucauugagagaaauaucaccgaaauuguguaucugacaaacaccacgaucgagaaggaaauuugcccuaaacccgcugaguaccggaauugguccaagccucagugugacaucaccggguucgcccccuuuucuaaagauaacagcauucgccucuccgcgggaggcgacaucugggucacaagagagccuuaugugucuugcgauccggacaaguguuaccaauucgcucuggggcagggaaccacacuuaauaacguucauagcaauaacaccgugcgggaucgcacgcccuauagaacacugcucaugaaugaacugggcgucccuuuucaccuggggaccaaacaggugugcaucgccugguccucuagcuccugucaugacggaaaggccuggcuccacguuugcauuacaggcgaugacaagaacgcuaccgccagcuucaucuacaauggccggcugguggauucugucguguccuggagcaaagagauucuucgcacccaggaaucugagugugugugcaucaacgggacauguacggucguuaugaccgacggauccgcuagcggcaaggccgauacaaaaauucuguuuaucgaggaagggaagaucgugcauaccuccacacucucuggaagcgcgcaacacguggaggaaugcuccugcuaucccagauacccuggcguccggugugugugccgcgacaacuggaaggggagcaauagacccauuguugauaucaacauuaaagaccacucuaucguguccagcuacgucuguucuggacuggugggcgacaccccgcggaagaaugauagcuccucuagcucccauugccuugacccuaacaaugaggaaggcgggcacggaguuaaaggcugggccuucgaugacgggaacgauguguggaugggacgcacgauuaaugagacaagcagacugggcuaugagaccuuuaaggucaucgaaggguggucuaaccccaaauccaagcuccagaucaaucgccaggugauugucgaccggggagauagaagcggcuacucuggcaucuucuccguggaggggaaaagcuguauuaaccggugcuuuuauguugaacugaucagaggacgcaaggaggaaaccgaggugcuguggacauccaauucuauugucguguucuguggcaccagcgggacauacggaacgggcuccuggccugacggggcugaucucaaccugaugcccaucuga

SEQ ID NO: 215012 - RNA, 1410 nt, Artificial Sequence; identical to SEQ ID NO: 213859
  derived and/or modified CDS sequence (opt5) from neuraminidase__InfluenzaA__AFN19394

SEQ ID NO: 215013 - RNA, 1410 nt, Artificial Sequence
  derived and/or modified CDS sequence (opt5) from neuraminidase__InfluenzaA__AFN19396
augaaccccaaucagaagaucauuaccaucggcagcgugucccugacaauuucuacgaucugcuucuuuaugcaaauugccauccucaucaccacagucacccugcacuucaaacaguacgaguuuaacagcccuccgaauaaccagguuaugcuuugugaacccacaauuaucgagagaaauauuaccgaaaucguguaucugacaaacaccacgauugagaaggaaaucugcccuaaacucgcugaguaccggaauugguccaagccccagugugacauuaccggguucgccccuuuuucuaaagauaacagcauccgccuguccgcgggaggcgacaucugggugacaagagagcccuaugucucuugcgauccugacaaguguuaccaauucgcucuugggcagggaaccacacugaauaacgugcauagcaauaacaccguucgggaucgcacgccguauagaacacuccugaugaaugaacugggcgugcccuuucaccucgggaccaagcaggucugcauugccugguccucuagcuccugucaugacggaaaagccuggcugcacgugugcaucacaggcgaugacaagaacgcuaccgccagcuucauuuacaauggccggcuuguugauucuguggucuccuggagcaaagacauccugcgcacccaggagucugaaugugugugcauuaacgggacaugugcuguggucaugacggauggauccgccagcggcaaggcggacaccaaaauccucuuuaucgaggaggggaagauuguucauacauccacccugucuggaagcgcccaacacguggaagagugcuccugcuauccuagauaccccggcgugcggugugucugccgcgauaacuggaaggggagcaauagaccuaucguggacauuaacaucaaagaccacucuauuguuuccagcuacguguguucuggacuugucggcgauacaccccggaagaaugacagcuccucuagcucccauugccuggauccgaacaaugaagagggcgggcacggagugaaaggcugggcuuucgacgaugggaacgacguuuggaugggacgcaccaucaaugaaacgagcagacucggcuaugagacauuuaaggugaucgagggguggucuaacccuaaauccaagcugcagauuaaucggcaggucaucguggaucgcggaaacagaagcggcuacucuggcauuuucuccgucgaagggaaaaauuguaucaaccggugcuuuuauguggagcugauuagaggacgcaaggaagagaccgaaguucucuggaccagcaauuccaucguggucuucuguggcacaucugggaccuacggaacaggcagcuggcccgacggggccgaucugaaccuuaugccuauuuga

SEQ ID NO: 215014 - RNA, 1410 nt, Artificial Sequence
  derived and/or modified CDS sequence (opt5) from neuraminidase__InfluenzaA__AFN19398
augaaccccaaucagaagaucauuaccaucggcagcgugucccugacaauuucuacgaucugcuucuuuaugcaaauugccauccucaucaccacagucacccugcacuucaaacaguacgaguuuaacagcccuccgaauaaccagguuaugcuuugugaacccacaauuaucgagagaaauauuaccgaaaucguguaucugacaaacaccacgauugagaaggaaaucugcccuaaacccgcugaguaccggaauugguccaagccucagugugacauuaccggguucgcccccuuuucuaaagauaacagcauccgccucuccgcgggaggcgacaucugggugacaagagagccuuaugucucuugcgauccggacaaguguuaccaauucgcucuggggcagggaaccacacuuaauaacgugcauagcaauaacaccguucgggaucgcacgcccuauagaacacugcucaugaaugaacugggcgugccuuuucaccuggggaccaagcaggucugcauugccugguccagcagcuccugucaugacggaaaagccuggcuccacgugugcaucacaggcgaugacaagaacgcuaccgccagcuucauuuacaauggccggcugguugauucuguggucuccuggagcaaagagauccuucgcacccaggaaucugagugugugugcauuaacgggacauguacgguggucaugaccgacggauccgcuagcggcaaggccgauacaaaaauccuguuuaucgaggaagggaagauuguucauaccuccacacucucuggaagcgcgcaacacguggaggaaugcuccugcuaucccagauacccuggcgugcggugugucugccgcgacaacuggagagggagcaaucggcccaucguggauauuaacaucaaggaccacucuauuguuuccagcuacguguguucuggacuggucggcgacaccccgcgcaaaaaugauagcuccucuagcucccauugccuugacccuaacaaugaggaaggcgggcacggagugaagggcugggccuucgaugacgggaacgauguuuggaugggaagaacgaucaaugagacaagccggcugggcuaugagaccuuuaaagugaucgaaggguggucuaaccccaaguccaaacuccagauuaaucgccaggucaucguggacagaggagaucggagcggcuacucuggcauuuucuccgucgaggggaagucuuguaucaacagaugcuuuuauguggaacugauucgcggacggaaagaggaaaccgagguucuguggacauccaauucuaucguggucuucuguggcaccagcgggacauacggaacgggcuccuggccugacggggcugaucucaaccugaugcccauuuga

SEQ ID NO: 215015 - RNA, 1410 nt, Artificial Sequence
  derived and/or modified CDS sequence (opt5) from neuraminidase__InfluenzaA__AFN19400
augaaccccaaucagaagaucauuaccaucggcagcgugucccugacaauuucuacgaucugcuucuuuaugcaaauugccauccucaucaccacagucacccugcacuucaaacaguacgaguuuaacagcccuccgaauaaccagguuaugcuuugugaacccacaauuaucgagagaaauauuaccgaaaucguguaucugacaaacaccacgauugagaaggaaaucugcccuaaacccuccgaguaccggaauuggucuaagccucagugugacauuaccggguucgcucccuuuagcaaagauaacuccauccgccucucugacggaggcgauaucugggugacaagagagccuuaugucagcugcgacccggauaaguguuaccaauucgcccuggggcagggaaccacacuuaauaacgugcauuccaauaacaccguucgggaccgcacgcccuauagaacacugcucaugaaugaacugggcgugccuuuucaccuggggaccaagcaggucugcauugcguggucuagcuccagcugucaugauggaaaggcuuggcuccacgugugcaucacaggcgacgauaaaaacgccaccgccucuuucauuuacaauggccggcugguugacuccguggucagcuggucuaaagagauccuucgcacccaggaauccgagugugugugcauuaacgggacauguacgguggucaugaccgauggaagcgcuuccggcaaggccgacacaaaaauccuguuuaucgaggaagggaagauuguucauaccucuacacucagcggauccgcucaacacguggaggaaugcagcugcuaucccagauacccuggcgugcggugugucugccgcgauaacuggaaggggucuaauagacccaucguggacauuaacaucaaagaccacuccauuguuagcucuuacguguguagcggacuggucggcgauaccccgcggaagaaugacuccucuagcuccagccauugccuugauccuaacaaugaggaaggcgggcacggagugaaaggcugggccuucgacgaugggaacgacguuuggaugggacgcacgaucaaugagacaucuagacugggcuaugagaccuuuaaggugaucgaagggugguccaaccccaaaagcaagcuccagauuaaucggcaggucaucguggaucgcggagacagaucuggcuacuccggcauuuucagcgucgaggggaaauccuguaucaaccggugcuuuuauguggaacugauuagaggacgcaaggaggaaaccgagguucuguggacaucuaauagcaucguggucuucuguggcaccuccgggacauacggaacgggcucuuggccugauggggcggaccucaaccugaugcccauuuga

SEQ ID NO: 215016 - RNA, 1410 nt, Artificial Sequence; identical to SEQ ID NO: 214994
  derived and/or modified CDS sequence (opt5) from neuraminidase__InfluenzaA__AFN19402

SEQ ID NO: 215017 - RNA, 1410 nt, Artificial Sequence; identical to SEQ ID NO: 214994
  derived and/or modified CDS sequence (opt5) from neuraminidase__InfluenzaA__AFN19404

SEQ ID NO: 215018 - RNA, 1410 nt, Artificial Sequence; identical to SEQ ID NO: 214994
  derived and/or modified CDS sequence (opt5) from neuraminidase__InfluenzaA__AFN19406

SEQ ID NO: 215019 - RNA, 1410 nt, Artificial Sequence; identical to SEQ ID NO: 214994
  derived and/or modified CDS sequence (opt5) from neuraminidase__InfluenzaA__AFN19410

SEQ ID NO: 215020 - RNA, 1410 nt, Artificial Sequence; identical to SEQ ID NO: 214994
  derived and/or modified CDS sequence (opt5) from neuraminidase__InfluenzaA__AFN19412

SEQ ID NO: 215021 - RNA, 1410 nt, Artificial Sequence; identical to SEQ ID NO: 214994
  derived and/or modified CDS sequence (opt5) from neuraminidase__InfluenzaA__AFN19414

SEQ ID NO: 215022 - RNA, 1410 nt, Artificial Sequence; identical to SEQ ID NO: 214994
  derived and/or modified CDS sequence (opt5) from neuraminidase__InfluenzaA__AFN19416

SEQ ID NO: 215023 - RNA, 1410 nt, Artificial Sequence
  derived and/or modified CDS sequence (opt5) from neuraminidase__InfluenzaA__AFN19418
augaaccccaaucagaagaucauuaccaucggcagcgugucccugacaauuucuacgaucugcuucuuuaugcaaauugccauccucaucaccacagucacccugcacuucaaacaguacgaguuuaacagcccuccgaauaaccagguuaugcuuugugaacccacaauuaucgagagaaauauuaccgaaaucguguaucugacaaacaccacgauugagaaggaaaucugcccuaaacccgcugaguaccggaauugguccaagccucagugugacauuaccggguucgcccccuuuucuaaagauaacagcauccgccucuccgcgggaggcgacaucugggugacaagagagccuuaugucucuugcgauccggacaaguguuaccaauucgcucuggggcagggaaccacacuuaauaacgugcauagcaauaacaccguucgggaucgcacgcccuauagaacacugcucaugaaugaacugggcgugccuuuucaccuggggaccaagcaggucugcauugccugguccagcagcuccugucaugacggaaaagccuggcuccacgugugcaucacaggcgaugacaagaacgcuaccgccagcuucauuuacaauggccggcugguugauucuguggucuccuggagcaaagagauccuucgcacccaggaaucugagugugugugcauuaacgggacauguacgguggucaugaccgacggauccgcuagcggcagagccgauacaaagauccuguuuaucgaggaagggaaaauuguucauaccuccacacucucuggaagcgcgcaacacguggaggaaugcuccugcuauccccgguacccuggcgugcgcugugucugcagagacaacuggaaggggagcaaucggcccaucguggauauuaacaucaaggaccacucuauuguuuccagcuacguguguucuggacuggucggcgacaccccgcgcaaaaaugauagcuccucuagcucccauugccuugacccuaacaaugaggaaggcgggcacggagugaagggcugggccuucgaugacgggaacgauguuuggaugggaagaacgaucaaugagacaagccggcugggcuaugagaccuuuaaagugaucgaaggguggucuaaccccaaguccaaacuccagauuaaucgccaggucaucguggacagaggagaucggagcggcuacucuggcauuuucuccgucgaggggaagucuuguaucaacagaugcuuuuauguggaacugauucgcggacggaaagaggaaaccgagguucuguggacauccaauucuaucguggucuucuguggcaccagcgggacauacggaacgggcuccuggccugacggggcugaucucaaccugaugcccauuuga

SEQ ID NO: 215024 - RNA, 1410 nt, Artificial Sequence
  derived and/or modified CDS sequence (opt5) from neuraminidase__InfluenzaA__AFN19420
augaaccccaaucagaagaucauuaccaucggcagcgugucccugacaauuucuacgaucugcuucuuuaugcaaauugccauccucaucaccacagucacccugcacuucaaacaguacgaguuuaacagcccuccgaauaaccagguuaugcuuugugaacccacaauuaucgagagaaauaugaccgaaauuguguaucugacaaacaccacgaucgagaaggaaauuugcccuaaacccgcugaguaccggaauugguccaagccucagugugacaucaccggguucgcccccuuuucuaaagauaacagcauucgccucuccgcgggaggcgacaucugggugacaagagagccuuaugucucuugcgauccggacaaguguuaccaauucgcucuggggcagggaaccacacuuaauaacgugcauagcaauaacaccguucgggaucgcacgcccuauagaacacugcucaugaaugaacugggcgugccuuuucaccuggggaccaagcaggucugcaucgccugguccucuagcuccugucaugacggaaaagccuggcuccacgugugcauuacaggcgaugacaagaacgcuaccgccagcuucaucuacaauggccggcugguugauucuguggucuccuggagcaaagagauucuucgcacccaggaaucugagugugugugcaucaacgggacauguacgguggucaugaccgacggauccgcuagcggcaaggccgauacaaaaauucuguuuaucgaggaagggaagaucguucauaccuccacacucucuggaagcgcgcaacacguggaggaaugcuccugcuaucccagauacccuggcgugcggugugucugccgcgacaacuggaaggggagcaauagacccauuguggauaucaacauuaaagaccacucuaucguuuccagcuacguguguucuggacuggucggcgacaccccgcggaagaaugauagcuccucuagcucccauugccuugacccuaacaaugaggaaggcgggcacggagugaaaggcugggccuucgaugacgggaacgauguuuggaugggacgcacgauuaaugagacaagcagacugggcuaugagaccuuuaaggugaucgaaggguggucuaaccccaaauccaagcuccagaucaaucggcaggucauuguggaccgcggagauagaagcggcuacucuggcaucuucuccgucgaggggaaaagcuguauuaaccggugcuuuuauguggaacugaucagaggacgcaaggaggaaaccgagguucuguggacauccaauucuauuguggucuucuguggcaccagcgggacauacggaacgggcuccuggccugacggggcugaucucaaccugaugcccaucuga

SEQ ID NO: 215025 - RNA, 1410 nt, Artificial Sequence
  derived and/or modified CDS sequence (opt5) from neuraminidase__InfluenzaA__AFN19422
augaaccccaaucagaagaucauuaccaucggcagcgugucccugacaauuucuacgaucugcuucuuuaugcaaauugccauccucaucaccacagucacccugcacuucaaacaguacgaguuuaacagcccuccgaauaaccagguuaugcuuugugaacccacaauuaucgagagaaauauuaccgaaaucguguaucugacaaacaccacgauugagaaggaaaucugcccuaaacccgcugaguaccggaauugguccaagccucagugugggauuaccggauucgcccccuuuucuaaagacaacagcauccgccucuccgcgggcggggauaucugggugacaagagagccuuaugucucuugcgacccggauaaguguuaccaauucgcucugggacagggcaccacacuuaauaacgugcauagcaauaacaccguucgggaccgcacgcccuauagaacacugcucaugaaugaacugggggugccuuuucaccugggaaccaagcaggucugcauugccugguccucuagcuccugucaugauggcaaagccuggcuccacgugugcaucacaggcaacgacaagaaugcuaccgccagcuucauuuacaacgggcggcugguugauucuguggucuccuggagcaaagaggugcuucgcacccaggaaucugagugugugugcaucaacggaacauguacggucguuaugaccgacggcuccgcuagcgggaaggccgauacaaaaauucuguuuaucgaggaaggaaagaucgugcauaccuccacacucucuggcagcgcgcaacacguggaggaaugcuccugcuaucccagauacccugggguccggugugugugccgcgacaauuggaagggaagcaacagacccauuguugauaucaauauuaaagaccacucuaucguguccagcuacgucuguucuggccuggugggcgauaccccgcggaagaacgacagcuccucuagcucccauugccuugacccuaauaacgaggaagggggacacggcguuaaagggugggccuucgaugacggaaaugauguguggaugggccgcacgauuaacgagacaagcagacugggguaugagaccuuuaaggucaucgaaggauggucuaaucccaaauccaagcuccagaucaaccgccaggugauugucgaccggggcgauagaagcggcuacucugggaucuucuccguggagggaaaaagcuguauuaaucggugcuuuuauguugaacugaucagaggccgcaaggaggaaaccgaggugcuguggacauccaacucuauugucguguucugugggaccagcggaacauacggcacgggguccuggccugacggcgcugaucucaaucugaugcccaucuga

SEQ ID NO: 215026 - RNA, 1410 nt, Artificial Sequence
  derived and/or modified CDS sequence (opt5) from neuraminidase__InfluenzaA__AFN19426
augaaccccaaucagaagaucauuaccaucggcagcgugucccugacaauuucuacgaucugcuucuuuaugcaaauugccauccucaucaccacagucacccugcacuucaaacaguacgaguuuaacagcccuccgaauaaccagguuaugcuuugugaacccacaauuaucgagagaaauauuaccgaaaucguguaucugacaaacaccacgauugagaaggaaaucugcccuaaacccgcugaguaccggaauugguccaagccucagugugacauuaccggguucgcccccuuuucuaaagauaacagcauccgccucuccgcgggaggcgacaucugggugacaagagagccuuaugucucuugcgauccggacaaguguuaccaauucgcucuggggcagggaaccacacuuaauaacgugcauagcaauaacaccguucgggaucgcacgcccuauagaacacugcucaugaaugaacugggcgugccuuuucaccuggggaccaagcaggucugcauugccugguccagcagcuccugucaugacggaaaagccuggcuccacgugugcaucacaggcgaugacgagaacgcuaccgccagcuucauuuacaauggccggcugguugauucuguggucuccuggagcaaggaaauccuucgcacccaggagucugagugugugugcauuaacgggacauguacgguggucaugaccgacggauccgcuagcggcaaagccgauacaaagauccuguuuaucgaagaggggaaaauuguucauaccuccacacucucuggaagcgcgcaacacguggaagagugcuccugcuaucccagauacccuggcgugcggugugucugccgcgacaacuggaaggggagcaauagacccaucguggauauuaacaucaaggaccacucuauuguuuccagcuacguguguucuggacuggucggcgacaccccgcggaaaaaugauagcuccucuagcucccauugccuugacccuaacaaugaagagggcgggcacggagugaagggcugggccuucgaugacgggaacgauguuuggaugggacgcacgaucaaugagacaagcagacugggcuaugaaaccuuuaaagugaucgagggguggucuaaccccaaguccaaacuccagauuaaucggcaggucaucguggaccgcggagauagaagcggcuacucuggcauuuucuccgucgaagggaagucuuguaucaaccggugcuuuuauguggagcugauuagaggacgcaaagaagagaccgagguucuguggacauccaauucuaucguggucuucuguggcaccagcgggacauacggaacgggcuccuggccugacggggcugaucucaaccugaugcccauuuga

SEQ ID NO: 215027 - RNA, 1410 nt, Artificial Sequence; identical to SEQ ID NO: 214994
  derived and/or modified CDS sequence (opt5) from neuraminidase__InfluenzaA__AFN19428

SEQ ID NO: 215028 - RNA, 1410 nt, Artificial Sequence
  derived and/or modified CDS sequence (opt5) from neuraminidase__InfluenzaA__AFN19430
augaaccccaaucagaagaucauuaccaucggcagcgugucccugacaauuucuacgaucugcuucuuuaugcaaauugccauccucaucauuaccgucacacugcacuucaaacaguacgaguuuaacagcccuccgaauaaccagguuaugcuuugugaacccaccaucauugagagaaauaugacagaaaucguguaucugaccaacacaaccauugagaaggaaaucugcccuaaacccgcugaguaccggaauugguccaagccucagugugacauuacgggguucgcccccuuuucuaaagauaacagcauccgccucuccgcgggaggcgacaucugggugaccagagagccuuaugucucuugcgauccggacaaguguuaccaauucgcucuggggcagggaacaacccuuaauaacgugcauagcaauaacacaguucgggaucgcacccccuauagaacgcugcucaugaaugaacugggcgugccuuuucaccuggggacaaagcaggucugcauugccugguccucuagcuccugucaugacggaaaagccuggcuccacgugugcaucaccggcgaugacaagaacgcuacagccagcuucauuuacaauggccggcugguugauucuguggucuccuggagcaaagagauccuucgcacccaggaaucugagugugugugcauuaacgggaccuguacaguggucaugacggacggauccgcuagcggcaaggccgauaccaaaauccuguuuaucgaggaagggaagauuguucauacauccacccucucuggaagcgcgcaacacguggaggaaugcuccugcuaucccagauacccuggcgugcggugugucugccgcgacaacuggaaggggagcaauagacccaucguggauauuaacaucaaagaccacucuauuguuuccagcuacguguguucuggacuggucggcgacacaccgcggaagaaugauagcuccucuagcucccauugccuugacccuaacaaugaggaaggcgggcacggagugaaaggcugggccuucgaugacgggaacgauguuuggaugggacgcaccaucaaugagacgagcagacugggcuaugagacauuuaaggugaucgaaggguggucuaaccccaaauccaagcuccagauuaaucggcaggucaucguggaccgcagcgauagaucuggauacuccggcauuuucagcgucgagggcaaauccuguaucaaccggugcuuuuauguggaacugauuagagggcgcaaggaggaaaccgagguucuguggaccucuaauagcaucguggucuucuguggaacauccggcaccuacgggacaggaucuuggccugacggcgcugaucucaaccugaugcccauuuga

SEQ ID NO: 215029 - RNA, 1410 nt, Artificial Sequence
  derived and/or modified CDS sequence (opt5) from neuraminidase__InfluenzaA__AFN19432
augaaccccaaucagaagaucauuaccaucggcagcgugucccugacaauuucuacgaucugcuucuuuaugcaaauugccauccucaucaccacagucacccugcacuucaaacaguacgaguuuaacagcccuccgaauaaccagguuaugcuuugugaacccacaauuaucgagagaaauauuaccgaaaucguguaucugacaaacaccacgauugagaaggaaaucugcccuaaacccgcugaguaccggaauugguccaagccucagugugacauuaccggguucgcccccuuuucuaaagauaacagcauccgccucuccgcgggaggcgacaucugggugacaagagagccuuaugucucuugcgauccggacaaguguuaccaauucgcucuggggcagggaaccacacuuaauaacgugcauagcaauaacaccguucgggaucgcacgccccacagaacacugcucaugaaugaacugggcgugccuuuucaucuggggaccaagcaggucugcauugccugguccucuagcuccugucacgacggaaaagccuggcuccaugugugcaucacaggcgaugacaagaacgcuaccgccagcuucauuuauaauggccggcugguugauucuguggucuccuggagcaaagagauccuucgcacccaggaaucugagugugugugcauuaacgggacauguacgguggucaugaccgacggauccgcuagcggcaaggccgauacaaaaauccuguuuaucgaggaagggaagauuguucacaccuccacacucucuggaagcgcgcaacacguggaggaaugcuccugcuaccccagauauccuggcgugcggugugucugccgcgacaacuggaaggggagcaauagacccaucguggauauuaacaucaaagaccauucuauuguuuccagcuacguguguucuggacuggucggcgacaccccgcggaagaaugauagcuccucuagcucccacugccuugacccuaacaaugaggaaggcgggcauggagugaaaggcugggccuucgaugacgggaacgauguuuggaugggacgcacgaucaaugagacaagcagacugggcuacgagaccuuuaaggugaucgaaggguggucuaaccccaaauccaagcuccagauuaaucggcaggucaucguggaccgcggagauagaagcggcuauucuggcauuuucuccgucgaggggaaaagcuguaucaaccggugcuuuuacguggaacugauuagaggacgcaaggaggaaaccgagguucuguggacauccaauucuaucguggucuucuguggcaccagcgggacauauggaacgggcuccuggccugacggggcugaucucaaccugaugcccauuuga

SEQ ID NO: 215030 - RNA, 1410 nt, Artificial Sequence
  derived and/or modified CDS sequence (opt5) from neuraminidase__InfluenzaA__AFN19434
augaaccccaaucagaagaucauuaccaucggcagcgugucccugacaauuucuacgaucugcuucuuuaugcaaauugccauccucaucaccacagucacccugcacuucaaacaguacgaguuuaacagcccuccgaauaaccagguuaugcuuugugaacccacaauuaucgagagaaauaugaccgaaauuguguaucugacaaacaccacgaucgagaaggaaauuugcccuaaacccgcugaguaccggaauugguccaagccucagugugacaucaccggguucgcccccuuuucuaaagauaacagcauucgccucuccgcgggaggcgacaucugggugacaagagagccuuaugucucuugcgauccggacaaguguuaccaauucgcucuggggcagggaaccacacuuaauaacgugcauagcaauaacaccguucgggaucgcacgcccuauagaacacugcucaugaaugaacugggcgugccuuuucaccuggggaccaagcaggucugcaucgccugguccucuagcuccugucaugacggaaaagccuggcuccacgugugcauuacaggcgaugacaagaacgcuaccgccagcuucaucuacaauggccggcugguugauucuguggucuccuggagcaaagagauucuucgcacccaggaaucugagugugugugcaucaacgggacauguacgguggucaugaccgacggauccgcuagcggcaaggccgauacaaaaauucuguuuaucgaggaagggaagaucguucauaccuccacacucucuggaagcgcgcaacacguggaggaaugcuccugcuaucccagauacccuggcgugcggugugucugccgcgacaacuggaaggggagcaauagacccauuguggauaucaacauuaaagaccacucuaucguuuccagcuacguguguucuggacuggucggcgacaccccgcggaagaaugauagcuccucuagcucccauugccuugacccuaacaaugaggaaggcgggcacggagugaaaggcugggccuucgaugacgggaacgauguuuggaugggacgcacgauuaaugagacaagcagacugggcuaugagaccuuuaaggugaucgaaggguggucuaaccccaaauccaagcuccagaucaaucggcaggucauuguggaccgcagcgauagaucuggauacuccggcaucuucagcgucgagggcaaauccuguauuaaccggugcuuuuauguggaacugaucagagggcgcaaggaggaaaccgagguucuguggacaucuaauagcauuguggucuucuguggaaccuccggcacauacgggacgggaucuuggccugacggcgcugaucucaaccugaugcccaucuga

SEQ ID NO: 215031 - RNA, 1410 nt, Artificial Sequence; identical to SEQ ID NO: 214218
  derived and/or modified CDS sequence (opt5) from neuraminidase__InfluenzaA__AFN19436

SEQ ID NO: 215032 - RNA, 1410 nt, Artificial Sequence
  derived and/or modified CDS sequence (opt5) from neuraminidase__InfluenzaA__AFN19438
augaaccccaaucagaagaucauuaccaucggcagcgugucccugacaauuucuacgaucugcuucuuuaugcaaauugccauccucaucaccacagucacccugcacuucaaacaguacgaguuuaacagcccuccgaauaaccagguuaugcuuugugaacccacaauuaucgagagaaauaugaccgaaauuguguaucugacaaacaccacgaucgagaaggaaauuugcccuaaacccgcugaguaccggaauugguccaagccucagugugacaucaccggguucgcccccuuuucuaaagauaacagcauucgccucuccgcgggaggcgacaucugggugacaagagagccuuaugucucuugcgauccggacaaguguuaccaauucgcucuggggcagggaaccacacuuaauaacgugcauagcaauaacaccguucgggaucgcacgcccuauagaacacugcucaugaaugaacugggcgugccuuuucaccuggggaccaagcaggucugcaucgccugguccucuagcuccugucaugacggaaaagccuggcuccacgugugcauuacaggcgaugacaagaacgcuaccgccagcuucaucuacaauggccggcugguugauucuguggucuccuggagcaaagagauucuucgcacccaggaaucugagugugugugcaucaacgggacauguacgguggucaugaccgacggauccgcuagcggcaaggccgauacaaaaauucuguuuaucgaggaagggaagaucguucauaccuccacacucucuggaagcgcgcaacacguggaggaaugcuccugcuaucccagauacccuggcgugcggugugucugccgcgacaacuggaaggggagcaauagacccauuguggauaucaacauuaaagaccacucuaucguuuccagcuacguguguucuggacuggucggcgacaccccgcggaagaaugauagcuccucuagcucccauugccuugacccuaacaaugaggaaggcgggcacggagugaaaggcugggccuucgaugacgggaacgauguuuggaugggacgcacgauuaaugagacaagcagacugggcuaugagaccuuuaaggugaucgaaggguggucuaaccccaaauccaagcuccagaucaaucggcaggucauuguggaccgcagcgauagaucuggauacuccggcaucuucagcgucgagggcaaauccuguauuaaccggugcuuuuauguggaacugaucagagggcgcaaggaggaaaccgagguucuguggacaucuaauagcauuguggucuucuguggaaccuccggcacauacgggacgggaucuuggccugacggcgcugaucucaaccugaugagcaucuga

SEQ ID NO: 215033 - RNA, 1410 nt, Artificial Sequence
  derived and/or modified CDS sequence (opt5) from neuraminidase__InfluenzaA__AFN19442
augaaccccaaucagaagaucauuaccaucggcagcgugucccugacaauuucuacgaucugcuucuuuaugcaaauugccauccucaucaccacagucacccugcacuucaaacaguacgaguuuaacagcccuccgaauaaccagguuaugcuuugugaacccacaauuaucgagagaaauauuaccgaaaucguguaucugacaaacaccauuaucgagaaggaaauuugcccuaaacccacggaguaccggaauugguccaagccucagugugacaucaccggguucgcucccuuuucuaaagauaacagcauccgccucuccgccggaggcgacauuugggugacaagagagccuuaugucucuugcgauccggacaaguguuaccaauucgcgcuggggcagggaaccacacuuaauaacgugcauagcaauaacaccguucgggaucgcacgcccuauagaacacugcucaugaaugaacugggcgugccuuuucaccuggggaccaagcaggucugcaucgcuugguccucuagcuccugucaugacggaaaagccuggcuccacgugugcauuacaggcgaugacaagaacgccaccgcuagcuucaucuacaauggccggcugguugauucuguggucuccuggagcaaagagauucuucgcacccaggaaucugagugugugugcaucaacgggacauguacgguggucaugaccgacggauccgccagcggcaaggcugauacaaaaauccuguuuauugaggaagggaagaucguucauaccuccacacucucuggaagcgcccaacacguggaggaaugcuccugcuaucccagauacccuggcgugcggugugucugccgcgacaacuggaaggggagcaauagacccauuguggauaucaacauuaaagaccacucuaucguuuccagcuacguguguucuggacuggucggcgacaccccgcggaagaaugauagcuccucuagcucccauugccuugacccuaacaaugaggaaggcgggcacggagugaaaggcugggcguucgaugacgggaacgauguuuggaugggacgcacgaucaaugagacaagcagacugggcuaugagaccuuuaaggugauugaaggguggucuaaccccaaauccaagcuccagaucaaucggcaggucauuguggaccgcggagauagaagcggcuacucuggcaucuucuccgucgaggggaaaagcuguauuaaccggugcuuuuauguggaacugaucagaggacgcaaggaggaaaccgagguucuguggacauccaauucuauuguggucuucuguggcaccagcgggacauacggaacgggcuccuggccugacggggccgaucucaaccugaugcauaucuga

SEQ ID NO: 215034 - RNA, 1410 nt, Artificial Sequence; identical to SEQ ID NO: 214218
  derived and/or modified CDS sequence (opt5) from neuraminidase__InfluenzaA__AFN19446

SEQ ID NO: 215035 - RNA, 1410 nt, Artificial Sequence; identical to SEQ ID NO: 214218
  derived and/or modified CDS sequence (opt5) from neuraminidase__InfluenzaA__AFN19448

SEQ ID NO: 215036 - RNA, 1410 nt, Artificial Sequence; identical to SEQ ID NO: 214994
  derived and/or modified CDS sequence (opt5) from neuraminidase__InfluenzaA__AFN19458

SEQ ID NO: 215037 - RNA, 1410 nt, Artificial Sequence
  derived and/or modified CDS sequence (opt5) from neuraminidase__InfluenzaA__AFN19460
augaaccccaaucagaagaucauuaccaucggcagcgugucccugacaauuucuacgaucugcuucuuuaugcaaauugccauccucaucaccacagucacccugcacuucaaacaguacgaguuuaacagcccuccgaauaaccagguuaugcuuugugaacccacaauuaucgagagaaauauuaccgaaaucguguaucugacaaacaccacgauugagaaggaaaucugcccuaaacccgcugaguaccggaauugguccaagccucagugugggauuaccggauucgcccccuuuucuaaagacaacagcauccgccucuccgcgggcggggauaucugggugacaagagagccuuaugucucuugcgacccggauaaguguuaccaauucgcucugggacagggcaccacacuuaauaacaugcauagcaauaacaccgugcgggaccgcacgcccuauagaacacugcucaugaaugaacuggggguuccuuuucaccugggaaccaaacaggugugcauugccugguccucuagcuccugucaugauggcaaggccuggcuccacgucugcaucacaggcgacgauaagaacgcuaccgccagcuucauuuacaaugggcggcugguggacucuguuguguccuggagcaacgagauccuucgcacccaggaaucugagugugucugcauuaacggaacauguacgguggugaugaccgauggcuccgcuagcgggaaagccgacacaaagauccuguuuaucgaggaaggaaaaauuguccauaccuccacacucucuggcagcgcgcaacacguugaggaaugcuccugcuaucccagauacccuggggugcggugugugugccgcgauaauuggaagggaagcaacagacccaucgucgacauuaauaucaaggaucacucuauuguguccagcuacguuuguucuggccuggugggcgacaccccgcggaaaaacgacagcuccucuagcucccauugccuugauccuaauaacgaggaagggggacacggcgucaaggggugggccuucgacgauggaaaugacguguggaugggccgcacgaucaacgagacaagcagacugggguaugagaccuuuaaaguuaucgaaggauggucuaaucccaaguccaaacuccagauuaaccgccaggugaucgucgaucggggcgacagaagcggcuacucugggauuuucuccguggagggaaagagcuguaucaaucggugcuuuuaugucgaacugauuagaggccgcaaagaggaaaacgaggugcuguggaccuccaauucuaucguuguguucugugggacaagcggaaccuacggcacaggguccuggccugauggcgcugaccucaaccugaugcccauuuga

SEQ ID NO: 215038 - RNA, 1410 nt, Artificial Sequence; identical to SEQ ID NO: 214218
  derived and/or modified CDS sequence (opt5) from neuraminidase__InfluenzaA__AFN19462

SEQ ID NO: 215039 - RNA, 1410 nt, Artificial Sequence
  derived and/or modified CDS sequence (opt5) from neuraminidase__InfluenzaA__AFN19466
augaaccccaaucagaagaucauuaccaucggcagcgugucccugacaauuucuacgaucugcuucuuuaugcaaauugccauccucaucaccacagucacccugcacuucaaacaguacgaguuuaacagcccuccgaauaaccagguuaugcuuugugaacccacaauuaucgagagaaauauuaccgaaaucguguaucugacaaacaccacgauugagaaggaaaucugcccuaaacccgcugaguaccggaauugguccaagccucagugugacauugccggguucgcgcccuuuucuaaagauaacagcauccgccucuccgcuggaggcgacaucugggugaccagagagccuuaugucucuugcgauccggacaaguguuaccaauucgcccuggggcagggaacaacccuuaauaacgugcauagcaauaacacaguucgggaucgcacccccuauagaacgcugcucaugaaugaacugggcgugccuuuucaccuggggacaaagcaggucugcauugccugguccucuagcuccugucaugacggaaaggcuuggcuccacgugugcaucaccggcgaugacaaaaacgccacagcuagcuucauuuacaauggccggcugguugauucuguggucuccuggagcaaagagauccuucgcacccaggaaucugagugugugugcauuaacgggaccuguacaguggucaugacggacggauccgccagcggcaaggcggauaccaaaauccuguuuaucgaggaagggaagauuguucauacauccacccucucuggaagcgcccaacacguggaggaaugcuccugcuaucccagauacccuggcgugcggugugucugccgcgacaacuggaaggggagcaauagacccaucguggauauuaacaucaaagaccacucuauuguuuccagcuacguguguucuggacuggucggcgacacaccgcggaagaaugauagcuccucuagcucccauugccuugacccuaacaaugaggaaggcgggcacggagugaaaggcugggcuuucgaugacgggaacgauguuuggaugggacgcaccaucaaugagacgagcagacugggcuaugagacauuuaaggugaucgaaggguggucuaaccccaaauccaagcuccagauuaaucggcaggucaucguggaccgcggagauagaagcggcuacucuggcauuuucuccgucgaggggaaaagcuguaucaaccggugcuuuuauguggaacugauuagaggacgcaaggaggaaaccgagguucuguggaccuccaauucuaucguggucuucuguggcacaagcgggaccuacggaacaggcuccuggccugacggggccgaucucaaccugaugcccauuuga

SEQ ID NO: 215040 - RNA, 1410 nt, Artificial Sequence; identical to SEQ ID NO: 214218
  derived and/or modified CDS sequence (opt5) from neuraminidase__InfluenzaA__AFN19468

SEQ ID NO: 215041 - RNA, 1410 nt, Artificial Sequence
  derived and/or modified CDS sequence (opt5) from neuraminidase__InfluenzaA__AFN19470
augaaccccaaucagaagaucauuaccaucggcagcgugucccugacaauuucuacgaucugcuucuuuaugcaaauugccauccucaucaccacagucacccugcacuucaaacaguacgaguuuaacagcccuccgaauaaccagguuaugcuuugugaacccacaauuaucgagagaaauaugaccgaaauuguguaucugacaaacaccacgaucgagaaggaaauuugcccuaaacccgcugaguaccggaauugguccaagccucagugugacaucaccggguucgcccccuuuucuaaagauaacagcauucgccucuccgcgggaggcgacaucugggugacaagagagccuuaugucucuugcgauccggacaaguguuaccaauucgcucuggggcagggaaccacacuuaauaacgugcauagcaauaacaccguucgggaucgcacgcccuauagaacacugcucaugaaugaacugggcgugccuuuucaccuggggaccaagcaggucugcaucgccugguccucuagcuccugucaugacggaaaagccuggcuccacgugugcauuacaggcgaugacaagaacgcuaccgccagcuucaucuacaauggccggcugguugauucuguggucuccuggagcaaagagauucuucgcacccaggaaucugagugugugugcaucaacgggacauguacgguggucaugaccgacggauccgcuagcggcaaggccgauacaaaaauucuguuuaucgaggaagggaagaucguucauaccuccacacucucuggaagcgcgcaacacguggaggaaugcuccugcuaucccagauacccuggcgugcggugugucugccgcgacaacuggaaggggagcaauagacccauuguggauaucaacauuaaagaccacucuaucguuuccagcuacguguguucuggacuggucggcgacaccccgcggaagaaugauagcuccucuagcucccauugccuugacccuaacaaugaggaaggcgggcacggagugaaaggcugggccuucgaugacgggaacgauguuuggaugggacgcacgauuaaugagacaagcagacugggcuaugagaccuuuaaggugaucgaaggguggucuaaccccaaauccaagcuccagaucaaucggcaggucauugugaacaaaagcgaccgcucuggauacuccggcaucuucagcgucgagggcaaguccuguauuaauagaugcuuuuauguggaacugauccgggggagaaaggaggaaaccgagguucuguggacaucuaacagcauuguggucuucuguggaaccuccggcacauacgggacgggaucuuggccugauggcgcugaccucaaucugaugcccaucuga

SEQ ID NO: 215042 - RNA, 1410 nt, Artificial Sequence; identical to SEQ ID NO: 214994
  derived and/or modified CDS sequence (opt5) from neuraminidase__InfluenzaA__AFN19472

SEQ ID NO: 215043 - RNA, 1410 nt, Artificial Sequence
  derived and/or modified CDS sequence (opt5) from neuraminidase__InfluenzaA__AFN19476
augaaccccaaucagaagaucauuaccaucggcagcgugucccugacaauuucuacgaucugcuucuuuaugcaaauugccauccucaucaccacagucacccugcacuucaaacaguacgaguuuaacagcccuccgaauaaccagguuaugcuuugugaacccacaauuaucgagagaaauauuaccgaaaucguguaucugacaaacaccacgauugagaaggaaaucugcccuaaacccgcugaguaccggaauugguccaagccucagugugggauuaccggauucgcgccccucucuaaagacaacagcauccgccuguccgccggcggggauaucugggugacaagagagccuuaugucucuugcgacccggauaaguguuaccaauuugcucuuggacagggcaccacacugaauaacgugcauagcaauaacaccguucgggaccgcacgcccuauagaacacuccugaugaaugaacugggggugccuuuccaccucggaaccaagcaggucugcauugccugguccuccucuuccugucaugauggcaaagccuggcugcacgugugcaucacaggcgacgauaagaacgcuaccgccagcuuuauuuacaaugggcggcuuguugacucuguggucuccuggagcaaagagauccugcgcacccaggaaucugagugugugugcauuaacggaacauguacgguggucaugaccgauggcuccgcuagcgggaaggccgacacaaaaauccucuucaucgaggaaggaaagauuguucauaccuccacacugucuggcagcgcgcaacacguggaggaaugcuccugcuaucccagauacccuggggugcggugugucugccgcgauaacuggaagggaagcaauagacccaucguggacauuaacaucaaagaucacucuauuguuuccagcuacguguguucuggccuugucggcgacaccccgcggaagaaugacagcuccucuagcucccauugccuggauccuaacaaugaggaagggggacacggcgugaaagggugggccuuugacgauggaaacgacguuuggaugggccgcacgaucaaugagacaagcagacucggguaugagaccuucaaggugaucgaaggauggucuaaccccaaauccaagcugcagauuaaucggcaggucaucguggaucgcggcgacagaagcggcuacucugggauuuuuagcgucgagggaaaaagcuguaucaaccggugcuucuauguggaacugauuagaggccgcaaggaggaaaccgagguucucuggacauccaauucuaucguggucuuuugugggaccagcggaacauacggcacgggguccuggccugauggcgcugaccugaaccuuaugcccauuuga

SEQ ID NO: 215044 - RNA, 1410 nt, Artificial Sequence; identical to SEQ ID NO: 214994
  derived and/or modified CDS sequence (opt5) from neuraminidase__InfluenzaA__AFN19478

SEQ ID NO: 215045 - RNA, 1410 nt, Artificial Sequence
  derived and/or modified CDS sequence (opt5) from neuraminidase__InfluenzaA__AFN19480
augaaccccaaucagaagaucauuaccaucggcagcgugucccugacaauuucuacgaucugcuucuuuaugcaaauugccauccucaucaccacagucacccugcacuucaaacaguacgaguuuaacagcccuccgaauaaccagguuaugcuuugugaacccacaauuaucgagagaaauaugaccgaaauuguguaucugacaaacaccacgaucgagaaggaaauuugcccuaaacccgcugaguaccggaauugguccaagccucagugugacaucaccggguucgcccccuuuucuaaagauaacagcauucgccucuccgcgggaggcgacaucugggugacaagagagccuuaugucucuugcgauccggacaaguguuaccaauucgcucuggggcagggaaccacacuuaauaacgugcauagcaauaacaccguuggcgaucggacgcccuaucgcacacugcucaugaaugaacugggggugccuuuucaccugggaaccaagcaggucugcaucgccugguccucuagcuccugucaugacggcaaagccuggcuccacgugugcauuacaggcgaugacaagaacgcuaccgccagcuucaucuacaaugggagacugguugauucuguggucuccuggagcaaagagauucuucggacccaggaaucugagugugugugcaucaacggaacauguacgguggucaugaccgacggcuccgcuagcgggaaggccgauacaaaaauucuguuuaucgaggaaggaaagaucguucauaccuccacacucucuggcagcgcgcaacacguggaggaaugcuccugcuauccccgcuacccuggggugagaugugucugccgggacaacuggaagggaagcaaucgccccauuguggauaucaacauuaaagaccacucuaucguuuccagcuacguguguucuggccuggucggcgacaccccgagaaagaaugauagcuccucuagcucccauugccuugacccuaacaaugaggaagggggacacggcgugaaagggugggccuucgaugacggaaacgauguuuggaugggccggacgauuaaugagacaagccgccugggguaugagaccuuuaaggugaucgaaggauggucuaaccccaaauccaagcuccagaucaauagacaggucauuguggaccggagcgaucgcucuggcuacuccggcaucuucagcgucgaggggaaauccuguauuaacagaugcuuuuauguggaacugauccggggaagaaaggaggaaaccgagguucuguggacaucuaauagcauuguggucuucuguggcaccuccgggacauacggaacgggcucuuggccugacggggcugaucucaaccugaugcccaucuga

SEQ ID NO: 215046 - RNA, 1410 nt, Artificial Sequence
  derived and/or modified CDS sequence (opt5) from neuraminidase__InfluenzaA__AFN19482
augaaccccaaucagaagaucauuaccaucggcagcgugucccugacaauuucuacgaucugcuucuuuaugcaaauugccauccucaucaccacagucacccugcacuucaaacaguacgaguuuaacagcccuccgaauaaccagguuaugcuuugugaacccacaauuaucgagagaaauauuaccgaaaucguguaucugacaaacaccacgauugagaaggaaaucugcccuaaacccgcuaaguaccggaauugguccaaaccucagugugacauuaccggguucgcccccuuuucuaaggauaacagcauccgccucuccgcgggaggcgacaucugggugacaagagagccuuaugucucuugcgauccggacaaguguuaccaauucgcucuggggcagggaaccacacuuaauaacgugcauagcaauaacaccguucgggaucgcacgcccuauagaacacugcucaugaaugagcugggcgugccuuuucaccuggggaccaaacaggucugcauugccugguccucuagcuccugucaugacggaaaggccuggcuccacgugugcaucacaggcgaugacaaaaacgcuaccgccagcuucauuuacaauggccggcugguugauucuguggucuccuggagcaaggaaauccuucgcacccaggagucugaaugugugugcauuaacgggacauguacgguggucaugaccgacggauccgcuagcggcaaagccgauacaaagauccuguuuaucgaggaggggaagauuguucauaccuccacacucucuggaagcgcgcaacacguggaagagugcuccugcuaucccagauacccuggcgugcggugugucugccgcgacaacuggaaagggagcaauagacccaucguggauauuaacaucaaggaccacucuauuguuuccagcuacguguguucuggacuggucggcgacaccccgcggaaaaaugauagcuccucuagcucccauugccuugacccuaacaaugaagagggcgggcacggagugaagggcugggccuucgaugacgggaacgauguuuggaugggacgcacgaucaaugaaacaagcagacugggcuaugagaccuuuaaagugaucgagggguggucuaaccccaaguccaaacuccagauuaaucggcaggucaucguggaccgcagcgauagaucuggauacuccggcauuuucagcgucgaaggcaaguccuguaucaaccggugcuuuuauguggagcugauuagagggcgcaaggaagagaccgaaguucuguggacaucuaauagcaucguggucuucuguggaaccuccggcacauacgggacgggaucuuggccugacggcgcugaucucaaccugaugcccauuuga

SEQ ID NO: 215047 - RNA, 1410 nt, Artificial Sequence; identical to SEQ ID NO: 214218
  derived and/or modified CDS sequence (opt5) from neuraminidase__InfluenzaA__AFN19484

SEQ ID NO: 215048 - RNA, 1410 nt, Artificial Sequence; identical to SEQ ID NO: 214994
  derived and/or modified CDS sequence (opt5) from neuraminidase__InfluenzaA__AFN19488

SEQ ID NO: 215049 - RNA, 1410 nt, Artificial Sequence
  derived and/or modified CDS sequence (opt5) from neuraminidase__InfluenzaA__AFN19492
augaaccccaaucagaagaucauuaccaucggcagcgugucccugacaauuucuacgaucugcuucuuuaugcaaauugccauccucaucaccacagucacccugcacuucaaacaguacgaguuuaacagcccuccgaauaaccagguuaugcuuugugaacccacaauuaucgagagaaauauuaccgaaaucguguaucugacaaacaccacgauugagaaggaaaucugcccuaaacccgcugaguaccggaauugguccaagccucagugugacauuaccggguucgcccccuuuucuaaagauaacagcauccgccucuccgcgggaggcgacaucugggugacaagagagccuuaugucucuugcgauccggacaaguguuaccaauucgcucuggggcagggaaccacacuuaauaacgugcauagcaauaacaccguucgggaucgcacgcccuauagaacacugcucaugaaugaacugggcgugccuuuucaccuggggaccaagcaggucugcauugccugguccucuagcuccugucaugacggaaaagccuggcuccacgugugcaucacaggcgaugacaagaacgcuaccgccagcuucauuuacaauggcaaacugguugauucuguggucuccuggagcaaggagauccuucggacccaggaaucugagugugugugcauuaacgggacauguacgguggucaugaccgacggauccgcuagcggcaaagccgauacaaagauccuguuuaucgaggaagggaagauuguucauaccuccacacucucuggaagcgcgcaacacguggaggaaugcuccugcuauccccgcuacccuggcgugagaugugucugccgggacaacuggaaagggagcaaucgccccaucguggauauuaacaucaaggaccacucuauuguuuccagcuacguguguucuggacuggucggcgacaccccgagaaagaaugauagcuccucuagcucccauugccuugacccuaacaaugaggaaggcgggcacggagugaagggcugggccuucgaugacgggaacgauguuuggaugggacggacgaucaaugagacaagccgccugggcuaugagaccuuuaaagugaucgaaggguggucuaaccccaaguccaaacuccagauuaauagacaggucaucguggaccggggagaucgcagcggcuacucuggcauuuucuccgucgaggggaaaagcuguaucaacagaugcuuuuauguggaacugauucggggaagaaaggaggaaaccgagguucuguggacauccaauucuaucguggucuucuguggcaccagcgggacauacggaacgggcuccuggccugacggggcugaucucaaccugaugcccauuuga

SEQ ID NO: 215050 - RNA, 1410 nt, Artificial Sequence
  derived and/or modified CDS sequence (opt5) from neuraminidase__InfluenzaA__AFN19494
augaaccccaaucagaagaucauuaccaucggcagcgugucccugacaauuucuacgaucugcuucuuuaugcaaauugccauccucaucaccacagucacccugcacuucaaacaguacgaguuuaacagcccuccgaauaaccagguuaugcuuugugaacccacaauuaucgagagaaauauuaccgaaaucguguaucugacaaacaccacgauugagaaggaaaucugcccuaaacucgcugaguaccggaauugguccaagccccagugugacauuaccggguucgccccuuuuucuaaagauaacagcauccgccuguccgcgggaggcgacaucugggugacaagagagcccuaugucucuugcgauccugacaaguguuaccaauucgcucuugggcagggaaccacacugaauaacaugcauagcaauaacaccgugcgggaucgcacgccguauagaacacuccugaugaaugaacugggcguucccuuucaccucgggaccaaacaggugugcauugccugguccucuagcuccugucaugacggaaaggccuggcugcacgucugcaucacaggcgaugacaagaacgcuaccgccagcuucauuuacaauggccggcuuguggauucuguuguguccuggagcaaagagauccugcgcacccaggaaucugagugugucugcauuaacgggacauguacgguggugaugaccgacggauccgcuagcggcaaggccgauacaaaaauccucuuuaucgaggaagggaagauuguccauaccuccacacugucuggaagcgcgcaacacguugaggaaugcuccugcuauccuagauaccccggcgugcggugugugugccgcgacaacuggaaggggagcaauagaccuaucgucgauauuaacaucaaagaccacucuauuguguccagcuacguuuguucuggacuugugggcgacacgccccggaagaaugauagcuccucuagcucccauugccuggacccgaacaaugaggaaggcgggcacggagucaaaggcugggccuucgaugacgggaacgauguguggaugggacgcaccaucaaugagacaagcagacucggcuaugagaccuuuaagguuaucgaaggguggucuaacccuaaauccaagcugcagauuaaucgccaggugaucgucgaccggggaaacagaagcggcuacucuggcauuuucuccguggaggggaaaagcuguaucaaucggugcuuuuaugucgaacugauuagaggacgcaaggaggaaaccgaggugcucuggacauccaacucuaucguuguguucuguggcaccagcgggacauacggaacgggcuccuggcccgauggggcugaccugaaucuuaugccuauuuga

SEQ ID NO: 215051 - RNA, 1410 nt, Artificial Sequence; identical to SEQ ID NO: 213859
  derived and/or modified CDS sequence (opt5) from neuraminidase__InfluenzaA__AFN19496

SEQ ID NO: 215052 - RNA, 1410 nt, Artificial Sequence
  derived and/or modified CDS sequence (opt5) from neuraminidase__InfluenzaA__AFN19498
augaaccccaaucagaagaucauuaccaucggcagcgugucccugacaauuucuacgaucugcuucuuuaugcaaauugccauccucaucaccacagucacccugcacuucaaacaguacgaguuuaacagcccuccgaauaaccagguuaugcuuugugaacccacaauuaucgagagaaauauuaccgaaaucguguaucugacaaacaccacgauugagaaggaaaucugcccuaaacucgcugaguaccggaauugguccaagccccagugugacauuaccggguucgccccuuuuucuaaagauaacagcauccgccuguccgcgggaggcgacaucugggugacaagagagcccuaugucucuugcgauccugacaaguguuaccaauucgcucuugggcagggaaccacacugaauaacgugcauagcaauaacaccguucgggaucgcacgccguauagaacacuccugaugaaugaacugggcgugcccuuucaccucgggaccaagcaggucugcauugccugguccucuagcuccugucaugacggaaaagccuggcugcacgugugcaucacaggcgaugacaagaacgcuaccgccagcuucauuuacaauggcaaacuuguugauucuguggucuccuggagcaaggagauccugcggacccaggaaucugagugugugugcauuaacgggacauguacgguggucaugaccgacggauccgcuagcggcaaagccgauacaaagauccucuuuaucgaggaagggaagauuguucauaccuccacacugucuggaagcgcgcaacacguggaggaaugcuccugcuauccucgcuaccccggcgugagaugugucugccgggacaacuggaaagggagcaaucgcccuaucguggauauuaacaucaaggaccacucuauuguuuccagcuacguguguucuggacuugucggcgacacccccagaaagaaugauagcuccucuagcucccauugccuggacccgaacaaugaggaaggcgggcacggagugaagggcugggccuucgaugacgggaacgauguuuggaugggacggacgaucaaugagacaagccgccucggcuaugagaccuuuaaagugaucgaaggguggucuaacccuaaguccaaacugcagauuaauagacaggucaucguggaccggggaaaccgcagcggcuacucuggcauuuucuccgucgaggggaaaagcuguaucaauagaugcuuuuauguggaacugauucggggaagaaccgaggaaacagagguucucuggaccuccaacucuaucguggucuucuguggcacaagcgggacguacggaaccggcuccuggcccgauggggcugaccugaaucuuaugccuauuuga

SEQ ID NO: 215053 - RNA, 1410 nt, Artificial Sequence; identical to SEQ ID NO: 215002
  derived and/or modified CDS sequence (opt5) from neuraminidase__InfluenzaA__AFN19500

SEQ ID NO: 215054 - RNA, 1410 nt, Artificial Sequence; identical to SEQ ID NO: 214994
  derived and/or modified CDS sequence (opt5) from neuraminidase__InfluenzaA__AFN19502

SEQ ID NO: 215055 - RNA, 1410 nt, Artificial Sequence; identical to SEQ ID NO: 211590
  derived and/or modified CDS sequence (opt5) from neuraminidase__InfluenzaA__AFN19504

SEQ ID NO: 215056 - RNA, 1410 nt, Artificial Sequence; identical to SEQ ID NO: 211590
  derived and/or modified CDS sequence (opt5) from neuraminidase__InfluenzaA__AFN19506

SEQ ID NO: 215057 - RNA, 1410 nt, Artificial Sequence; identical to SEQ ID NO: 215002
  derived and/or modified CDS sequence (opt5) from neuraminidase__InfluenzaA__AFN19508

SEQ ID NO: 215058 - RNA, 1410 nt, Artificial Sequence; identical to SEQ ID NO: 214994
  derived and/or modified CDS sequence (opt5) from neuraminidase__InfluenzaA__AFN19510

SEQ ID NO: 215059 - RNA, 1410 nt, Artificial Sequence; identical to SEQ ID NO: 214994
  derived and/or modified CDS sequence (opt5) from neuraminidase__InfluenzaA__AFN19512

SEQ ID NO: 215060 - RNA, 1410 nt, Artificial Sequence; identical to SEQ ID NO: 214994
  derived and/or modified CDS sequence (opt5) from neuraminidase__InfluenzaA__AFN19516

SEQ ID NO: 215061 - RNA, 1410 nt, Artificial Sequence; identical to SEQ ID NO: 215002
  derived and/or modified CDS sequence (opt5) from neuraminidase__InfluenzaA__AFN19518

SEQ ID NO: 215062 - RNA, 1410 nt, Artificial Sequence; identical to SEQ ID NO: 215002
  derived and/or modified CDS sequence (opt5) from neuraminidase__InfluenzaA__AFN19520

SEQ ID NO: 215063 - RNA, 1410 nt, Artificial Sequence; identical to SEQ ID NO: 214994
  derived and/or modified CDS sequence (opt5) from neuraminidase__InfluenzaA__AFN19522

SEQ ID NO: 215064 - RNA, 1410 nt, Artificial Sequence
  derived and/or modified CDS sequence (opt5) from neuraminidase__InfluenzaA__AFN19524
augaaccccaaucagaagaucauuaccaucggcagcgugucccugacaauuucuacgaucugcuucuuuaugcaaauugccauccucaucaccacagucacccugcacuucaaacaguacgaguuuaacagcccuccgaauaaccagguuaugcuuugugaacccacaauuaucgagagaaauauuaccgaaaucguguaucugacaaacaccacgauugagaaggaaaucugcccuaaacccgcugaguaccggaauugguccaagccucagugugacauuaccggguucgcccccuuuucuaaagauaacagcauccgccucuccgcgggaggcgacaucugggugacaagagagccuuaugucucuugcgauccggacaaguguuaccaauucgcucuggggcagggaaccacacuuaauaacgugcauagcaauaacaccguucgggaucgcacgcccuauagaacacugcucaugaaugaacugggcgugccuuuucaccuggggaccaagcaggucugcauugccugguccucuagcuccugucaugacggaaaagccuggcuccacgugugcaucacaggcgaugacaagaacgcuaccgccagcuucauuuacaauggccggcugguugauucuguggucuccuggagcaaagagauccuucgcacccaggaaucugagugugugugcauuaacgggacauguacgguggucaugaccgacggauccgcuagcggcaaggccgauacaaaaauccuguuuaucgaggaagggaagauuguucauaccuccacacucucuggaagcgcgcaacacguggaggaaugcuccugcuaucccagauacccuggcgugcggugugucugccgcgacaacuggaaggggagcaauagacccaucguggauauuaacaucaaagaccacucuauuguuuccagcuacguguguucuggacuggucggcgacaccccgcggaagaaugauagcuccucuagcucccauugccuugacccuaacaaugaggaaggcgggcacggagugaaaggcugggccuucgaugacgggaacgauguuuggaugggacgcacgaucaaugagacaagcagacugggcuaugagaccuuuaaggugaucgaaggguggucuaaccccaaauccaagcuccagauuaaucggcaggucaucguggaccgcggagauagaagcggcuacucuggcauuuucuccgucgaggggaaaagcuguaucaaccggugcuuuuauguggaacugauuagaggacgcaaggaggaaaccgagguucuguggacauccaauucuaucguggucuucuguggcaccagcgggacauacggaacgggcuccuggccugacggggcugaucucucucugaugcccauuuga

SEQ ID NO: 215065 - RNA, 1410 nt, Artificial Sequence
  derived and/or modified CDS sequence (opt5) from neuraminidase__InfluenzaA__AFN19526
augaaccccaaucagaagaucauuaccaucggcagcgugucccugacaauuucuacgaucugcuucuuuaugcaaauugccauccucaucaccacagucacccugcacuucaaacagugugaguuuaacagcccuccgaauaaccagguuaugcuuugcgaacccacaauuaucgagagaaauauuaccgaaaucguguaccugacaaacaccacgaccgagaaggaaauuuguccuaaacccgcugaguaucggaauugguccaagccucagugcgacaucacaggguucgcccccuuuucuaaagauaacagcauucgccucuccgcgggaggcgacaucugggugaccagagagccuuacgucucuugugauccggacaagugcuaucaauucgcucuggggcagggaacaacccuuaauaacgugcauagcaauaacacgguucgggaucgcacacccuacagaacccugcucaugaaugaacugggcgugccuuuucaccuggggacaaagcaggucuguaucgccugguccucuagcuccugccaugacggaaaagccuggcuccacguguguauuaccggcgaugacaagaacgcuaccgccagcuucaucuauaauggccggcugguugauucuguggucuccuggagcaaagagauucuucgcacacaggaaucugagugcguguguaucaacgggacgugcaccguggucaugacagacggauccgcuagcggcaaggccgauaccaaaauucuguuuaucgaggaagggaagaucguucauacauccacccucucuggaagcgcgcaacacguggaggaaugcuccuguuaccccagauauccuggcgugcggugcgucugucgcgacaacuggaaggggagcaauagacccauuguggauaucaacauuaaagaccacucuaucguuuccagcuacgugugcucuggacuggucggcgacacgccgcggaagacagauagcuccucuagcucccauugucuugacccuaauaacgaggaaggcgggcacggagugaaaggcugggccuucgaugacgggaaugauguuuggaugggacgcaccauuaacgagaccagcagacugggcuacgagacauuuaaggugaucgaaggguggucuaaucccaaauccaagcuccagaucaaccggcaggucauuguggaccgcggagauagaagcggcuauucuggcaucuucuccgucgaggggaaaagcugcauuaaucgguguuuuuacguggaacugaucagaggacgcaaggaggaaaccgagguucuguggacauccaacucuauuguggucuucugcggcacgagcgggaccuauggaacaggcuccuggccugacggggcugaucucaaucugaugcccaucuga

SEQ ID NO: 215066 - RNA, 1410 nt, Artificial Sequence
  derived and/or modified CDS sequence (opt5) from neuraminidase__InfluenzaA__AFN19528
augaaccccaaucagaagaucauuaccaucggcagcgugucccugacaauuucuacgaucugcuucuuuaugcaaauugccauccucaucaccacagucacccugcacuucaaacaguacgaguuuaacagcccuccgaauaaccagguuaugcuuugugaacccacaauuaucgagagaaauaugaccgaaauuguguaucugacaaacaccacgaucgagaaggaaauuugcccuaaacccgcugaguaccggaauugguccaagccucagugugacaucaccggguucgcccccuuuucuaaagauaacagcauucgccucuccgcgggaggcgacaucugggugacaagagagccuuaugucucuugcgauccggacaaguguuaccaauucgcucuggggcagggaaccacacuuaauaacgugcauagcaauaacaccguucgggaucgcacgcccuauagaacacugcucaugaaugaacugggcgugccuuuucaccuggggaccaagcaggucugcaucgccugguccucuagcuccugucaugacggaaaagccuggcuccacgugugcauuacaggcgaugacaagaacgcuaccgccagcuucaucuacaauggccggcugguugauucuguggucuccuggagcaaagagauucuucgcacccaggaaucugagugugugugcaucaacgggacauguacgguggucaugaccgacggauccgcuagcggcaaguccgauacaaaaauucuguuuaucgaggaagggaagaucguucauaccucuacacucagcggauccgcccaacacguggaggaaugcagcugcuaucccagauacccuggcgugcggugugucugccgcgacaacuggaaggggucuaauagacccauuguggauaucaacauuaaagaccacuccaucguuagcucuuacguguguagcggacuggucggcgacaccccgcggaagaaugauuccucuagcuccagccauugccuugacccuaacaaugaggaaggcgggcacggagugaaaggcugggcguucgaugacgggaacgauguuuggaugggacgcacgauuaaugagacaucuagacugggcuaugagaccuuuaaggugaucgaagggugguccaaccccaaaagcaagcuccagaucaaucggcaggucauuguggaccgcucugauagauccggauacagcggcaucuucuccgucgagggcaaaucuuguauuaaccggugcuuuuauguggaacugaucagagggcgcaaggaggaaaccgagguucuguggacaagcaauuccauuguggucuucuguggaaccucuggcacauacgggacgggaagcuggccugacggcgccgaucucaaccugaugcccaucuga

SEQ ID NO: 215067 - RNA, 1410 nt, Artificial Sequence; identical to SEQ ID NO: 215030
  derived and/or modified CDS sequence (opt5) from neuraminidase__InfluenzaA__AFN19530

SEQ ID NO: 215068 - RNA, 1410 nt, Artificial Sequence; identical to SEQ ID NO: 214994
  derived and/or modified CDS sequence (opt5) from neuraminidase__InfluenzaA__AFN19532

SEQ ID NO: 215069 - RNA, 1410 nt, Artificial Sequence; identical to SEQ ID NO: 215030
  derived and/or modified CDS sequence (opt5) from neuraminidase__InfluenzaA__AFN19534

SEQ ID NO: 215070 - RNA, 1410 nt, Artificial Sequence; identical to SEQ ID NO: 214994
  derived and/or modified CDS sequence (opt5) from neuraminidase__InfluenzaA__AFN19536

SEQ ID NO: 215071 - RNA, 1410 nt, Artificial Sequence; identical to SEQ ID NO: 214994
  derived and/or modified CDS sequence (opt5) from neuraminidase__InfluenzaA__AFN19538

SEQ ID NO: 215072 - RNA, 1410 nt, Artificial Sequence; identical to SEQ ID NO: 214994
  derived and/or modified CDS sequence (opt5) from neuraminidase__InfluenzaA__AFN19544

SEQ ID NO: 215073 - RNA, 1410 nt, Artificial Sequence
  derived and/or modified CDS sequence (opt5) from neuraminidase__InfluenzaA__AFN19546
augaaccccaaucagaagaucauuaccaucggcagcgugucccugacaauuucuacgaucugcuucuuuaugcaaauugccauccucaucaccacagucacccugcacuucaaacaguacgaguuuaacagcccuccgaauaaccagguuaugcuuugugaacccacaauuaucgagagaaauauuaccgaaaucguguaucugacaaacaccacgauugagaaggaaaucugcccuaaacccgcugaguaccggaauugguccaagccucagugugggauuaccggauucgcccccuuuucuaaagacaacagcauccgccucuccgcgggcggggauaucugggugacaagagagccuuaugucucuugcgacccggauaaguguuaccaauucgcucugggacagggcaccacacuuaauaacgugcauagcaauaacaccguucgggaccgcacgcccuauagaacacugcucauguccgaacugggggugccuuuucaccugggaaccaagcaggucugcauugccuggucuagcuccagcugucaugauggcaaagccuggcuccacgugugcaucacaggcgacgauaagaaugcuaccgccucuuucauuuacaacgggcggcugguugacuccguggucagcuggucuaaagagauccuucgcacccaggaauccgagugugugugcauuaauggaacauguacgguggucaugaccgauggcagcgcuuccgggaaggccgacacaaaaauccuguuuaucgaggaaggaaagauuguucauaccucuacacucagcggcuccgcgcaacacguggaggaaugcagcugcuaucccagauacccuggggugcggugugucugccgcgauaacuggaagggaucuaacagacccaucguggacauuaauaucaaagaucacuccauuguuagcucuuacguguguagcggccuggucggcgacaccccgcggaagaacgacuccucuagcuccagccauugccuugauccuaauaacgaggaagggggacacggcgugaaagggugggccuucgacgauggaaaugacguuuggaugggccgcacgaucaacgagacaucuagacugggguaugagaccuuuaaggugaucgaaggaugguccaaucccaaaagcaagcuccagauuaaccggcaggucaucguggaucgcggcgacagaucuggcuacuccgggauuuucagcgucgagggaaaauccuguaucaaucggugcuuuuauguggaacugauuagaggccgcaaggaggaaaccgagguucuguggacaucuaacagcaucguggucuucugugggaccuccggaacauacggcacggggucuuggccugauggcgcugaccucaaucugaugcccauuuga

SEQ ID NO: 215074 - RNA, 1410 nt, Artificial Sequence
  derived and/or modified CDS sequence (opt5) from neuraminidase__InfluenzaA__AFN19548
augaaccccaaucagaagaucauuaccaucggcagcgugucccugacaauuucuacgaucugcuucuuuaugcaaauugccauccucaucaccacagucacccugcacuucaaacaguacgaguuuaacagcccuccgaauaaccagguuaugcuuugugaacccacaauuaucgagagaaauauuaccgaaaucguguaucugacaaacaccacgauugagaaggaaaucugcccuaaacccgcugaguaccggaauugguccaagccucagugugacauuaccggguucgcccccuuuucuaaagauaacagcauccgccucuccgcgggaggcgacaucugggugacaagagagccuuaugucucuugcgauccggacaaguguuaccaauucgcucuggggcagggaaccacacuuaauaacgugcauagcaauaacaccguucgggaucgcacgcccuauagaacacugcucaugaaugaacugggcgugccuuuucaccuggggaccaagcaggucugcauugccugguccucuucuuccugucaugacggaaaagccuggcuccacgugugcaucacaggcgaugacaagaacgcuaccgccagcuucauuuacaauggccggcugguugauucuguggucuccuggagcaaagagauccuucgcacccaggaaucugagugugugugcauuaacgggacauguacgguggucaugaccgacggauccgcuagcggcaaggccgauacaaaaauccuguuuaucgaggaagggaagauuguucauaccuccacacucucuggaagcgcgcaacacguggaggaaugcuccugcuaucccagauacccuggcgugcggugugucugccgcgacaacuggaaggggagcaauagacccaucguggauauuaacaucaaagaccacucuauuguuuccagcuacguguguucuggacuggucggcgacaccccgcggaagaaugauagcuucuccucuagccauugccuugacccuaacaaugaggaaggcgggcacggagugaaaggcugggccuuugaugacgggaacgauguuuggaugggacgcacgaucaaugagacauccagacugggcuaugagaccuucaaggugaucgaaggguggagcaaccccaaaucuaagcuccagauuaaucggcaggucaucguggaccgcggagauagauccggcuacagcggcauuuuuagcgucgaggggaaauccuguaucaaccggugcuucuauguggaacugauuagaggacgcaaggaggaaaccgagguucuguggacaagcaauuccaucguggucuucuguggcaccucugggacauacggaacgggcagcuggccugacggggcugaucucaaccugaugcccauuuga

SEQ ID NO: 215075 - RNA, 1410 nt, Artificial Sequence
  derived and/or modified CDS sequence (opt5) from neuraminidase__InfluenzaA__AFN19550
augaaccccaaucagaagaucauuaccaucggcagcgugucccugacaauuucuacgaucugcuucuuuaugcaaauugccauccucaucaccacagucacccugcacuucaaacaguacgaguuuaacagcccuccgaauaaccagguuaugcuuugugaacccacaauuaucgagagaaauauuaccgaaaucguguaucugacaaacaccacgauugagaaggaaaucugcccuaaacucgcugaguaccggaauugguccaagccccagugugacauuaccggguucgccccuuuuucuaaagauaacagcauccgccuguccgcgggaggcgacaucugggugacaagagagcccuaugucucuugcgauccugacaaguguuaccaauucgcucuugggcagggaaccacacugaauaacgugcauagcaauaacaccguucgggaucgcacgccguauagaacacuccugaugaaugaacugggcgugcccuuucaccucgggaccaagcaggucugcauugccugguccagcagcuccugucaugacggaaaagccuggcugcacgugugcaucacaggcgaugacaagaacgcuaccgccagcuucauuuacaauggccggcuuguugauucuguggucuccuggagcaaagagauccugcgcacccaggaaucugagugugugugcauuaacgggacauguacgguggucaugaccgacggauccgcuagcggcgaggccgauacaaagauccucuuuaucgaagaggggaaaauuauccauaccuccacacugucuggaagcgcgcaacacguugaagagugcuccugcuauccuagauaccccggcgugcggugugugugccgcgacaacuggaaggggagcaauagaccuauugucgauaucaacauuaaggaccacucuaucguguccagcuacguuuguucuggacuugugggcgacacgccccggaaaaaugauagcuccucuagcucccauugccuggacccgaacaaugaagagggcgggcacggagucaagggcugggccuucgaugacgggaacgauguguggaugggacgcaccaucaaugagacaagcagacucggcuaugaaaccuuuaaaguuauugagggguggucuaacccuaaguccaaacugcagaucaaucgccaggugauugucgaccggggaaacagaagcggcuacucuggcaucuucuccguggaagggaagucuuguauuaaucggugcuuuuaugucgagcugaucagaggacgcaaagaagagaccgaggugcucuggacauccaacucuauuguuguguucuguggcaccagcgggacauacggaacgggcuccuggcccgauggggcugaccugaaucuuaugccuaucuga

SEQ ID NO: 215076 - RNA, 1410 nt, Artificial Sequence; identical to SEQ ID NO: 214994
  derived and/or modified CDS sequence (opt5) from neuraminidase__InfluenzaA__AFN19552

SEQ ID NO: 215077 - RNA, 1410 nt, Artificial Sequence; identical to SEQ ID NO: 214218
  derived and/or modified CDS sequence (opt5) from neuraminidase__InfluenzaA__AFN19554

SEQ ID NO: 215078 - RNA, 1410 nt, Artificial Sequence; identical to SEQ ID NO: 214218
  derived and/or modified CDS sequence (opt5) from neuraminidase__InfluenzaA__AFN19556

SEQ ID NO: 215079 - RNA, 1410 nt, Artificial Sequence
  derived and/or modified CDS sequence (opt5) from neuraminidase__InfluenzaA__AFN19558
augaaccccaaucagaagaucauuaccaucggcagcgugucccugacaauuucuacgaucugcuucuuuaugcaaauugccauccucaucaccacagucacccugcacuucaaacaguacgaguuuaacagcccuccgaauaaccagguuaugcuuugugaacccacaauuaucgagagaaauauuaccgaaaucguguaucugacaaacaccacgauugagaaggaaaucugcccuaaacccgcugaguaccggaauugguccaagccucagugugacauuaccggguucgcccccuuuucuaaagauaacagcauccgccucuccgcgggaggcgacaucugggugacaagagagccuuaugucucuugcgauccggacaaguguuaccaauucgcucuggggcagggaaccacacuuaauaacgugcauagcaauaacaccguucgggaucgcacgcccuauagaacacugcucaugaaugaacugggcgugccuuuucaccuggggaccaagcaggucugcauugccugguccucuagcuccugucaugacggaaaagccuggcuccacgugugcaucacaggcgaugacaagaacgcuaccgccagcuucauuuacaauggccggcugguugauucuguggucuccuggagcaaagagauccuucgcacccaggaaucugagugugugugcauuaacgggacauguacgguggucaugaccgacggauccgcuagcggcaaggccgauacaaaaauccuguuuaucgaggaagggaagauuguucauaccuccacacucucuggaagcgcgcaacacguggaggaaugcuccugcuaucccagauacccuggcgugcggugugucugccgcgacaacuggaaggggagcaauagacccaucguggauauuaacaucaaagaccacucuauuguuuccagcuacguguguucuggacuggucggcgacaccccgcggaagaaugauagcuccucuagcucccauugccuugacccuaacaaugaggaaggcgggcacggagugaaaggcugggccuucgaugacgggaacgauguuuggaugggacgcacgaucaaugagacaagcagacugggcuaugagaccuuuaaggugaucgaaggguggucuaaccccaaauccaagcuccagaugaaucggcaggucauuguggaccgcggagauagaagcggcuacucuggcaucuucuccgucgaggggaaaagcuguauuaaccggugcuuuuauguggaacugaucagaggacgcaaggaggaaaccgagguucuguggacauccaauucuauuguggucuucuguggcaccagcgggacauacggaacgggcuccuggccugacggggcugaucucaaccugaugcccaucuga

SEQ ID NO: 215080 - RNA, 1410 nt, Artificial Sequence
  derived and/or modified CDS sequence (opt5) from neuraminidase__InfluenzaA__AFN19560
augaaccccaaucagaagaucauuaccaucggcagcgugucccugacaauuucuacgaucugcuucuuuaugcaaauugccauccucaucaccacagucacccugcacuucaaacaguacgaguuuaacagcccuccgaauaaccagguuaugcuuugugaacccacaauuaucgagagaaauauuaccgaaaucguguaucugacaaacaccacgauugagaaggaaaucugcccuaaacccgcugaguaccggaauugguccaagccucagugugggauuaccggauucgcccccuuuucuaaagacaacagcauccgccucuccgcgggcggggauaucugggugacaagagagccuuaugucucuugcgacccggauaaguguuaccaauucgcucugggacagggcaccacacuuaauaacgugcauagcaauaacaccguucgggaccgcacgcccuauagaacacugcucaugaaugaacugggggugccuuuucaccugggaaccaagcaggucugcauugccugguccucuagcuccugucaugauggcaaagccuggcuccacgugugcaucacaggcgacgauaagaacgcuaccgccagcuucauuuacaaugggcggcugguugacucuguggucuccuggagcaaagagauccuucgcacccaggaaucugagugugugugcauuaacggaacauguacgguggucaugaccgauggcuccgcuagcgggaaggccgacacaaaaauccuguuuaucgaggaaggaaagauuguucauaccuccacacucucuggcagcgcgcaacacguggaggaaugcuccugcuaucccagauacccuggggugcggugugucugccgcgauaacuggaagggaagcaauagacccaucguggacauuaacaucaaagaucacucuauuguuuccagcuacguguguucuggccuggucggcgacaccccgcggaagaaugacagcuccucuagcucccauugccuugauccuaacaaugaagggggaggccacggggugaaaggaugggccuucgacgauggcaacgacguuuggauggggcgcacgaucaaugagacaagcagacugggauaugagaccuuuaaggugaucgagggcuggucuaaccccaaauccaagcuccagauuaaucggcaggucaucguggaucgcggcgacagaagcggguacucuggaauuuucuccgucgaaggcaaaagcuguaucaaccggugcuuuuauguggagcugauuagagggcgcaaggaagagaccgaaguucuguggacauccaauucuaucguggucuucuguggaaccagcggcacauacgggacgggcuccuggccugauggagcugaccucaaccugaugcccauuuga

SEQ ID NO: 215081 - RNA, 1410 nt, Artificial Sequence; identical to SEQ ID NO: 215041
  derived and/or modified CDS sequence (opt5) from neuraminidase__InfluenzaA__AFN19562

SEQ ID NO: 215082 - RNA, 1410 nt, Artificial Sequence
  derived and/or modified CDS sequence (opt5) from neuraminidase__InfluenzaA__AFN19564
augaaccccaaucagaagaucauuaccaucggcagcgugucccugacaauuucuacgaucugcuucuuuaugcaaauugccauccucaucaccacagucacccugcacuucaaacaguacgaguuuaacagcccuccgaauaaccagguuaugcuuugugaacccacaauuaucgagagaaauauuaccgaaaucguguaucugacaaacaccacgauugagaaggaaaucugcccuaaacccgcugaguaccggaauugguccaagccucagugugggauuaccggauucgcccccuuuucuaaagacaacagcauccgccucuccgcgggcggggauaucugggugacaagagagccuuaugucucuugcgacccggauaaguguuaccaauucgcucugggacagggcaccacacuuaauaacgugcauagcaauaacaccguucgggaccgcacgcccuauagaacacugcucaugaaugaacugggggugccuuuucaccugggaaccaagcaggucugcauugccugguccucuagcuccugucaugauggcaaagccuggcuccacgugugcaucacaggcgacgauaagaacgcuaccgccagcuucauuuacaaugggcggcugguugacucuguggucuccuggagcaaagagauccuucgcacccaggaaucugagugugugugcauuaacggaacauguacgguggucaugaccgauggcuccgcuagcgggaaggccgacacaaaaauccuguuuaucgaggaaggaaagauuguucauaccuccacacucucuggcagcgcgcaacacguggaggaaugcuccugcuaucccagauacccuggggugcggugugucugccgcgauaacuggaagggaagcaauagacccaucguggacauuaacaucaaagaucacucuauuguuuccagcuacguguguucuggccuggucggcgacaccccgcggaagacggacagcuccucuagcucccauugccuugauccuaauaacgaggaagggggacacggcgugaaagggugggccuucgacgauggaaaugacguuuggaugggccgcacaaucaacgagaccagcagacugggguaugagaccuuuaaggugaucgaaggauggucuaaucccaaauccaagcuccagauuaaccggcaggucaucguggaucgcggcgacagaagcggcuacucugggauuuucuccgucgagggaaaaagcuguaucaaucggugcuuuuauguggaacugauuagaggccgcaaggaggaaacagagguucuguggaccuccaacucuaucguggucuucugugggacaagcggaacguacggcaccggguccuggccugauggcgcugaccucaaucugaugcccauuuga

SEQ ID NO: 215083 - RNA, 1410 nt, Artificial Sequence
  derived and/or modified CDS sequence (opt5) from neuraminidase__InfluenzaA__AFN19566
augaaccccaaucagaagaucauuaccaucggcagcgugucccugacaauuucuacgaucugcuucuuuaugcaaauugccauccucaucaccacagucacccugcacuucaaacaguacgaguuuaacagcccuccgaauaaccagguuaugcuuugugaacccacaauuaucgagagaaauauuaccgaaaucguguaucugacaaacaccacgauugagaaggaaaucugcccuaaacccgcugaguaccggaauugguccaagccucagugugggauuaccggauucgcccccuuuucuaaagacaacagcauccgccucuccgcgggcggggauaucugggugacaagagagccuuaugucucuugcgacccggauaaguguuaccaauucgcucugggacagggcaccacacuuaauaacgugcauagcaauaacaccguucgggaccgcacgcccuauagaacacugcucaugaaugaacugggggugccuuuucaccugggaaccaagcaggucugcauugccugguccucuagcuccugucaugauggcaaagccuggcuccacgugugcaucacaggcgacgauaagaacgcuaccgccagcuucauuuacaaugggcggcugguugacucuguggucuccuggagcaacgagauccuucgcacccaggaaucugagugugugugcauuaacggaacauguacgguggucaugaccgauggcuccgcuagcgggaaagccgacacaaagauccuguuuaucgaggaaggaaaaauuguucauaccuccacacucucuggcagcgcgcaacacguggaggaaugcuccugcuaucccagauacccuggggugcggugugucugccgcgauaauuggaagggaagcaacagacccaucguggacauuaauaucaaggaucacucuauuguuuccagcuacguguguucuggccuggucggcgacaccccgcggaaaaacgacagcuccucuagcucccauugccuugauccuaauaacgaggaagggggacacggcgugaaggggugggccuucgacgauggaaaugacguuuggaugggccgcacgaucaacgagacaagcagacugggguaugagaccuuuaaagugaucgaaggauggucuaaucccaaguccaaacuccagauuaaccggcaggucaucguggaucgcggcgacagaagcggcuacucugggauuuucuccgucgagggaaagagcuguaucaaucggugcuuuuauguggaacugauuagaggccgcaaagaggaaaacgagguucuguggaccuccaauucuaucguggucuucugugggacaagcggaaccuacggcacaggguccuggccugauggcgcugaccucaaccugaugcccauuuga

SEQ ID NO: 215084 - RNA, 1410 nt, Artificial Sequence
  derived and/or modified CDS sequence (opt5) from neuraminidase__InfluenzaA__AFN19568
augaaccccaaucagaagaucauuaccaucggcagcgugucccugacaauuucuacgaucugcuucuuuaugcaaauugccauccucaucaccacagucacccugcacuucaaacaguacgaguuuaacagcccuccgaauaaccagguuaugcuuugugaacccacaauuaucgagagaaauauuaccgaaaucguguaucugacaaacaccacgauugagaaggaaaucugcccuaaacccgcugaguaccggaauugguccaagccucagugugggauuaccggauucgcccccuuuucuaaagacaacagcauccgccucuccgcgggcggggauaucugggugacaagagagccuuaugucucuugcgacccggauaaguguuaccaauucgcucugggacagggcaccacacuuaauaacgugcauagcaauaacaccguucgggaccgcacgcccuauagaacacugcucaugaaugaacugggggugccuuuucaccugggaaccaagcaggucugcauugccugguccucuagcuccugucaugauggcaaagccuggcuccacgugugcaucacaggcgacgauaagaacgcuaccgccagcuucauuuacaaugggcggcugguugacucuguggucuccuggagcaaagagauccuucgcacccaggaaucugagugugugugcauuaacggaacauguacgguggucaugaccgauggcuccgcuagcgggaaggccgacacaaaaauccuguuuaucgaggaaggaaagauuguucauaccuccacacucucuggcagcgcgcaacacguggaggaaugcuccugcuaucccagauacccuggggugcggugugucugccgcgauaacuggaagggaagcaauagacccaucguggacauuaacaucaaagaucacucuauuguuuccagcuacguguguucuggccuggucggcgacaccccgcggaagaaugacagcuccucuagcucccauugccuugauccuaacaaugaggaagggggacacggcgugaaagggugggccuucgacgauggaaacgacguuuggaugggccgcacgaucaaugagacaagcagacugggguaugagaccuuuaaggugaucgaaggauggucuaaccccaaauccaagcuccaggucaaucgccaggugauugucgaucggggcgacagaagcggcuacucugggaucuucuccguggagggaaaaagcuguauuaaccggugcuuuuauguugaacugaucagaggccgcaaggaggaaauugaggugcuguggaccuccaauucuaucgucguguucugugggacaagcggaaccuacggcacaggguccuggccugauggcgcugaccucaaccugaugcccauuuga

SEQ ID NO: 215085 - RNA, 1410 nt, Artificial Sequence
  derived and/or modified CDS sequence (opt5) from neuraminidase__InfluenzaA__AFN19570
augaaccccaaucagaagaucauuaccaucggcagcgugucccugacaauuucuacgaucugcuucuuuaugcaaauugccauccucaucaccacagucacccugcacuucaaacaguacgaguuuaacuauccuccgaauaaccagguuaugcuuugugaacccacaauuaucgagagaaauauuaccgaaaucguguaccugacaaacaccacgauugagaaggaaaucugcccuaaacccgcugaguaucggaauuggagcaagccucagugugggauuaccggauucgcccccuuuuccaaagacaacucuauccgccucagcgcgggcggggauaucugggugacaagagagccuuacgucuccugcgacccggauaaguguuaucaauucgcucugggacagggcaccacacuuaauaacaugcauucuaauaacaccgugcgggaccgcacgcccuacagaacacugcucaugaaugaacuggggguuccuuuucaccugggaaccaaacaggugugcauugccuggagcuccagcucuugucaugauggcaaggccuggcuccacgucugcaucacaggcgacgauaagaacgcuaccgccuccuucauuuauaaugggcggcugguggacagcguugugucuugguccaacgagauccuucgcacccaggaaagcgagugugucugcauuaacggaacauguacgguggugaugaccgauggcucugcuuccgggaaagccgacacaaagauccuguuuaucgaggaaggaaaaauuguccauaccagcacacucuccggcucugcgcaacacguugaggaaugcagcugcuaccccagauacccuggggugcggugugugugccgcgauaauuggaagggauccaacagacccaucgucgacauuaauaucaaggaucacagcauugugucuuccuauguuuguagcggccuggugggcgacaccccgcggaaaaacgacucuagcuccucuagccauugccuugauccuaauaacgaggaagggggacacggcgucaaggggugggccuucgacgauggaaaugacguguggaugggccgcacgaucaacgagacauccagacugggguacgagaccuuuaaaguuaucgaaggauggagcaaucccaagucuaaacuccagauuaaccgccaggugaucgucgaucggggcgacagauccggcuauagcgggauuuucucuguggagggaaaguccuguaucaaucggugcuuuuacgucgaacugauuagaggccgcaaagaggaaaacgaggugcuguggaccagcaauuccaucguuguguucugugggacaucuggaaccuauggcacagggagcuggccugauggcgcugaccucaaccugaugcccauuuga

SEQ ID NO: 215086 - RNA, 1410 nt, Artificial Sequence
  derived and/or modified CDS sequence (opt5) from neuraminidase__InfluenzaA__AFN19572
augaaccccaaucagaagaucauuaccaucggcagcgugucccugacaauuucuacgaucugcuucuuuaugcaaauugccauccucaucaccacagucacccugcacuucaaacaguacgaguuuaacagcccuccgaauaaccagguuaugcuuugugaacccacaauuaucgagagaaauauuaccgaaaucguguaucugacaaacaccacgauugagaaggaaaucugcccuaaacccgcugaguaccggaauugguccaagccucagugugacauuaccggguucgcccccuuuucuaaagauaacagcauccgcaucuccgcgggaggcgacauuugggugacaagagagccuuaugucucuugcgauccggacaaguguuaccaauucgcucucgggcagggaaccacacugaauaacgugcauagcaauaacaccguucgggaucgcacgcccuauagaacacuucugaugaaugaacucggcgugccuuuucaccuggggaccaagcaggucugcaucgccugguccucuagcuccugucaugacggaaaagccuggcugcacgugugcauuacaggcgaugacaagaacgcuaccgccagcuucaucuacaauggcaaacucguugauucuguggucuccuggagcaaggagauucugcggacccaggaaucugagugugugugcaucaacgggacauguacgguggucaugaccgacggauccgcuagcggcaaagccgauacaaagauccuuuuuauugaggaagggaagaucguucauaccuccacacugucuggaagcgcgcaacacguggaggaaugcuccugcuauccccgcuacccuggcgugagaugugucugccgggacaacuggaaagggagcaaucgccccauuguggauaucaacauuaaggaccacucuaucguuuccagcuacguguguucuggacucgucggcgacaccccgagaaagaaugauagcuccucuagcucccauugccuggacccuaacaaugaggaaggcgggcacggagugaagggcugggccuucgaugacgggaacgauguuuggaugggacggacgaucaaugagacaagccgccuuggcuaugagaccuuuaaagugauugaaggguggucuaaccccaaguccaaacugcagaucaauagacaggucauuguggaccggggagaucgcagcggcuacucuggcaucuucuccgucgaggggaaaagcuguauuaacagaugcuuuuauguggaacucauccggggaagaaaggaggaaaccgagguucuguggacauccaauucuauuguggucuucuguggcaccagcgggacauacggaacgggcuccuggccugacggggcugaucugaaccucaugcccaucuga

SEQ ID NO: 215087 - RNA, 1410 nt, Artificial Sequence
  derived and/or modified CDS sequence (opt5) from neuraminidase__InfluenzaA__AFN19574
augaaccccaaucagaagaucauuaccaucggcagcgugucccugacaauuucuacgaucugcuucuuuaugcaaauugccauccucaucaccacagucacccugcacuucaaacaguacgaguuuaacagcccuccgaauaaccagguuaugcuuugugaacccacaauuaucgagagaaauauuaccgaaaucguguaucugacaaacaccacgauugagaaggaaaucugcccuaaacucgcugaguaccggaauugguccaagccccagugugacauuaccggguucgccccuuuuucuaaagauaacagcauccgccuguccgcgggaggcgacaucugggugacaagagagcccuaugucucuugcgauccuaauaaguguuaccaauucgcucuugggcagggaaccacacugaacaaugugcauagcaacaauaccguucgggaccgcacgccguauagaacacuccugaugaacgaacugggcgugcccuuucaccucgggaccaagcaggucugcauugccugguccucuagcuccugucaugauggaaaagccuggcugcacgugugcaucacaggcgacgauaagaaugcuaccgccagcuucauuuacaacggccggcuuguugacucuguggucuccuggagcaaaaagauccugcgcacccaggagucugaaugugugugcauuaacgggacauguacgguggucaugaccgauggauccgcuagcggcaaagccgacacaaagauccucuuuaucgaggaggggaagauuguucauaccuccacacugucuggaagcgcgcaacacguggaagagugcuccugcuauccuagauaccccggcgugcggugugucugccgcgauaauuggaaagggagcaacagaccuaucguggacauuaauaugaaggaucacucuaucguuuccagcuacguguguucuggacuugucggcgacacgccccggaaaaacgacagcuccucuagcucccauugcuucgauccgaaugacgaagagggcgggcacggagugaagggcugggccuuugaugacgggaacgauguuuggaugggacgcaccauuagcgaaaaaucuagacugggcuaugagacauucaaggugaucgaggggugguccaauccuaaaagcaagcuccagaucaaccggcaggucauuguggaccgcggagauagaucuggcuacuccggcaucuuuagcgucgaagggaaguccuguauuaaucggugcuucuauguggagcugaucagaggaucuaaagaagagaccgaaguucuguggaccagcaacuccauuguggucuucuguggcacaucugggaccuacggaacaggcagcuggcccgacggggcugauaucaaucucaugccuauuuga

SEQ ID NO: 215088 - RNA, 1410 nt, Artificial Sequence
  derived and/or modified CDS sequence (opt5) from neuraminidase__InfluenzaA__AFN19576
augaaccccaaucagaagaucauuaccaucggcagcgugucccugacaauuucuacgaucugcuucuuuaugcaaauugccauccucaucaccacagucacccugcacuucaaacaguacgaguuuaacagcccuccgaauaaccagaugaugcuuugugaacccacaauuaucgagagaaauauuaccgaaaucguuuaucugacaaacaccacgauugagaaggaaaucugcccuaaacccgcugaguaccggaauugguccaagccucagugugacauuaccggguucgcccccuuuucuaaagauaacagcauccgccucuccgcgggaggcgacaucugggugacaagagagccuuaugugucuugcgauccggacaaguguuaccaauucgcucuggggcagggaaccacacuuaauaacguccauagcaauaacaccgugcgggaucgcacgcccuauagaacacugcucaugaaugaacugggcguuccuuuucaccuggggaccaaacaggugugcauugccugguccucuagcuccugucaugacggaaaggccuggcuccacgucugcaucacaggcgaugacaagaacgcuaccgccagcuucauuuacaauggccggcugguggauucuguuguguccuggagcaaagagauccuucgcacccaggaaucugagugugucugcauuaacgggacauguacgguggugaugaccgacggauccgcuagcggcaaggccgauacaaaaauccuguuuaucgaggaagggaagauuguccauaccuccacacucucuggaagcgcgcaacacguugaggaaugcuccugcuaucccagauacccuggcgugcggugugugugccgcgacaacuggaaggggagcaauagacccaucgucgauauuaacaucaaagaccacucuauuguguccagcuacguuuguucuggacuggugggcgacaccccgcggaagaaugauagcuccucuagcucccauugccuugacccuaacaaugaggaaggcgggcacggagucaaaggcugggccuucgaugacgggaacgauguguggaugggacgcacgaucaaugagacaagcagacugggcuaugagaccuuuaagguuaucgaaggguggucuaaccccaaauccaagcuccagauuaaucgccaggugaucgucgaccggggagauagaagcggcuacucuggcauuuucuccguggaggggaaaagcuguaucaaccggugcuuuuaugucgaacugauuagaggacgcaaggaggaaaccgaggugcuguggacauccaauucuaucguuguguucuguggcaccagcgggacauacggaacgggcuccuggccugacggggcugaucucaaccugaugcccauuuga

SEQ ID NO: 215089 - RNA, 1410 nt, Artificial Sequence; identical to SEQ ID NO: 214994
  derived and/or modified CDS sequence (opt5) from neuraminidase__InfluenzaA__AFN19578

SEQ ID NO: 215090 - RNA, 1410 nt, Artificial Sequence; identical to SEQ ID NO: 214994
  derived and/or modified CDS sequence (opt5) from neuraminidase__InfluenzaA__AFN19582

SEQ ID NO: 215091 - RNA, 1410 nt, Artificial Sequence; identical to SEQ ID NO: 214994
  derived and/or modified CDS sequence (opt5) from neuraminidase__InfluenzaA__AFN19584

SEQ ID NO: 215092 - RNA, 1410 nt, Artificial Sequence; identical to SEQ ID NO: 214994
  derived and/or modified CDS sequence (opt5) from neuraminidase__InfluenzaA__AFN19588

SEQ ID NO: 215093 - RNA, 1410 nt, Artificial Sequence; identical to SEQ ID NO: 214994
  derived and/or modified CDS sequence (opt5) from neuraminidase__InfluenzaA__AFN19590

SEQ ID NO: 215094 - RNA, 1410 nt, Artificial Sequence; identical to SEQ ID NO: 215030
  derived and/or modified CDS sequence (opt5) from neuraminidase__InfluenzaA__AFN19592

SEQ ID NO: 215095 - RNA, 1410 nt, Artificial Sequence; identical to SEQ ID NO: 214994
  derived and/or modified CDS sequence (opt5) from neuraminidase__InfluenzaA__AFN19594

SEQ ID NO: 215096 - RNA, 1410 nt, Artificial Sequence; identical to SEQ ID NO: 215002
  derived and/or modified CDS sequence (opt5) from neuraminidase__InfluenzaA__AFN19596

SEQ ID NO: 215097 - RNA, 1410 nt, Artificial Sequence; identical to SEQ ID NO: 215002
  derived and/or modified CDS sequence (opt5) from neuraminidase__InfluenzaA__AFN19600

SEQ ID NO: 215098 - RNA, 1410 nt, Artificial Sequence
  derived and/or modified CDS sequence (opt5) from neuraminidase__InfluenzaA__AFN19602
augaaccccaaucagaagaucauuaccaucggcagcgugucccugacacucucuacgauuugcuucuuuaugcaaaucgccauucugaucaccacagucacccuucacuucaaacaguacgaguuuaacagcccuccgaauaaccagguuaugcugugugaacccacaaucauugagagaaauaugaccgaaaucguguaucucacaaacaccacgauugagaaggaaaucugcccuaaacccgcugaguaccggaauugguccaagccucagugugacauuaccggguucgcccccuuuucuaaagauaacagcauccgccuguccgcgggaggcgacauuugggugacaagagagccuuaugucucuugcgauccggacaaguguuaccaauucgcucuugggcagggaaccacacugaauaacgugcauagcaauaacaccguucgggaucgcacgcccuauagaacacuccugaugaaugaacugggcgugccuuuucaccucgggaccaagcaggucugcaucgccugguccucuagcuccugucaugacggaaaagccuggcugcacgugugcaucacaggcgaugacaagaacgcuaccgccagcuucauuuacaauggccggcuuguugauucuguggucuccuggagcaaagagauccugcgcacccaggaaucugagugugugugcauuaacgggacauguacgguggucaugaccgacggauccgcuagcggcaaggccgauacaaaaauccucuuuauugaggaagggaagaucguucauaccuccacacugucuggaagcgcgcaacacguggaggaaugcuccugcuaucccagauacccuggcgugcggugugucugccgcgacaacuggaaggggagcaauagacccaucguggauauuaacaucaaagaccacucuauuguuuccagcuacguguguucuggacuugucggcgacaccccgcggaagaaugauagcuccucuagcucccauugccuggacccuaacaaugaggaaggcgggcacggagugaaaggcugggccuucgaugacgggaacgauguuuggaugggacgcacgaucaaugagacaagcagacucggcuaugagaccuuuaaggugauugaaggguggucuaaccccaaauccaagcugcagaucaaucggcaggucaucguggaccgcagcgauagaucuggauacuccggcauuuucagcgucgagggcaaauccuguaucaaccggugcuuuuauguggaacugauuagagggcgcaaggaggaaaccgagguucucuggacaucuaauagcaucguggucuucuguggaaccuccggcacauacgggacgggaucuuggccugacggcgcugaucugaaccuuaugcccauuuga

SEQ ID NO: 215099 - RNA, 1410 nt, Artificial Sequence; identical to SEQ ID NO: 214994
  derived and/or modified CDS sequence (opt5) from neuraminidase__InfluenzaA__AFN19604

SEQ ID NO: 215100 - RNA, 1410 nt, Artificial Sequence; identical to SEQ ID NO: 214994
  derived and/or modified CDS sequence (opt5) from neuraminidase__InfluenzaA__AFN19606

SEQ ID NO: 215101 - RNA, 1410 nt, Artificial Sequence; identical to SEQ ID NO: 214994
  derived and/or modified CDS sequence (opt5) from neuraminidase__InfluenzaA__AFN19608

SEQ ID NO: 215102 - RNA, 1410 nt, Artificial Sequence; identical to SEQ ID NO: 214994
  derived and/or modified CDS sequence (opt5) from neuraminidase__InfluenzaA__AFN19610

SEQ ID NO: 215103 - RNA, 1410 nt, Artificial Sequence; identical to SEQ ID NO: 215002
  derived and/or modified CDS sequence (opt5) from neuraminidase__InfluenzaA__AFN19612

SEQ ID NO: 215104 - RNA, 1410 nt, Artificial Sequence; identical to SEQ ID NO: 214218
  derived and/or modified CDS sequence (opt5) from neuraminidase__InfluenzaA__AFN19614

SEQ ID NO: 215105 - RNA, 1410 nt, Artificial Sequence
  derived and/or modified CDS sequence (opt5) from neuraminidase__InfluenzaA__AFN19618
augaaccccaaucagaagaucauuaccaucggcagcgugucccugacaauuucuacgaucugcuucuuuaugcaaauugccauccucaucaccacagucacccugcacuucaaacaguacgaguuuaacagcccuccgaauaaccagguuaugcuuugugaacccacaauuaucgagagaaauauuaccgaaaucguguaucugacaaacaccacgauugagaaggaaaucugcccuaaacccgcugaguaccggaauugguccaagccucagugugggauuaccggauucgcccccuuuucuaaagacaacagcauccgccucuccgcgggcggggauaucugggugacaagagagccuuaugucucuugcgacccggauaaguguuaccaauucgcucugggacagggcaccacacuuaauaacgugcauagcaauaacaccguucgggaccgcacgcccuauagaacacugcucaugaaugaacugggggugccuuuucaccugggaaccaagcaggucugcauugccugguccucuagcuccugucaugauggcaaagccuggcuccacgugugcaucacaggcgacgauaagaacgcuaccgccagcuucauuuacaaugggcggcugguugacucuguggucuccuggagcaacgagauccuucgcacccaggaaucugagugugugugcauuaacggaacauguacgguggucaugaccgauggcuccgcuagcgggaaagccgacacaaagauccuguuuaucgaggaaggaaaaauuguucauaccuccacacucucuggcagcgcgcaacacguggaggaaugcuccugcuaucccagauacccuggggugcggugugucugccgcgauaauuggaagggaagcaacagacccaucguggacauuaauaucaaggaucacucuauuguuuccagcuacguguguucuggccuggucggcgacaccccgcggaaaaacgacagcuccucuagcucccauugccuugauccuaauaacgaggaagggggacacggcgugaaggggugggccuucgacgauggaaaugacguuuggaugggccgcacgaucaacgagacaagcagacugggguaugagaccuuuaaagugaucgaaggauggucuaaucccaaguccaaacuccagauuaaccggcaggucaucguggaucgcggcgacagaagcggcuacucugggauuuucuccgucgagggaaagagcuguaucaaucggugcuuuuauguggaacugauuagaggccgcaaagaggaaaccgagguucuguggacauccaacucuaucguggucuucugugggaccagcggaacauacggcacgggguccuggccugauggcgcugaccucaaucugaugcccauuuga

SEQ ID NO: 215106 - RNA, 1410 nt, Artificial Sequence; identical to SEQ ID NO: 214994
  derived and/or modified CDS sequence (opt5) from neuraminidase__InfluenzaA__AFN19620

SEQ ID NO: 215107 - RNA, 1410 nt, Artificial Sequence; identical to SEQ ID NO: 215030
  derived and/or modified CDS sequence (opt5) from neuraminidase__InfluenzaA__AFN19624

SEQ ID NO: 215108 - RNA, 1410 nt, Artificial Sequence; identical to SEQ ID NO: 214994
  derived and/or modified CDS sequence (opt5) from neuraminidase__InfluenzaA__AFN19630

SEQ ID NO: 215109 - RNA, 1410 nt, Artificial Sequence
  derived and/or modified CDS sequence (opt5) from neuraminidase__InfluenzaA__AFN19632
augaaccccaaucagaagaucauuaccaucggcagcgugucccugacaauuucuacgaucugcuucuuuaugcaaauugccauccucaucaccacagucacccugcacuucaaacaguacgaguuuaacagcccuccgaauaaccagguuaugcuuugugaacccacaauuaucgagagaaauauuaccgaaaucguguaucugacaaacaccacgauugagaaggaaaucugcccuaaacccaccgaguaccggaauugguccaagccucagugugacauuacaggguucgcucccuuuucuaaagauaacagcauccgccucuccgccggaggcgacaucugggugaccagagagccuuaugucucuugcgauccggacaaguguuaccaauucgcgcuggggcagggaacaacccuuaauaacgugcauagcaauaacacgguucgggaucgcacacccuauagaacccugcucaugaaugaacugggcgugccuuuucaccuggggacaaagcaggucugcauugcuugguccucuagcuccugucaugacggaaaagccuggcuccacgugugcaucaccggcgaugacaagaacgccaccgcuagcuucauuuacaauggccggcugguugauucuguggucuccuggagcaaagagauccuucgcacacaggaaucugagugugugugcauuaacgggacguguaccguggucaugacagacggauccgccagcggcaaggcugauaccaaaauccuguuuaucgaggaagggaagauuguucauacauccacccucucuggaagcgcccaacacguggaggaaugcuccugcuaucccagauacccuggcgugcggugugucugccgcgacaacuggaaggggagcaauagacccaucguggauauuaacaucaaagaccacucuauuguuuccagcuacguguguucuggacuggucggcgacacgccgcggaagaaugauagcuccucuagcucccauugccuugacccuaacaaugaggaaggcgggcacggagugaaaggcugggcguucgaugacgggaacgauguuuggaugggacgcacaaucaaugagaccagcagacugggcuaugagaccuuuaaggugaucgaaggguggucuaaccccaaauccaagcuccagauuaaucggcaggucaucguggaccgcggagauagaagcggcuacucuggcauuuucuccgucgaggggaaaagcuguaucaaccggugcuuuuauguggaacugauuagaggacgcaaggaggaaacagagguucuguggaccuccaauucuaucguggucuucuguggcacaagcgggacguacggaaccggcuccuggccugacggggccgaucucaaccugaugcccauuuga

SEQ ID NO: 215110 - RNA, 1410 nt, Artificial Sequence
  derived and/or modified CDS sequence (opt5) from neuraminidase__InfluenzaA__AFN19634
augaaccccaaucagaagaucauuaccaucggcagcgugucccugacaauuucuacgaucugcuucuuuaugcaaauugccauccucaucaccacagucacccugcacuucaaacaguacgaguuuaacagcccuccgaauaaccagguuaugcuuugugaacccacaauuaucgagagaaauauuaccgaaaucguguaucugacaaacaccacgauugagaaggaaaucugcccuaaacccgcugaguaccggaauugguccaagccucagugugacauuaccggguucgcccccuuuucuaaagauaacagcauccgccucuccgcgggaggcgacaucugggugacaagagagccuuaugucucuugcgauccggacaaguguuaccaauucgcucuggggcagggaaccacacuuaauaacgugcauagcaauaacaccguucgggaucgcacguccuauagaacacugcucaugaaugaacugggcgugcccuuucaccuggggaccaagcaggucugcauugccuggucuagcuccagcugucaugacggaaaagccuggcuccacgugugcaucacaggcgaugacaagaacgcuaccgccucuuucauuuacaauggccggcugguugauuccguggucagcuggucuaaagagauccuucgcacccaggaauccgagugugugugcauuaacgggacauguacgguggucaugaccgacggaagcgcuuccggcaaggccgauacaaaaauccuguuuaucgaggaagggaagauuguucauaccucuacacucagcggauccgcgcaacacguggaggaaugcagcugcuauccuagauaccccggcgugcggugugucugccgcgacaacuggaaggggucuaauagaccuaucguggauauuaacaucaaagaccacuccauuguuagcucuuacguguguagcggacuggucggcgacacgccccggaagaaugauuccucuagcuccagccauugccuugacccgaacaaugaggaaggcgggcacggagugaaaggcugggccuucgaugacgggaacgauguuuggaugggacgcaccaucaaugagacaucuagacugggcuaugagaccuuuaaggugaucgaagggugguccaacccuaaaagcaagcuccagauuaaucggcaggucaucguggaccgcggagauagaucuggcuacuccggcauuuucagcgucgaggggaaauccuguaucaaccggugcuuuuauguggaacugauuagaggacgcaaggaggaaaccgagguucuguggacaucuaauagcaucguggucuucuguggcaccuccgggacauacggaacgggcucuuggcccgacggggcugaucucaaccugaugccuauuuga

SEQ ID NO: 215111 - RNA, 1410 nt, Artificial Sequence
  derived and/or modified CDS sequence (opt5) from neuraminidase__InfluenzaA__AFN19636
augaaccccaaucagaagaucauuaccaucggcagcgugucccugacaauuucuacgaucugcuucuuuaugcaaauugccauccucaucaccacagucacccugcacuucaaacaguacgaguuuaacagcccuccgaauaaccagguuaugcuuugugaacccacaauuaucgagagaaauauuaccgaaaucguguaucugacaaacaccauuaucgagaaggaaauuugcccuaaacccacggaguaccggaauugguccaagccucagugugacaucaccggguucgcucccuuuucuaaagauaacagcauccgccucuccgccggaggcgacauuugggugacaagagagccuuaugucucuugcgauccggacaaguguuaccaauucgcgcuggggcagggaaccacacuuaauaacgugcauagcaauaacaccguucgggaucgcacgcccuauagaacacugcucaugaaugaacugggcgugccuuuucaccuggggaccaagcaggucugcaucgcuugguccucuagcuccugucaugacggaaaagccuggcuccacgugugcauuacaggcgaugacaagaacgccaccgcuagcuucaucuacaauggccggcugguugauucuguggucuccuggagcaaagagauucuucgcacccaggaaucugagugugugugcaucaacgggacauguacgguggucaugaccgacggauccgccagcggcaaggcugauacaaaaauccuguuuauugaggaagggaagaucguucauaccuccacacucucuggaagcgcccaacacguggaggaaugcuccugcuaucccagauacccuggcgugcggugugucugccgcgacaacuggaaggggagcaauagacccauuguggauaucaacauuaaagaccacucuaucguuuccagcuacguguguucuggacuggucggcgacaccccgcggaagaaugauagcuccucuagcucccauugccuugacccuaacaaugaggaaggcgggcacggagugaaaggcugggcguucgaugacgggaacgauguuuggaugggacgcacgaucaaugagacaagcagacugggcuaugagaccuuuaaggugauugaaggguggucuaaccccaaauccaagcuccagaucaaucggcaggucauuguggaccgcggagauagaagcggcuacucuggcaucuucuccgucgaggggaaaagcuguauuaaccggugcuuuuauguggaacugaucagaggacgcaaggaggaaaccgagguucuguggacauccaauucuauuguggucuucuguggcaccagcgggacauacggaacgggcuccuggccugacggggccgaucucaaccugaugcccaucuga

SEQ ID NO: 215112 - RNA, 1410 nt, Artificial Sequence; identical to SEQ ID NO: 215111
  derived and/or modified CDS sequence (opt5) from neuraminidase__InfluenzaA__AFN19638

SEQ ID NO: 215113 - RNA, 1410 nt, Artificial Sequence; identical to SEQ ID NO: 214994
  derived and/or modified CDS sequence (opt5) from neuraminidase__InfluenzaA__AFN19640

SEQ ID NO: 215114 - RNA, 1410 nt, Artificial Sequence
  derived and/or modified CDS sequence (opt5) from neuraminidase__InfluenzaA__AFN19642
augaaccccaaucagaagaucauuaccaucggcagcgugucccugacaauuucuacgaucugcuucuuuaugcaaauugccauccucaucaccacagucacccugcacuucaaacaguacgaguuuaacagcccuccgaauaaccagguuaugcuuugugaacccacaauuaucgagagaaauaugaccgaaauuguguaucugacaaacaccacgaucgagaaggaaauuugcccuaaacccgcugaguaccggaauugguccaagccucagugugacaucaccggguucgcccccuuuucuaaagauaacagcauucgccucuccgcgggaggcgacaucugggugacaagagagccuuaugucucuugcgauccggacaaguguuaccaauucgcucuggggcagggaaccacacuuaauaacgugcauagcaauaacaccguuuccgaucggacgcccuaucgcacacugcucaugaaugaacugggcgugccuuuucaccuggggaccaagcaggucugcaucgccuggucuagcuccagcugucaugacggaaaagccuggcuccacgugugcauuacaggcgaugacaagaacgcuaccgccucuuucaucuacaauggcagacugguugauuccguggucagcuggucuaaagagauucuucggacccaggaauccgagugugugugcaucaacgggacauguacgguggucaugaccgacggaagcgcuuccggcaaggccgauacaaaaauucuguuuaucgaggaagggaagaucguucauaccucuacacucagcggauccgcgcaacacguggaggaaugcagcugcuauccccgcuacccuggcgugagaugugucugccgggacaacuggaaggggucuaaucgccccauuguggauaucaacauuaaagaccacuccaucguuagcucuuacguguguagcggacuggucggcgacaccccgagaaagaaugauuccucuagcuccagccauugccuugacccuaacaaugaggaaggcgggcacggagugaaaggcugggccuucgaugacgggaacgauguuuggaugggacggacgauuaaugagacaucucgccugggcuaugagaccuuuaaggugaucgaagggugguccaaccccaaaagcaagcuccagaucaauagacaggucauuguggaccggucugaucgcuccggauacagcggcaucuucuccgucgagggcaaaucuuguauuaacagaugcuuuuauguggaacugauccgggggagaaaggaggaaaccgagguucuguggacaagcaauuccauuguggucuucuguggaaccucuggcacauacgggacgggaagcuggccugacggcgcugaucucaaccugaugcccaucuga

SEQ ID NO: 215115 - RNA, 1410 nt, Artificial Sequence; identical to SEQ ID NO: 215111
  derived and/or modified CDS sequence (opt5) from neuraminidase__InfluenzaA__AFN19644

SEQ ID NO: 215116 - RNA, 1410 nt, Artificial Sequence
  derived and/or modified CDS sequence (opt5) from neuraminidase__InfluenzaA__AFN19646
augaaccccaaucagaagaucauuaccaucggcagcgugucccugacaauuucuacgaucugcuucuuuauucaaaucgccauccucauuaccacagucacccugcacuucaaacaguacgaguuuaacagcccuccgaauaaccagguuaugcuuugugaacccacaaucauugagagaaauaucaccgaaauuguguaucugacaaacaccacgaucgagaaggaaauuugcccuaaacccgcugaguaccggaauugguccaagccucagugugacaucaccggguucgcccccuuuucuaaagauaacagcauccgccucuccgcgggaggcgacauuugggugacaagagagccuuaugucucuugcgauccggacaaguguuaccaauucgcucuggggcagggaaccacacuuaauaacgugcauagcaauaacaccguucgggaucgcacgcccuauagaacacugcucaugaaugaacugggcgugccuuuucaccuggggaccaagcaggucugcaucgccugguccucuagcuccugucaugacggaaaagccuggcuccacgugugcauuacaggcgaugacaagaacgcuaccgccagcuucaucuacaauggccggcugguugauucuguggucuccuggagcaaagagauucuucgcacccaggaaucugagugugugugcaucaacgggacauguacgguggucaugaccgacggauccgcuagcggcaaggccgauacaaaaauccuguuuauugaggaagggaagaucguucauaccuccacacucucuggaagcgcgcaacacguggaggaaugcuccugcuaucccagauacccuggcgugcggugugucugccgcgacaacuggaaggggagcaauagacccauuguggauaucaacauuaaagaccacucuaucguuuccagcuacguguguucuggacuggucggcgacaccccgcggaagaaugauagcuccucuagcucccauugccuugacccuaacaaugaggaaggcgggcacggagugaaaggcugggccuucgaugacgggaacgauguuuggaugggacgcacgaucaaugagacaagcagacugggcuaugagaccuuuaaggugauugaaggguggucuaaccccaaauccaagcuccagaucaaucggcaggucauugugaaccgcagcgacagaucuggauacuccggcaucuucagcgucgagggcaaauccuguauuaaucggugcuuuuauguggaacugaucagagggcgcaaggaggaaaccgagguucuguggacaucuaacagcauuguggucuucuguggaaccuccggcacauacgggacgggaucuuggccugauggcgcugaccucaaucugaugcccaucuga

SEQ ID NO: 215117 - RNA, 1410 nt, Artificial Sequence; identical to SEQ ID NO: 214994
  derived and/or modified CDS sequence (opt5) from neuraminidase__InfluenzaA__AFN19648

SEQ ID NO: 215118 - RNA, 1410 nt, Artificial Sequence; identical to SEQ ID NO: 215030
  derived and/or modified CDS sequence (opt5) from neuraminidase__InfluenzaA__AFN19650

SEQ ID NO: 215119 - RNA, 1410 nt, Artificial Sequence
  derived and/or modified CDS sequence (opt5) from neuraminidase__InfluenzaA__AFN19652
augaaccccaaucagaagaucauuaccaucggcagcgugucccugacaauuucuacgaucugcuucuuuaugcaaauugccauccucaucaccacagucacccugcacuucaaacaguacgaguuuaacagcccuccgaauaaccagguuaugcuuugugaacccacaauuaucgagagaaauauuaccgaagugguguaucugacaaacaccacgaucgagaaggaaauuugcccuaaacccgcugaguaccggaauugguccaagccucagugugacaucaccggguucgcccccuuuucuaaagauaacagcauucgccucuccgcgggaggcgacaucugggucacaagagagccuuaugugucuugcgauccggacaaguguuaccaauucgcucuggggcagggaaccacacuuaauaacguucauagcaauaacaccgugcgggaucgcacgcccuauagaacacugcucaugaaugaacugggcgucccuuuucaccuggggaccaaacaggugugcaucgccugguccucuagcuccugucaugacggaaaggccuggcuccacguuugcauuacaggcgaugacaagaacgcuaccgccagcuucaucuacaauggccggcugguggauucugucguguccuggagcaaagagauucuucgcacccaggaaucugagugugugugcaucaacgggacauguacggucguuaugaccgacggauccgcuagcggcaaggccgauacaaaaauucuguuuaucgaggaagggaagaucgugcauaccuccacacucucuggaagcgcgcaacacguggaggaaugcuccugcuaucccagauacccuggcguccggugugugugccgcgacaacuggaaggggagcaauagacccauuguugauaucaacauuaaagaccacucuaucguguccagcuacgucuguucuggacuggugggcgacaccccgcggaagaaugauagcuccucuagcucccauugccuugacccuaacaaugaggaaggcgggcacggaguuaaaggcugggccuucgaugacgggaacgauguguggaugggacgcacgauuaaugagacaagcagacugggcuaugagaccuuuaaggucaucgaaggguggucuaaccccaaauccaagcuccagaucaaucgccaggugauugucgaccggggagauagaagcggcuacucuggcaucuucuccguggaggggaaaagcuguauuaaccggugcuuuuauguugaacugaucagaggacgcaaggaggaaaccgaggugcuguggacauccaauucuauugucguguucuguggcaccagcgggacauacggaacgggcuccuggccugacggggcugaucucaaccugaugcccaucuga

SEQ ID NO: 215120 - RNA, 1410 nt, Artificial Sequence
  derived and/or modified CDS sequence (opt5) from neuraminidase__InfluenzaA__AFN19654
augaaccccaaucagaagaucauuaccaucggcagcgugucccugacaauuucuacgaucugcuucuuuaugcaaauugccauccucaucaccacagucacccugcacuucaaacaguacgaguuuaacagcccuccgaauaaccagguuaugcuuugugaacccacaauuaucgagagaaauauuaccgaaaucguguaucugacaaacaccacgauugagaaggaaaccugcccuaaacccacagaguaccggaauugguccaagccucagugugacaucaccggguucgcucccuuuucuaaagauaacagcauucgccucuccgccggaggcgacaucugggugacaagagagccuuaugucucuugcgauccggacaaguguuaccaauucgcgcuggggcagggaaccacgcuuaauaacgugcauagcaauaacacaguucgggaucgcacccccuauagaacacugcucaugaaugaacugggcgugccuuuucaccuggggaccaagcaggucugcaucgcuugguccucuagcuccugucaugacggaaaagccuggcuccacgugugcauuaccggcgaugacaagaacgccacagcuagcuucaucuacaauggccggcugguugauucuguggucuccuggagcaaagagauucuucgcacgcaggaaucugagugugugugcaucaacgggaccuguacaguggucaugaccgacggauccgccagcggcaaggcugauacaaaaauucuguuuaucgaggaagggaagaucguucauaccuccacgcucucuggaagcgcccaacacguggaggaaugcuccugcuaucccagauacccuggcgugcggugugucugccgcgacaacuggaaggggagcaauagacccauuguggauaucaacauuaaagaccacucuaucguuuccagcuacguguguucuggacuggucggcgacacaccgcggaagaaugauagcuccucuagcucccauugccuugacccuaacaaugaggaaggcgggcacggagugaaaggcugggcguucgaugacgggaacgauguuuggaugggacgcaccauuaaugagaccagcagacugggcuaugagacauuuaaggugaucgaaggguggucuaaccccaaauccaagcuccagaucaaucggcaggucauuguggaccgcggagauagaagcggcuacucuggcaucuucuccgucgaggggaaaagcuguauuaaccggugcuuuuauguggaacugaucagaggacgcaaggaggaaaccgagguucuguggacauccaauucuauuguggucuucuguggcacgagcgggaccuacggaacaggcuccuggccugacggggccgaucucaaccugaugcccaucuga

SEQ ID NO: 215121 - RNA, 1410 nt, Artificial Sequence; identical to SEQ ID NO: 214994
  derived and/or modified CDS sequence (opt5) from neuraminidase__InfluenzaA__AFN19656

SEQ ID NO: 215122 - RNA, 1410 nt, Artificial Sequence; identical to SEQ ID NO: 214218
  derived and/or modified CDS sequence (opt5) from neuraminidase__InfluenzaA__AFN19658

SEQ ID NO: 215123 - RNA, 1410 nt, Artificial Sequence; identical to SEQ ID NO: 215111
  derived and/or modified CDS sequence (opt5) from neuraminidase__InfluenzaA__AFN19660

SEQ ID NO: 215124 - RNA, 1410 nt, Artificial Sequence; identical to SEQ ID NO: 214218
  derived and/or modified CDS sequence (opt5) from neuraminidase__InfluenzaA__AFN19662

SEQ ID NO: 215125 - RNA, 1410 nt, Artificial Sequence
  derived and/or modified CDS sequence (opt5) from neuraminidase__InfluenzaA__AFN19664
augaaccccaaucagaagaucauuaccaucggcagcgugucccugacaauuucuacgaucugcuucuuuaugcaaauugccauccucaucaccacagucacccugcacuucaaacaguacgaguuuaacagcccuccgaauaaccagguuaugcuuugugaacccacaauuaucgagagaaauauuaccgaaaucguguaucugacaaacaauaccauugagaaggaaaucugcccuaaacccgcugaguaccggaacugguccaagccucagugugggauuacgggauucgcccccuuuucuaaagacaauagcauccgccucuccgcgggcggggauaucugggugaccagagagccuuaugucucuugcgacccggauaaguguuaccaauucgcucugggacagggcacaacccuuaacaaugugcauagcaacaauacaguucgggaccgcacccccuauagaacgcugcucaugaacgaacugggggugccuuuucaccugggaacaaagcaggucugcauugccugguccucuagcuccugucaugauggcaaagccuggcuccacgugugcaucaccggcgacgauaagaaugcuacagccagcuucauuuacaacgggcggcugguugacucuguggucuccuggagcaaagagauccuucgcacccaggaaucugagugugugugcauuaacggaaccuguacaguggucaugacggauggcuccgcuagcgggaaggccgacaccaaaauccuguuuaucgaggaaggaaagauuguucauacauccacccucucuggcagcgcgcaacacguggaggaaugcuccugcuaucccagauacccuggggugcggugugucugccgcgauaauuggaagggaagcaacagacccaucguggacauuaauaucaaagaucacucuauuguuuccagcuacguguguucuggccuggucggcgacacaccgcggaagaacgacagcuccucuagcucccauugccuugauccuaauaacgaggaagggggacacggcgugaaagggugggccuucgacgauggaaaugacguuuggaugggccgcaccaucaacgagacgagcagacugggguaugagacauuuaaggugaucgaaggauggucuaaucccaaauccaagcuccagauuaaccggcaggucaucguggaucgcggcgacagaagcggcuacucugggauuuucuccgucgagggaaaaagcuguaucaaucggugcuuuuauguggaacugauuagaggccgcaaggaggaaaccgagguucuguggaccuccaacucuaucguggucuucugugggacaagcggaaccuacggcacaggguccuggccugauggcgcugaccucaaucugaugcccauuuga

SEQ ID NO: 215126 - RNA, 1410 nt, Artificial Sequence
  derived and/or modified CDS sequence (opt5) from neuraminidase__InfluenzaA__AFN19666
augaaccccaaucagaagaucauuaccaucggcagcgugucccugacaauuucuacgaucugcuucuuuaugcaaauugccauccucaucaccacagucacccugcacuucaaacaguacgaguuuaacagcccuccgaauaaccagguuaugcuuugugaacccacaauuaucgagagaaauaugaccgaaauuguguaucugacaaacaccacgaucgagaaggaaauuugcccuaaacccgcugaguaccggaauugguccaagccucagugugacaucaccggguucgcccccuuuucuaaagauaacagcauucgccucuccgcgggaggcgacaucugggugacaagagagccuuaugucucuugcgauccggacaaguguuaccaauucgcucuggggcagggaaccacacuuaauaacgugcauagcaauaacaccguucgggaucgcacgcccuauagaacacugcucaugaaugaacugggcgugccuuuucaccuggggaccaagcaggucugcaucgccugguccucuagcuccugucaugacggaaaagccuggcuccacgugugcauuacaggcgaugacaagaacgcuaccgccagcuucaucuacaauggccggcugguugauucuguggucuccuggagcaaagagauucuucgcacccaggaaucugagugugugugcaucaacgggacauguacgguggucaugaccgacggauccgcuagcggcaaggccgauacaaaaauucuguuuaucgaggaagggaagaucguucauaccuccacacucucuggaagcgcgcaacacguggaggaaugcuccugcuaucccagauacccuggcgugcggugugucugccgcgacaacuggaaggggagcaauagacccauuguggauaucaacauuaaagaccacucuaucguuuccagcuacguguguucuggacuggucggcgacaccccgcggaagaaugauagcuccucuagcucccauugccuugacccuaacaaugaggaaggcgggcacggagugaaaggcugggccuucgaugacgggaacgauguuuggaugggacgcacgauuaaugagacaagcagacugggcuaugagaccuuuaaggugaucgaaggguggucuaaccccaaauccaagcuccagaucaaucggcaggucauugugaaccgcagcgacagaucuggauacuccggcaucuucagcgucgagggcaaauccuguauuaaucggugcuuuuauguggaacugaucagagggcgcaaggaggaaaccgagguucuguggacaucuaacagcauuguggucuucuguggaaccuccggcacauacgggacgggaucuuggccugauggcgcugaccucaaucugaugcccaucuga

SEQ ID NO: 215127 - RNA, 1410 nt, Artificial Sequence
  derived and/or modified CDS sequence (opt5) from neuraminidase__InfluenzaA__AFN19668
augaaccccaaucagaagaucauuaccaucggcagcgugucccugacaauuucuacgaucugcuucuuuaugcaaauugccauccucaucaccacagucacccugcacuucaaacaguacgaguuuaacagcccuccgaauaaccagguuaugcuuugugaacccacaauuaucgagagaaauaugaccgaaauuguguaucugacaaacaccacgaucgagaaggaaauuugcccuaaacccgcugaguaccggaauugguccaagccucagugugacaucaccggguucgcccccuuuucuaaagauaacagcauucgccucuccgcgggaggcgacaucugggugacaagagagccuuaugucucuugcgauccggacaaguguuaccaauucgcucuggggcagggaaccacacuuaauaacgaacauagcaauaacaccgugcgggaucgcacgcccuauagaacacugcucaugaaugagcugggcguuccuuuucaccuggggaccaaacaggugugcaucgccugguccucuagcuccugucaugacggaaaggccuggcuccacgucugcauuacaggcgaugacaagaacgcuaccgccagcuucaucuacaauggccggcugguggauucuguuguguccuggagcaaagaaauucuucgcacccaggagucugagugugucugcaucaacgggacauguacgguggugaugaccgacggauccgcuagcggcaaggccgauacaaaaauucuguuuaucgaagaggggaagaucguccauaccuccacacucucuggaagcgcgcaacacguugaagagugcuccugcuaucccagauacccuggcgugcggugugugugccgcgacaacuggaaggggagcaauagacccauugucgauaucaacauuaaagaccacucuaucguguccagcuacguuuguucuggacuggugggcgacaccccgcggaagaaugauagcuccucuagcucccauugccuugacccuaacaaugaagagggcgggcacggagucaaaggcugggccuucgaugacgggaacgauguguggaugggacgcacgauuaaugagacaagcagacugggcuaugaaaccuuuaagguuaucgagggguggucuaaccccaaauccaagcuccagaucaaucgccaggugauugucgaccggagcgauagaucuggauacuccggcaucuucagcguggaaggcaaauccuguauuaaccggugcuuuuaugucgagcugaucagagggcgcaaggaagagaccgaggugcuguggacaucuaauagcauuguuguguucuguggaaccuccggcacauacgggacgggaucuuggccugacggcgcugaucucaaccugaugcccaucuga

SEQ ID NO: 215128 - RNA, 1410 nt, Artificial Sequence; identical to SEQ ID NO: 215030
  derived and/or modified CDS sequence (opt5) from neuraminidase__InfluenzaA__AFN19670

SEQ ID NO: 215129 - RNA, 1410 nt, Artificial Sequence; identical to SEQ ID NO: 214218
  derived and/or modified CDS sequence (opt5) from neuraminidase__InfluenzaA__AFN19673

SEQ ID NO: 215130 - RNA, 1410 nt, Artificial Sequence; identical to SEQ ID NO: 214994
  derived and/or modified CDS sequence (opt5) from neuraminidase__InfluenzaA__AFN19675

SEQ ID NO: 215131 - RNA, 1410 nt, Artificial Sequence
  derived and/or modified CDS sequence (opt5) from neuraminidase__InfluenzaA__AFN19677
augaaccccaaucagaagaucauuaccaucggcagcgugucccugacaauuucuaucauuugcuucuuuaugcaaaucgccauccucauuacgaccgucacacugcacuucaaacaguacgaguuuaacagcccuccgaauaaccagguuaugcuuugugaacccaccaucauugagagaaauaucacagaaauuguguaucugaccaacacaaccaucgagaaggaaauuugcccuaaacccgcugaguaccggaauugguccaagccucagugugacaucacgggguucgcccccuuuucuaaagauaacagcauccgccucuccgcgggaggcgacauuugggugaccagagagccuuaugucucuugcgauccggacaaguguuaccaauucgcucuggggcagggaacaacccuuaauaacgugcauagcaauaacacaguucgggaucgcacccccuauagaacgcugcucaugaaugaacugggcgugccuuuucaccuggggacaaagcaggucugcaucgccugguccucuagcuccugucaugacggaaaagccuggcuccacgugugcauuaccggcgaugacaagaacgcuacagccagcuucaucuacaauggccggcugguugauucuguggucuccuggagcaaagagauucuucgcacccaggaaucugagugugugugcaucaacgggaccuguacaguggucaugacggacggauccgcuagcggcaaggccgauaccaaaauccuguuuauugaggaagggaagaucguucauacauccacccucucuggaagcgcgcaacacguggaggaaugcuccugcuaucccagauacccuggcgugcggugugucugccgcgacaacuggaaggggagcaauagacccauuguggauaucaacauuaaagaccacucuaucguuuccagcuacguguguucuggacuggucggcgacacaccgcggaagaaugauagcuccucuagcucccauugccuugacccuaacaaugaggaaggcgggcacggagugaaaggcugggccuucgaugacgggaacgauguuuggaugggacgcaccaucaaugagacgagcagacugggcuaugagacauuuaaggugauugaaggguggucuaaccccaaauccaagcuccagaucaaucggcaggucauuguggaccgcggagauagaagcggcuacucuggcaucuucuccgucgaggggaaaagcuguauuaaccggugcuuuuauguggaacugaucagaggacgcaaggaggaaaccgagguucuguggaccuccaauucuauuguggucuucuguggcacaagcgggaccuacggaacaggcuccuggccugacggggcugaucucaaccugaugcccaucuga

SEQ ID NO: 215132 - RNA, 1410 nt, Artificial Sequence; identical to SEQ ID NO: 215030
  derived and/or modified CDS sequence (opt5) from neuraminidase__InfluenzaA__AFN19683

SEQ ID NO: 215133 - RNA, 1410 nt, Artificial Sequence; identical to SEQ ID NO: 214994
  derived and/or modified CDS sequence (opt5) from neuraminidase__InfluenzaA__AFN19685

SEQ ID NO: 215134 - RNA, 1410 nt, Artificial Sequence; identical to SEQ ID NO: 214994
  derived and/or modified CDS sequence (opt5) from neuraminidase__InfluenzaA__AFN19687

SEQ ID NO: 215135 - RNA, 1410 nt, Artificial Sequence; identical to SEQ ID NO: 214994
  derived and/or modified CDS sequence (opt5) from neuraminidase__InfluenzaA__AFN19689

SEQ ID NO: 215136 - RNA, 1410 nt, Artificial Sequence; identical to SEQ ID NO: 214218
  derived and/or modified CDS sequence (opt5) from neuraminidase__InfluenzaA__AFN19691

SEQ ID NO: 215137 - RNA, 1410 nt, Artificial Sequence
  derived and/or modified CDS sequence (opt5) from neuraminidase__InfluenzaA__AFN19693
augaaccccaaucagaagaucauuaccaucggcagcgugucccugacaauuucuacgaucugcuucuuuaugcaaauugccauccucaucaccacagucacccugcacuucaaacaguacgaguuuaacagcccuccgaauaaccagguuaugcuuugugaacccacaauuaucgagagaaauauuaccgaaaucguguaucugacaaacaccacgauugagaaggaaaucugcccuaaacucgcugaguaccggaauugguccaagccccagugugacauuaccggguucgccccuuuuucuaaagauaacagcauccgccuguccgcgggaggcgacaucugggugacaagagagcccuaugucucuugcgauccugacaaguguuaccaauucgcucuugggcagggaaccacacugaauaacgugcauagcaauaacaccguucgggaucgcacgccguauagaacacuccugaugaaugaacugggcgugcccuuucaccucgggaccaagcaggucugcauugccugguccucuagcuccugucaugacggaaaagccuggcugcacgugugcaucacaggcgaugacaagaacgcuaccgccagcuucauuuacaauggccggcuuguugauucuguggucuccuggagcaaagacauccugcgcacccaggagucugaaugugugugcauuaacgggacaugugcuguggucaugacggauggauccgccagcggcaaggcggacaccaaaauccucuuuaucgaggaggggaagauuguucauacauccacccugucuggaagcgcccaacacguggaagagugcuccugcuauccuagauaccccggcgugcggugugucugccgcgauaacuggaaggggagcaauagaccuaucguggacauuaacaucaaagaccacucuauuguuuccagcuacguguguucuggacuugucggcgauacaccccggaagaaugacagcuccucuagcuccaacugccuggauccgaauaacgaagagggcgggcauggagugaaaggcugggcuuucgacgaugggaaugacguuuggaugggacgcaccaucaacgaaacgagcagacucggcuaugagacauuuaaggugaucgagggguggucuaauccuaaauccaagcugcagauuaaccggcaggucaucguggaucgcggaaauagaagcggcuacucuggcauuuucuccgucgaagggaaaaacuguaucaaucggugcuuuuauguggagcugauuagaggacgcaaggaagagaccgaaguucucuggaccagcaacuccaucguggucuucuguggcacaucugggaccuacggaacaggcagcuggcccgacggggccgaucugaaucuuaugccuauuuga

SEQ ID NO: 215138 - RNA, 1410 nt, Artificial Sequence
  derived and/or modified CDS sequence (opt5) from neuraminidase__InfluenzaA__AFN19697
augaaccccaaucagaagaucauuaccaucggcagcgugucccugacaauuucuacgaucugcuucuuuaugcaaauugccauccucaucaccacagucacccugcacuucaaacaguacgaguuuaacagcccuccgaauaaccagguuaugcuuugugaacccacaauuaucgagagaaauauuaccgaaaucguguaucugacaaacaccacgauugagaaggaaaucugcccuaaacccgcugaguaccggaauugguccaagccucagugugggauuaccggauucgcccccuuuucuaaagacaacagcauccgccucuccgcgggcggggauaucugggugacaagagagccuuaugucucuugcgacccggauaaguguuaccaauucgcucugggacagggcaccacacuuaauaacgugcauagcaauaacaccguucgggaccgcacgcccuauagaacacugcucaugaaugaacugggggugccuuuucaccugggaaccaagcaggucugcauugccugguccucuagcuccugucaugauggcaaagccuggcuccacgugugcaucacaggcgacgauaagaacgcuaccgccagcuucauuuacaaugggcggcugguugacucuguggucuccuggagcaaagagacccuucgcacacaggaaucugagugugugugcaucaacggaacguguaccguggucaugacagauggcuccgcuagcgggaaggccgacaccaaaauucuguuuaucgaggaaggaaagaucguucauacauccacccucucuggcagcgcgcaacacguggaggaaugcuccugcuaucccagauacccuggggugcggugugucugccgcgauaacuggaagggaagcaauagacccauuguggacaucaacauuaaagaucacucuaucguuuccagcuacguguguucuggccuggucggcgacacgccgcggaagaaugacagcuccucuagcucccauugccuugauccuaacaaugaggaagggggacacggcgugaaagggugggccuucgacgauggaaacgacguuuggaugggccgcacaauuaaugagaccagcagacugggguaugagaccuuuaaggugaucgaaggauggucuaaccccaaauccaagcuccagaucaaucggcaggucauuguggaucgcggcgacagaagcggcuacucugggaucuucuccgucgagggaaaaagcuguauuaaccggugcuuuuauguggaacugaucagaggccgcaaggaggaaacagagguucuguggaccuccaauucuauuguggucuucugugggacaagcggaacguacggcaccggguccuggccugauggcgcugaccucaaccugaugcccaucuga

SEQ ID NO: 215139 - RNA, 1410 nt, Artificial Sequence; identical to SEQ ID NO: 214994
  derived and/or modified CDS sequence (opt5) from neuraminidase__InfluenzaA__AFN19699

SEQ ID NO: 215140 - RNA, 1410 nt, Artificial Sequence; identical to SEQ ID NO: 215030
  derived and/or modified CDS sequence (opt5) from neuraminidase__InfluenzaA__AFN19701

SEQ ID NO: 215141 - RNA, 1410 nt, Artificial Sequence
  derived and/or modified CDS sequence (opt5) from neuraminidase__InfluenzaA__AFN19703
augaaccccaaucagaagaucauuaccaucggcagcgugucccugacaauuucuacgaucugcuucuuuaugcaaauugccauccucaucaccacagucacccugcacuucaaacaguacgaguuuaacagcccuccgaauaaccagguuaugcuuugugaacccacaauuaucgagagaaauauuaccgaaaucguguaucugacaaacaccacgauugagaaggaaaucugcccuaaacccgcugaguaccggaauugguccaagccucagugugggauuaccggauucgcccccuuuucuaaagacaacagcauccgccucuccgcgggcggggauaucugggugacaagagagccuuaugucucuugcgacccggauaaguguuaccaauucgcucugggacagggcaccacacuugacaaugugcauagcaacaauaccguucgggaucgcacgcccuauagaacacugcucaugaacgaacugggggugccuuuucaccugggaaccaagcaggucugcauugccugguccucuagcuccugucaugacggcaaagccuggcuccacgugugcaucacaggcgaugacaagaaugcuaccgccagcuucauuuacaacgggcggcugguugauucuguggucuccuggagcaaagagauccuucgcacccaggaaucugagugugugugcauuaauggaacauguacgguggucaugaccgacggcuccgcuagcgggaaggccgauacaaaaauccuguuuaucgaggaaggaaagauuguucauaccuccacacucucuggcagcgcgcaacacguggaggaaugcuccugcuaucccagauacccuggggugcggugugucugccgcgacaacuggaagggaagcaacagacccaucguggauauuaauaucaaagaccacucuauuguuuccagcuacguguguucuggccuggucggcgacaccccgcggaagaacgauagcuccucuagcucccauugccuugacccuaauaacgaggaagggggacacggcgugaaagggugggccuucgaugacggaaaugauguuuggaugggccgcacgaucaacgagacaagcagacugggguaugagaccuuuaaggugaucgaaggauggucuaaucccaaauccaagcuccagauuaaccggcaggucaucguggaccgcggcgauagaagcggcuacucugggauuuucuccgucgagggaaaaagcuguaucaaucggugcuuuuauguggaacugauuagaggccgcaaggaggaaaccgagguucuguggacauccaacucuaucguggucuucugugggaccagcggaacauacggcacgggguccuggccugacggcgcugaucucaaucugaugcccauuuga

SEQ ID NO: 215142 - RNA, 1410 nt, Artificial Sequence; identical to SEQ ID NO: 212329
  derived and/or modified CDS sequence (opt5) from neuraminidase__InfluenzaA__AFN19711

SEQ ID NO: 215143 - RNA, 1410 nt, Artificial Sequence
  derived and/or modified CDS sequence (opt5) from neuraminidase__InfluenzaA__AFN19721
augaaccccaaucagaagaucauuaccaucggcagcgugugcaugacaauugggauggccaaccugauccuccaaauuggaaauaucaucuccauuuggaucucucacagcauucagcugggcaaccagucccagaucgagacguguaaucaaucugucauuaccuacgaaaacaauacauggguuaaccagaccuaugugaauaucagcaacacaaauuucgcugccgggcaguccguggucucugugaaacuugcgggaaacagcucccugugcccuguuagcggcugggcuauuuacucuaaggacaauuccaucagaaucgggagcaaaggagauguguuugucauucgggagccguucaucucuuguucccccauggaaugccgcaccuuuuuccucacacagggcgcccugcuuaacgacaagcauagcaauggcaccauuaaagauagaucuccuuaucggacgcugauguccugucccaucggggaggugccuagccccuacaacucccgcuuugaaucuguugccuggagcgcuuccgccugccacgacggaauuaacuggcucaccaucggcaucagcgggccugauaauggagcuguggccguccugaaguauaacggcauuaucacagacaccauuaagucuuggagaaauaacauccugcggacacaagaguccgagugugcgugcgugaaugggagcuguuucaccauuaugacggauggaccgucugacggccaggccagcuacaaaaucuuucgcaucgaaaagggcaaaauugugaaguccgucgagaugaacgcucccaauuaucauuacgaagagugcucuuguuacccugauagcuccgagaucacaugcguuugcagagacaacuggcacgggagcaaucggcccugggugucuuucaaccagaaucucgaauaucagauuggauacaucuguuccggcauuuuuggggauaacccucgccccaaugacaaaaccggaagcugcggcccggugucuuccaacggggccaauggagucaagggcuucagcuuuaaguauggcaacgggguguggaucggaagaacaaaauccauuucuagccggaagggcuucgagaugaucugggauccuaacggguggaccggaaccgacaauaacuuuuccaucaaacaagacauuguuggcaucaaugaauggucuggguacagcggcuccuucgugcagcaucccgagcugacaggacuugauuguauucgcccuugcuucugggucgaacugaucagaggccggcccaaggagaacacgauuuggaccagcgggucuuccaucagcuuuuguggaguuaauucugacacagugggcugguccuggcccgauggggcugagcucccuuucaccaucgacaaauga

SEQ ID NO: 215144 - RNA, 1410 nt, Artificial Sequence; identical to SEQ ID NO: 213150
  derived and/or modified CDS sequence (opt5) from neuraminidase__InfluenzaA__AFN19731

SEQ ID NO: 215145 - RNA, 1410 nt, Artificial Sequence; identical to SEQ ID NO: 212329
  derived and/or modified CDS sequence (opt5) from neuraminidase__InfluenzaA__AFN19737

SEQ ID NO: 215146 - RNA, 1410 nt, Artificial Sequence
  derived and/or modified CDS sequence (opt5) from neuraminidase__InfluenzaA__AFN19747
augaaccccaaucagaagaucauuaccaucggcagcgugugcaugacaauugggauggccaaccugauccuccaaauuggaaauaucaucuccauuuggaucucucacagcauucagcugggcaaccagaaucagaucgagacguguaaccaauccgucauuacccaugaaaauaacacauggguuaaucagaccuacgugaacaucucuaauacaaacuucgcugccgggcagagcguggucuccgugaaacuugcgggaaauucuagccugugcccuguuuccggcugggcuauuuauagcaaggacaacucuaucagaaucggguccaaaggagauguguuugucauucgggagccguucaucagcuguucuccccucgaaugccgcaccuuuuuccugacacagggcgcccuucugaaugacaagcacuccaacggcaccauuaaagauagaagcccuuaccggacgcucaugucuugucccaucggggaggugccuucccccuauaacagccgcuuugaauccguugccuggucugcuagcgccugccaugacggaauuaauuggcugaccaucggcaucuccgggccugauaacggagcuguggccguccugaaguacaauggcauuaucacagacaccauuaagagcuggagaaacaauauccuccggacacaagagucugagugugcgugcgugaacggguccuguuucaccgugaugacggauggaccgagcgacggccaggccucuuauaaaauuuuucgcaucgaaaagggcaaaaucgucaagagcguugagaugaaugcucccaacuaccacuaugaagagugcuccuguuacccugauucuagcgagauuacaugcgugugcagagacaauuggcauggggccaaccggcccuggguguccuucaaucagaaccuggaauaccagaucggauauauuuguagcggcaucuuuggggauaauccucgccccaacgacaaaaccggaucuugcggcccggucuccagcaauggggcuaacggagugaagggcuucucuuuuaaguacggcaacgggguuuggauuggaagaacaaaauccaucagcucccggaauggcuucgagaugauuugggauccuaacggguggaccggaaccgacaauaacuuuucuaucaagcaagacaucgugggcauuaaugaauggagcggguauuccggcucuuucguccagcaccccgagcuuacaggacuggauuguauccgcccuugcuucuggguggaacucauuagaggccggcccaaagagaacacgaucuggaccagcggguccagcauuucuuuuuguggaguuaauuccgacacagugggcuggagcuggcccgauggggccgagcugccuuucaccaucgacaaguga

SEQ ID NO: 215147 - RNA, 1410 nt, Artificial Sequence; identical to SEQ ID NO: 212329
  derived and/or modified CDS sequence (opt5) from neuraminidase__InfluenzaA__AFN19749

SEQ ID NO: 215148 - RNA, 1410 nt, Artificial Sequence; identical to SEQ ID NO: 212329
  derived and/or modified CDS sequence (opt5) from neuraminidase__InfluenzaA__AFN19759

SEQ ID NO: 215149 - RNA, 1410 nt, Artificial Sequence
  derived and/or modified CDS sequence (opt5) from neuraminidase__InfluenzaA__AFN19769
augaaccccaaucagaagaucauuaccaucggcagcgugugcaugacaauugggauggccaaccugauccuccaaauuggaaauaucaucuccauuuggaucucucacagcauucagcugggcaaccagucccagaucgagacguguaaucaaucugucauuaccuacgaaaacaauacauggguuaaccagaccuaugugaauaucagcaacacaaauuucgcugccgggcaguccguggucucugugaaacuugcgggaaacagcucccugugcccuguuagcggcugggcuauuuacucuaaggacaauuccaucagaaucgggagcaaaggagauguguuugucauucgggagccguucaucucuuguucuccccucgaaugccgcaccuuuuuccugacacagggcgcccuucugaacgacaagcauagcaauggcaccauuaaagauagaucuccuuaucggacgcucauguccugucccaucggggaggugccuagccccuacaacucccgcuuugaaucuguugccuggagcgcuuccgccugccacgacggaauuaacuggcugaccaucggcaucagcgggccugauaauagagcuguggccguccugaaguauaacggaauuaucacagacaccauuaagucuuggcggaauaacauccuccgcacacaagaguccgagugugcgugcgugaauggcagcuguuucaccauuaugacggaugggccgucugacggacaggccagcuacaaaaucuuuagaaucgaaaagggcaaaauugugaaguccgucgagaugaacgcucccaauuaucauuacgaagagugcucuuguuacccugauagcuccgagaucacaugcguuugccgggacaacuggcacggcagcaaucgccccugggugucuuucaaccagaaucuggaauaucagauuggguacaucuguuccggaauuuuuggcgauaacccuagacccaaugacaaaaccgggagcugcggaccggugucuuccaacggcgccaauggggucaagggauucagcuuuaaguauggcaacggcguguggaucgggcggacaaaauccauuucuagccgcaagggauucgagaugaucugggauccuaacggcuggaccgggaccgacaauaacuuuuccaucaaacaagacauuguuggaaucaaugaauggucuggcuacagcggguccuucgugcagcaucccgagcuuacaggccuggauuguauuagaccuugcuucugggucgaacucauccggggacgccccaaggagaacacgauuuggaccagcggcuccuccaucagcuuuugugggguuaauucugacacagugggaugguccuggcccgauggcgcugagcugccuuucaccaucgacaaauga

SEQ ID NO: 215150 - RNA, 1410 nt, Artificial Sequence; identical to SEQ ID NO: 212329
  derived and/or modified CDS sequence (opt5) from neuraminidase__InfluenzaA__AFN19783

SEQ ID NO: 215151 - RNA, 1410 nt, Artificial Sequence; identical to SEQ ID NO: 213030
  derived and/or modified CDS sequence (opt5) from neuraminidase__InfluenzaA__AFN19793

SEQ ID NO: 215152 - RNA, 1410 nt, Artificial Sequence; identical to SEQ ID NO: 212329
  derived and/or modified CDS sequence (opt5) from neuraminidase__InfluenzaA__AFN19807

SEQ ID NO: 215153 - RNA, 1410 nt, Artificial Sequence
  derived and/or modified CDS sequence (opt5) from neuraminidase__InfluenzaA__AFN19809
augaaccccaaucagaagaucauuaccaucggcagcgugugcaugauuaucgggauggccaaccugaugcuccaaauuggaaauaucaucuccauuuggaucucucacagcauucagcugggcaaccagaaucagaucgagacauguaaccaauccgucauuacguacgaaaauaacaccuggguuaaucagacauaugugaacaucucuaauaccaacuucgcugccgggcagagcgugauuuccgucaaacuugcgggaaauucuagccugugcccuguguccggcugggcuaucuacagcaaggacaacucuaucagaauuggguccaaaggagauguuuuugugauccgggagccguucauuagcuguucuccccucgaaugccgcacauuuuuccugacccagggcgcccuucugaaugacaagcauuccaacggcacaaucaaagauagaagcccuuaucggacccucaugucuugucccauuggggaggucccuucccccuacaacagccgcuuugaauccguggccuggucugcuagcgccugccacgacggaaucaauuggcugacgaucggcauuuccgggccugauaacggagcuguugccgugcugaaguauaauggcaucauuaccgacacaaucaagagcuggagaaacaauauucuccggacccaagagucugagugugcgugcgucaacggguccuguuucacagugaugaccgauggaccgagcgacggccaggccucuuacaaaaucuuucgcaucgaaaagggcaaaauugucaagagcguggagaugaaugcucccaacuaucauuacgaagagugcuccuguuacccugauucuagcgagaucacgugcguuugcagagacaauuggcacggguccaaccggcccugggugagcuucaaucagaaccuggaauaucagauuggauacaucuguucuggcauuuuuggggauaauccucgccccaacgacaaaacaggauccugcggcccggugagcaccaauggggccaacggagucaagggcuucucuuuuaaguauggcaacgggguguggaucggaagaacaaaauccauuagcucccggaauggcuucgagaugaucugggauccuaacggguggaccggaaccgacaauaaguuuucuaucaaacaagacauuguuggcaucaacgaauggagcggguacuccggcucuuucgugcagcaucccgagcuuacaggacuggauuguauucgcccuugcuucugggucgaacucaucagaggccggcccaaggagaauacgauuuggaccagcggguccagcaucucuuuuuguggagugaacuccgacacaguuggcuggagcuggcccgauggggcugagcugccuuucaccaucgacaaauga

SEQ ID NO: 215154 - RNA, 1410 nt, Artificial Sequence; identical to SEQ ID NO: 213152
  derived and/or modified CDS sequence (opt5) from neuraminidase__InfluenzaA__AFN19815

SEQ ID NO: 215155 - RNA, 1410 nt, Artificial Sequence
  derived and/or modified CDS sequence (opt5) from neuraminidase__InfluenzaA__AFN19833
augaaccccaaucagaagaucauuaccaucggcagcgugugcaugacaauugggauggccaaccugauccuccaaauuggaaauaucaucuccauuuggaucucucacagcauucagcugggcaaccagucccagaucgagacguguaaucaaucugucauuaccuacgaaaacaauacauggguuaaccagaccuaugugaauaucagcaacacaaauuucgcugccgggcaguccguggucucugugaaacuugcgggaaacagcucccugugcccuguuagcggcugggcuauuuacucuaaggacaauuccaucagaaucgggagcaaaggagauguguuugucauucgggagccguucaucucuuguagcccccucgaaugccgcaccuuuuuccugacacagggcgcccuucugaacgacaagcauuccaauggcaccauuaaagauagaucuccuuaucggacgcucauguccugucccaucggggaggugccuagccccuacaacucccgcuuugaaucuguugccuggagcgcuuccgccugccacgacggaauuaacuggcugaccaucggcaucagcgggccugauaauggagcuguggccguccugaaguauaacggcauuaucacagacaccauuaagucuuggaaaaauaacauccucagaacacaagaguccgagugugcgugcgugaaugggagcuguuucaccauuaugacggauggaccgucugacggccaggccagcuacaagaucuuucggaucgaaaaaggcaagauugugaaauccgucgagaugaacgcucccaauuaucauuacgaagagugcucuuguuacccugauagcuccgagaucacaugcguuugccgcgacaacuggcacgggagcaauagacccugggugucuuucaaccagaaucuggaauaucagauuggauacaucuguuccggcauuuuuggggauaacccucggcccaaugacaagaccggaagcugcggcccggugucuuccaacggggccaauggagucaagggcuucagcuuuaaauauggcaacgggguguggaucggacgcacaaaguccauuucuagcagaaaaggcuucgagaugaucugggauccuaacggguggaccggaaccgacaauaacuuuuccaucaagcaagacauuguuggcaucaaugaauggucuggguacagcggcuccuucgugcagcaucccgagcuuacaggacuggauuguauucggccuugcuucugggucgaacucauccgcggcagacccaaagagaacacgauuuggaccagcgggucuuccaucagcuuuuguggaguuaauucugacacagugggcugguccuggcccgauggggcugagcugccuuucaccaucgacaaguga

SEQ ID NO: 215156 - RNA, 1410 nt, Artificial Sequence; identical to SEQ ID NO: 212788
  derived and/or modified CDS sequence (opt5) from neuraminidase__InfluenzaA__AFN19851

SEQ ID NO: 215157 - RNA, 1410 nt, Artificial Sequence; identical to SEQ ID NO: 212329
  derived and/or modified CDS sequence (opt5) from neuraminidase__InfluenzaA__AFN19857

SEQ ID NO: 215158 - RNA, 1410 nt, Artificial Sequence
  derived and/or modified CDS sequence (opt5) from neuraminidase__InfluenzaA__AFN19867
augaaccccaaucagaagaucauuaccaucggcagcgugugcaugacaauugggauggccaaccugauccuccaaauuggaaauaucaucuccauuuggaucucucacagcauucagaucggcaaccagaaucagauugagacguguaaccaauccgucaucaccuacgaaaauaacacauggguuaaucagaccuaugugaacauuucuaauacaaacuucgcugccgggcagagcguggucuccgugaaacuggcgggaaauucuagccuuugcccuguuuccggcugggcuaucuacagcaaggacaacucuaucagaauuggguccaaaggagauguguuugucauccgggagccguucauuagcuguucuccccuggaaugccgcaccuuuuuccucacacagggcgcccugcuuaaugacaagcauuccaacggcaccaucaaagauagaagcccuuaucggacgcugaugucuugucccauuggggaggugccuucccccuacaacagccgcuuugaauccguugccuggucugcuagcgccugccacgacggaaucaauuggcucaccaucggcauuuccgggccugauaacggagcuguggccguccugaaguauaauggcaucauuacagacaccaucaagagcuggagaaacaauauucugcggacacaagagucugagugugcgugcgugaacggguccuguuucaccaucaucacggauggaccgagcgacggccaggccucuuacaaaauuuuucgcaucgaaaagggcaaaauugucaagagcguggagaugaaugcucccaacuaucauuacgaagagugcuccuguuacccugauucuagcgagaucacaugcguuugcagagacaauuggcacggguccaaccggcccugggugagcuucaaucagaaccucgaauaucagauuggauacaucuguucuggcauuuuuggggauaauccucgccccaacgacaaaaccggauccugcggcccggugagcucuaauggggccaacggagucaagggcuucuccuuuaaguauggcaacgggguguggaucggaagaacaaaaagcaucuccucucggaagggcuucgagaugauuugggauccuaauggguggaccggaaccgacaacaauuuuagcaucaaacaagacauuguuggcaucaacgaaugguccggguacucuggcagcuucgugcagcaucccgagcugacaggacuugauuguauucgcccuugcuucugggucgaacugaucagaggccggcccaaggagaauacgaucuggaccuccgggagcucuauuuccuuuuguggagugaacagcgacacaguuggcuggucuuggcccgauggggcugagcucccuuucaccaucgacaaauga

SEQ ID NO: 215159 - RNA, 1410 nt, Artificial Sequence; identical to SEQ ID NO: 212781
  derived and/or modified CDS sequence (opt5) from neuraminidase__InfluenzaA__AFN19877

SEQ ID NO: 215160 - RNA, 1410 nt, Artificial Sequence; identical to SEQ ID NO: 212329
  derived and/or modified CDS sequence (opt5) from neuraminidase__InfluenzaA__AFN19887

SEQ ID NO: 215161 - RNA, 1410 nt, Artificial Sequence
  derived and/or modified CDS sequence (opt5) from neuraminidase__InfluenzaA__AFN19897
augaaccccaaucagaagaucauuaccaucggcagcgugugcaugacaauugggauggccaaccugauccuccaaauuggaaauaucaucuccauuuggaucucucacagcauucagcugggcaaccagucccagaucgagacguguaaucaaucugucauuaccuacgaaaacaauacauggguuaaccagaccuaugugaauaucagcaacacaaauuucgcugccgggcaguccguggucucugugaaacuugcgggaaacagcucccugugcccuguuagcggcugggcuauuuacucuaaggacaauuccaucagaaucgggagcaaaggagauguguuugucauucgggagccguucaucucuuguagcccccucgaaugccgcaccuuuuuccugacacagggcgcccuucugaacgacaagcauuccaauggcaccauuaaagauagaucuccuuaucggacgcucauguccugucccaucggggaggugccuagccccugcaacucccgcuuugaaucuguugccuggagcgcuuccgccugucacgacggaauuaacuggcugaccaucggcaucagcgggccugauaauggagcuguggccguccugaaguacaacggcauuaucacagacaccauuaagucuuggagaaauaacauccuccggacacaagaguccgagugcgcgugugugaaugggagcugcuucaccauuaugacggauggaccgucugacggccaggccagcuauaaaaucuuucgcaucgaaaagggcaaaauugugaaguccgucgagaugaacgcucccaauuaccauuaugaagaguguucuugcuacccugauagcuccgagaucacaugcguuuguagagacaacuggcacgggagcaaucggcccugggugucuuucaaccagaaucuggaauaccagauuggauauaucugcuccggcauuuuuggggauaacccucgccccaaugacaaaaccggaagcuguggcccggugucuuccaacggggccaauggagucaagggcuucagcuuuaaguacggcaacgggguguggaucggaagaacaaaauccauuucuagccggaagggcuucgagaugaucugggauccuaacggguggaccggaaccgacaauaacuuuuccaucaaacaagacauuguuggcaucaaugaauggucuggguauagcggcuccuucgugcagcaucccgagcuuacaggacuggauugcauucgcccuuguuucugggucgaacucaucagaggccggcccaaggagaacacgauuuggaccagcgggucuuccaucagcuuuugcggaguuaauucugacacagugggcugguccuggcccgauggggcugagcugccuuucaccaucgacaaauga

SEQ ID NO: 215162 - RNA, 1410 nt, Artificial Sequence; identical to SEQ ID NO: 212329
  derived and/or modified CDS sequence (opt5) from neuraminidase__InfluenzaA__AFN19907

SEQ ID NO: 215163 - RNA, 1410 nt, Artificial Sequence; identical to SEQ ID NO: 212788
  derived and/or modified CDS sequence (opt5) from neuraminidase__InfluenzaA__AFN19917

SEQ ID NO: 215164 - RNA, 1410 nt, Artificial Sequence
  derived and/or modified CDS sequence (opt5) from neuraminidase__InfluenzaA__AFN19923
augaaccccaaucagaagaucauuaccaucggcagcgugugcaugacaauugggauggccaaccugauccuccaaauuggaaauaucaucuccauuuggaucucucacagcauucagcugggcaaccagucccagaucgagacguguaaucaaaacgucauuaccuacgaaaauaacacauggguuaaucagaccuaugugaacaucucuaauacaaacuucgcugccgggcagagcguggucuccgugaaacuugcgggaaauucuagccugugcccuguuuccggcugggcuauuuacagcaaggacaacucuaucagaaucggguccaaaggagauguguuugucauucgggagccguucaucagcuguucuccccucgaaugccgcaccuuuuuccugacacagggcgcccuucugaaugacaagcauuccaacggcaccauuaaagauagaagcccuuaucggacgcucaugucuugucccaucggggaggugccuucccccuacaacagccgcuuugaauccguugccuggucugcuagcgccugccacgacggaauuaauuggcugaccaucggcaucuccgggccugauaacggagcuguggccguccugaaguauaauggcauuaucacagacaccauuaagagcuggagaaacaauauccuccggacacaagagucugagugugcgugcgugaacggguccuguuucaccauuaugacggauggaccgagcgacggccaggccucuuacaaaaucuuucgcaucgaaaagggcaaaauugucaagagcguggagaugaaugcucccaacuaucauuacgaagagugcuccuguuacccugauucuagcgagaucacaugcguuugcagagacaauuggcacggguccaaccggcccugggugagcuucaaucagaaccuggaauaucagauuggauacaucuguucuggcauuuuuggggauaauccucgccccaacgacaaaaccggauccugcggcccggugagcucuaauggggccaacggagucaagggcuucuccuuuaaguauggcaacgggguguggaucggaagaacaaaaagcauuuccucucggaagggcuucgagaugaucugggauccuaauggguggaccggaaccgacaacaauuuuagcaucaaacaagacauuguuggcaucaacgaaugguccggguacucuggcagcuucgugcagcaucccgagcuuacaggacuggauuguauucgcccuugcuucugggucgaacucaucagaggccggcccaaggagaauacgauuuggaccuccgggagcucuaucuccuuuuguggagugaacagcgacacaguuggcuggucuuggcccgauggggcugagcugccuuucaccaucgacaaauga

SEQ ID NO: 215165 - RNA, 1410 nt, Artificial Sequence; identical to SEQ ID NO: 212329
  derived and/or modified CDS sequence (opt5) from neuraminidase__InfluenzaA__AFN19933

SEQ ID NO: 215166 - RNA, 1410 nt, Artificial Sequence; identical to SEQ ID NO: 212788
  derived and/or modified CDS sequence (opt5) from neuraminidase__InfluenzaA__AFN19943

SEQ ID NO: 215167 - RNA, 1410 nt, Artificial Sequence
  derived and/or modified CDS sequence (opt5) from neuraminidase__InfluenzaA__AFN19953
augaaccccaaucagaagaucauuaccaucggcagcgugugcaugacaauugggauggccaaccugauccuccaaauuggaaauaucaucuccauuuggaucucucacagcauucagcugggcaaccagucccagaucgagacguguaaucaaagagucauuaccuacgaaaacaauacauggguuaaccagaccuaugugaauaucucuaacacaaauuucgcugccgggcagagcguggucuccgugaaacuugcgggaaacucuagccugugcccuguuuccggcugggcuauuuacagcaaggacaauucuauccggaucggguccaaaggagauguguuugucauucgcgagccguucaucagcuguucuccccucgaaugcagaaccuuuuuccugacacagggcgcccuucugaacgacaagcauuccaauggcaccauuaaagaucggagcccuuaucgcacgcucaugucuugucccaucggggaggugccuucccccuacaacagcagauuugaauccguugccuggucugcuagcgccugccacgacggaauuaacuggcugaccaucggcaucuccgggccugauaauggagcuguggccguccugaaguauaacggcauuaucacagacaccauuaagagcuggcggaauaacauccuccgcacacaagagucugagugugcgugcgugaauggguccuguuucaccauuaugacggauggaccgagcgacggccaggccucuuacaaaaucuuuagaaucgaaaagggcaaaauugucaagagcguggagaugaacgcucccaauuaucauuacgaagagugcuccuguuacccugauucuagcgagaucacaugcguuugccgggacaacuggcacggguccaaucgccccugggugagcuucaaccagaaucuggaauaucagauuggauacaucuguucuggcauuuuuggggauaacccuagacccaaugacaaaaccggauccugcggcccggugagcucuaacggggccaauggagucaagggcuucuccuuuaaguauggcaacgggguguggaucggacggacaaaaagcauuuccucucgcaagggcuucgagaugaucugggauccuaacggguggaccggaaccgacaauaacuuuagcaucaaacaagacauuguugaaaucaaugagugguccggcuacucugggagcuucgugcagcaucccgaacuuacaggccuggauuguauuagaccuugcuucugggucgagcucauccggggacgccccaaggagaacacgauuuggaccuccggcagcucuaucuccuuuuguggggugaauagcgacacaguuggauggucuuggcccgauggcgcugaacugccuuucaccaucgacaaauga

SEQ ID NO: 215168 - RNA, 1410 nt, Artificial Sequence
  derived and/or modified CDS sequence (opt5) from neuraminidase__InfluenzaA__AFN19967
augaaccccaaucagaagaucauuaccaucggcagcgugugcaugacaauugggauggccaaccugauccuccaaauuggaaauaucaucuccauuuggaucucucacagcauucagcugggcaaccagucccagaucgagacguguaaucaaucugucauuaccuacgaaaacaauacauggguuaaccagaccuaugugaauaucagcaacacaaauuucgcugccgggcaguccguggucucugugaaacuugcgggaaacagcucccugugcccuguuagcggcugggcuauuuacucuaaggacaauuccaucagaaucgggagcaaaggagauguguuugucauucgggagccguucaucucuuguagcccccucgaaugccgcaccuuuuuccugacacagggcgcccuucugaacgacaagcauuccaauggcaccauuaaagauagaucuccuuaucggacgcucauguccugucccaucggggaggugccuagccccuacaacucccgcuuugaaucuguugccuggagcgcuuccgccugccacgacggaauuaacuggcugaccaucggcaucagcgggccugauaauggagcuguggccguccugaaguauaacggcauuaucacagacaccauuaagucuuggagauccaauauccuccggacacaagagagcgagugugcgugcgugaacgggucuuguuucaccauuaugacggauggaccgagcgacggccaggccuccuacaaaaucuuucgcaucgaaaagggcaaaauugugaagucugucgagaugaaugcucccaacuaucauuacgaagagugcagcuguuacccugauuccagcgagaucacaugcguuugcagagacaauuggcacgggucuaaccggcccuggguguccuucaaucagaaccuggaauaucagauuggauacaucuguagcggcauuuuuggggauaauccucgccccaacgacaaaaccggaucuugcggcccgguguccagcaauggggccaacggagucaagggcuucuccuuuaaguauggcaaugggguguggaucggaagaacaaaaucuauuagcucccggaagggcuucgagaugaucugggauccuaacggguggaccggaaccgacaacaauuuuucuaucaaacaagacauuguuggcaucaacgaauggagcggguacuccggcagcuucgugcagcaucccgagcuuacaggacuggauuguauucgcccuugcuucugggucgaacucaucagaggccggcccaaggagaauacgauuuggaccucuggguccagcaucucuuuuuguggagugaacuccgacacaguuggcuggagcuggcccgauggggcugagcugccuuucaccaucgacaaauga

SEQ ID NO: 215169 - RNA, 1410 nt, Artificial Sequence
  derived and/or modified CDS sequence (opt5) from neuraminidase__InfluenzaA__AFN19973
augaaccccaaucagaagaucauuaccaucggcagcgugugcaugacaauugggauggccaaccugauccuccaaauuggaaauaucaucuccauuuggaucucucacagcauucagcugggcaaccagucccagaucgagacguguaaucaaucugucauuaccuacgaaaacaauacauggguuaaccagaccuaugugaauaucagcaacacaaauuucgcugccgggcaguccguggucucugugaaacuugcgggaaacagcucccugugcccuguuagcggcugggcuauuuacucuaaggacaauuccaucagaaucgggagcaaaggagauguguuugucauucgggagccguucaucucuuguagcccccucgaaugccgcaccuuuuuccugacacagggcgcccuucugaacgacaagcauuccaauggcaccauuaaagauagaucuccuuaucggacgcucauguccugucccaucggggaggugccuagccccuacaacucccgcuuugaaucuguugccuggagcgcuuccgccugccacgacggaauuaacuggcugaccaucggcaucagcgggccugauaauggagcuguggccguccugaaguauaacggcauuaucacagacaccauuaagucuuggagaaauaacauccuccggacacaagaguccgagugugcgugcgugaaugggagcuguuucaccauuaugacggauggaucuagcgacggccaggccuccuacaaaaucuuucgcaucgaaaagggcaaaauugugaagucugucgagaugaacgcuccgaauuaucauuacgaagagugcagcuguuaccccgauuccagcgagaucacaugcguuugcagagacaacuggcacgggucuaaucggccuuggguguccuucaaccagaaucuggaauaucagauuggauacaucuguagcggcauuuuuggggauaacccccgcccuaaugacaaaaccggaucuugcggccccguguccagcaacggggccaauggagucaagggcuucuccuuuaaguauggcaacgggguguggaucggaagaacaaaaucuauuagcucccggaagggcuucgagaugaucugggauccgaacggguggaccggaaccgacaauaacuuuucuaucaaacaagacauuguuggcaucaaugaauggagcggguacuccggcagcuucgugcagcauccugagcuuacaggacuggauuguauucgccccugcuucugggucgaacucaucagaggccggccuaaggagaacacgauuuggaccucuggguccagcaucucuuuuuguggaguuaauuccgacacagugggcuggagcuggcccgauggggcugagcugcccuucaccaucgacaaauga

SEQ ID NO: 215170 - RNA, 1410 nt, Artificial Sequence; identical to SEQ ID NO: 212329
  derived and/or modified CDS sequence (opt5) from neuraminidase__InfluenzaA__AFN19979

SEQ ID NO: 215171 - RNA, 1410 nt, Artificial Sequence
  derived and/or modified CDS sequence (opt5) from neuraminidase__InfluenzaA__AFN19985
augaaccccaaucagaagaucauuaccaucggcagcgugugcaugacaauugggauggccaaccugauccuccaaauuggaaauaucaucuccauuuggaucucucacagcauucagcugggcaaccagucccagaucgagacguguaaucaaucugucauuaccuacgaaaacaauacauggguuaaccagaccuaugugaauaucagcaacacaaauuucgcugccgggcaguccguggucucugugaaacuugcgggaaacagcucccugugcccuguuagcggcugggcuauuuacucuaaggacaauuccaucagaaucgggagcaaaggagauguguuugucauucgggagccguucaucucuuguagcccccucgaaugccgcaccuuuuuccugacacagggcgcccuucugaacgacaagcauuccaauggcaccauuaaagauagaucuccuuaucggacgcucauguccugucccaucggggaggugccuagccccuacaacucccgcuuugaaucuguugccuggagcgcuuccgccugccacgacggaauuaacuggcugaccaucggcaucagcgggccugauaauggagcuguggccguccugaaguauaacggcauuaucacagacaccauuaagucuuggagaaauaacauccuccggacacaagaguccgagugugcgugcgugaaugggagcuguuucaccauuaugacggauggaccgucugacggccaggccagcuacaaaaucuuucgcaucgaaaagggcaaaauugugaaguccgucgagaugaacgcucccaauuaucauuacgaagagugcucuuguuacccugauagcuccgagaucacaugcguuugcagagacaacuggcacgggagcaaucggcccugggugucuuucaaccagaaucuggaauaucagauuggauacaucuguuccggcauuuuuggggauaacccucgccccaaugacaaaaccggaagcugcggcccggugucuuccaacggggccaauggagucaagggcuucagcuuuaaguauggcaacgggguguggaucggaagaacaaaauccguuucuagccggaagggcuucgagaugauuugggauccuaacggguggaccggaaccgacaauaacuuuuccaucaaacaagacaucgugggcauuaaugaauggucuggguacagcggcuccuucguccagcaucccgagcuuacaggacuggauuguauccgcccuugcuucuggguggaacucauuagaggccggcccaaggagaacacgaucuggaccagcgggucuuccauuagcuuuuguggaguuaauucugacacagugggcugguccuggcccgauggggcugagcugccuuucaccaucgacaaauga

SEQ ID NO: 215172 - RNA, 1410 nt, Artificial Sequence
  derived and/or modified CDS sequence (opt5) from neuraminidase__InfluenzaA__AFN19995
augaaccccaaucagaagaucauuaccaucggcagcgugugcaugacaauugggauggccaaccugauccuccaaauuggaaauaucaucuccauuuggaucucucacagcauucagcugggcaaccagucccagacggagaccuguaaucaaucugucaucacauacgaaaacaauaccuggguuaaccagacauaugugaauauuagcaacaccaauuucgcugccgggcaguccguggucucugugaaacuugcgggaaacagcucccugugcccuguuagcggcugggcuaucuacucuaaggacaauuccauuagaaucgggagcaaaggagauguguuugucauccgggagccguucauuucuuguagcccccucgaaugccgcacauuuuuccugacccagggcgcccuucugaacgacaagcauuccaauggcacgaucaaagauagaucuccuuaucggacccucauguccugucccauuggggaggugccuagccccuacaacucccgcuuugaaucuguugccuggagcgcuuccgccugccacgacggaaucaacuggcugacaauuggcaucagcgggccugauaauggagcuguggccguccugaaguauaacggcaucauuaccgacacaaucaagucuuggagaaauaacauucuccggacccaagaguccgagugugcgugcgugaaugggagcuguuucacgaucaugacagauggaccgucugacggccaggccagcuacaaaauuuuucgcaucgaaaagggcaaaaucgugaaguccgucgagaugaacgcucccaauuaucauuacgaagagugcucuuguuacccugauagcuccgagauuaccugcguuugcagagacaacuggcacgggagcaaucggcccugggugucuuucaaccagaaucuggaauaucagaucggauacauuuguuccggcaucuuuggggauaacccucgccccaaugacaaaacaggaagcugcggcccggugucuuccaacggggccaauggagucaagggcuucagcuuuaaguauggcaacgggguguggauuggaagaaccaaauccaucucuagccggaagggcuucgagaugauuugggauccuaacggguggaccggaacagacaauaacuuuuccaucaaacaagacaucguuggcauuaaugaauggucuggguacagcggcuccuucgugcagcaucccgagcuuacgggacuggauuguauccgcccuugcuucugggucgaacucauuagaggccggcccaaggagaacaccaucuggacaagcgggucuuccauuagcuuuuguggaguuaauucugacaccgugggcugguccuggcccgauggggcugagcugccuuucacaaucgacaaauga

SEQ ID NO: 215173 - RNA, 1410 nt, Artificial Sequence; identical to SEQ ID NO: 212329
  derived and/or modified CDS sequence (opt5) from neuraminidase__InfluenzaA__AFN20001

SEQ ID NO: 215174 - RNA, 1410 nt, Artificial Sequence
  derived and/or modified CDS sequence (opt5) from neuraminidase__InfluenzaA__AFN20013
augaaccccaaucagaagaucauuaccaucggcagcgugugcaugacaauugggauggccaaccugauccuccaaauuggaaauaucaucuccauuuggaucucucacagcauucagcugggcaaccagucccagaucgagacguguaaucaaucugucauuaccuacgaaaacaauacauggguuaaccagaccuaugugaauaucagcaacacaaauuucgcugccgggcaguccguggucucugugaaacuugcgggaaacagcucccugugcccuguuagcggcugggcuauuuacucuaaggacaauuccaucagaaucgggagcaaaggagauguguuugucauucgggagccguucaucucuuguucuccccucgaaugccgcaccuuuuuccugacacagggcgcccuucugaacgacaagcauagcaauggcaccauuaaagauagaucuccuuaucggacgcucauguccugucccaucggggaggugccuagccccuacaacucccgcuuugaaucuguugccuggagcgcuuccgccugccacgacggaauuaacuggcugaccaucggcaucagcgggccugauaauggagcuguggccguccugaaguauaacggcauuaucacagacaccauuaagucuuggagaaauaacauccuccggacacaagaguccgagugugcgugcgugaaugggagcuguuucaccauuaugacggauggaccgucugacggccaggccagcuacaaaaucuuucgcaucgaaaagggcaaaauugugaaguccgucgagaugaacgcucccaauuaucauuacgaagagugcucuuguuacccugauagcuccgagaucacaugcguuugcagagacaacuggcacgggagcaaucggcccugggugucuuucaaccagaaucuggaauaucagauuggauacaucuguuccggcauuuuuggggauaacccucgccccaaugacaaaaccggaagcugcgauccggugucuuccaacggcgccaauggggucaagggauucagcuuuaaguauggcaacggcguguggaucgggagaacaaaauccauuucuagccggaagggauucgagaugaucugggacccuaacggcuggaccgggaccgacaauaacuuuuccaucaaacaagauauuguuggaaucaaugaauggucuggcuacagcggguccuucgugcagcaucccgagcuuacaggccuggacuguauucgcccuugcuucugggucgaacucaucagaggacggcccaaggagaacacgauuuggaccagcggcuccuccaucagcuuuugugggguuaauucugauacagugggaugguccuggcccgacggcgcugagcugccuuucaccaucgauaaauga

SEQ ID NO: 215175 - RNA, 1410 nt, Artificial Sequence
  derived and/or modified CDS sequence (opt5) from neuraminidase__InfluenzaA__AFN20020
augaaccccaaucagaagaucauuaccaucggcagcgugugcaugacaauugggauggccaaccugauccuccaaauuggaaauaucaucuccauuuggaucucucacagcauucagcugggcaaccagucccagaucgagacguguaaucaaucugucauuaccuacgaaaacaauacauggguuaaccagaccuaugugaauaucagcaacacaaauuucgcugccgggcaguccguggucucugugaaacuugcgggaaacagcucccugugcccuguuagcggcugggcuauuuacucuaaggacaauuccaucagaaucgggagcaaaggagauguguuugucauucgggagccguucaucucuuguagcccccucgaaugccgcaccuuuuuccugacacagggcgcccuucugaacgacaagcauuccaauggcaccauuaaagauagaucuccuuaucggacgcucauguccugucccaucggggaggugccuagccccuacaacucccgcuuugaaucuguugccuggagcgcuuccgccugccacgacggaauuaacuggcugaccaucggcaucagcgggccugauaauggagcuguggccguccugaaguauaacggcauuaucacagacaccauuaagucuuggagaaauaacauccuccggacacaagaguccgagugugcgugcgugaaugggagcuguuucaccauuaugacggauggaccgucugacggccaggccagcuacaaaaucuuucgcaucgaaaagggcaaaauugugaaguccgucgagaugaacgcucccaauuaucauuacgaagagugcucuuguuacccugauagcuccgagaucacaugcguuugcagagacaacuggcacgggagcaaucggcccugggugucuuucaaccagaaucuggaauaucagauuggauacaucuguuccggcauuuuuggggauaacccucgccccaaugacaaaaccggaagcugcggcccggugucuuccaacggggccaauggagucaagggcuucagcuuuaaguauggcaacgggguguggaucggaagaacaaaauccauuucuagccggaagggcuucgagaugaucugggauccuaacggguggaccggaaccgacaauaacuuuuccaucaaacaagacauuguuggccuuaaugaauggucuggguacagcggcuccuucgugcagcaucccgagcugacaggacucgauuguauccgcccuugcuucugggucgaacugauuagaggccggcccaaggagaacacgaucuggaccagcgggucuuccauuagcuuuuguggaguuaauucugacacagugggcugguccuggcccgauggggcugagcuuccuuucaccaucgacaaauga

SEQ ID NO: 215176 - RNA, 1410 nt, Artificial Sequence; identical to SEQ ID NO: 212329
  derived and/or modified CDS sequence (opt5) from neuraminidase__InfluenzaA__AFN20022

SEQ ID NO: 215177 - RNA, 1410 nt, Artificial Sequence
  derived and/or modified CDS sequence (opt5) from neuraminidase__InfluenzaA__AFN20035
augaaccccaaucagaagaucauuaccaucggcagcgugugcaugacaauugggaucgccaaccugauucuccaaaucggaaauaucauuuccaucuggauuucucacagcauccagcugggcaaccagucccagauugagacguguaaucaaucugucaucaccuacgaaaacaauacauggguuaaccagaccuaugugaauauuagcaacacaaauuucgcugccgggcaguccguggucucugugaaacuugcgggaaacagcucccugugcccuguuagcggcugggcuaucuacucuaaggacaauuccaucagaauugggagcaaaggagauguguuugucauccgggagccguucauuucuuguagcccccucgaaugccgcaccuuuuuccugacacagggcgcccuucugaacgacaagcauuccaauggcaccaucaaagauagaucuccuuaucggacgcucauguccugucccauuggggaggugccuagccccuacaacucccgcuuugaaucuguugccuggagcgcuuccgccugccacgacggaaucaacuggcugaccaucggcauuagcgggccugauaauggagcuguggccguccugaaguauaacggcaucauuacagacaccaucaagucuuggagaaauaacauucuccggacacaagaguccgagugugcgugcgugaaugggagcuguuucaccaucaugacggauggaccgucugacggccaggccagcuacaaaaucuuucgcauugaaaagggcaaaaucgugaaguccgucgagaugaacgcucccaauuaucauuacgaagagugcucuuguuacccugauagcuccgagauuacaugcguuugcagagacaacuggcacgggagcaaucggcccugggugucuuucaaccagaaucuggaauaucagaucggauacauuuguuccggcaucuuuggggauaacccucgccccaaugacaaaaccggaagcugcggcccggugucuuccaacggggccaauggagucaagggcuucagcuuuaaguauggcaacgggguguggauuggaagaacaaaauccaucucuagccggaagggcuucgagaugaucugggauccuaacggguggaccggaaccgacaauaacuuuuccauuaaacaagacaucguuggcauuaaugaauggucuggguacagcggcuccuucgugcagcaucccgagcuuacaggacuggauuguauccgcccuugcuucugggucgaacucauuagaggccggcccaaggagaacacgaucuggaccagcgggucuuccaucagcuuuuguggaguuaauucugacacagugggcugguccuggcccgauggggcugagcugccuuucaccauugacaaauga

SEQ ID NO: 215178 - RNA, 1410 nt, Artificial Sequence; identical to SEQ ID NO: 212329
  derived and/or modified CDS sequence (opt5) from neuraminidase__InfluenzaA__AFN20041

SEQ ID NO: 215179 - RNA, 1410 nt, Artificial Sequence; identical to SEQ ID NO: 212329
  derived and/or modified CDS sequence (opt5) from neuraminidase__InfluenzaA__AFN20047

SEQ ID NO: 215180 - RNA, 1410 nt, Artificial Sequence; identical to SEQ ID NO: 213152
  derived and/or modified CDS sequence (opt5) from neuraminidase__InfluenzaA__AFN20063

SEQ ID NO: 215181 - RNA, 1410 nt, Artificial Sequence
  derived and/or modified CDS sequence (opt5) from neuraminidase__InfluenzaA__AFN20077
augaaccccaaucagaagaucauuaccaucggcagcgugugcaugacaauugggauggccaaccugauccuccaaauuggaaauaucaucuccauuuggaucucucacagcauucagcugggcaaccagucccagaucgagacguguaaucaaucugucauuaccuacgaaaacaauacauggguuaaccagaccuaugugaauaucagcaacacaaauuucgcugccgggcaguccguggucucugugaaacuugcgggaaacagcucccugugcccuguuagcggcugggcuauuuacucuaaggacaauuccaucagaaucgggagcaaaggagauguguuugucauucgggagccguucaucucuuguagcccccucgaaugccgcaccuuuuuccugacacagggcgcccuucugaacgacaagcauuccaauggcaccauuaaagauagaucuccuuaucggacgcucauguccugucccaucggggaggugccuagccccuacaacucccgcuuugaaucuguugccuggagcgcuuccgccugccacgacggaauuaacuggcugaccaucggcaucagcgggccugauaauggagcuguggccguccugaaguauaacggcauuaucacagacaccauuaagucuuggagaaauaacauccuccggacacaagaguccgagugugcgugcgugaaugggagcuguuucaccauuaugacggauggaccgucugacggccaggccagcuacaaaaucuuuaagaucgaaaaaggcaagauugugaaauccgucgagaugaacgcucccaauuaucauuacgaagagugcucuuguuacccugauagcuccgagaucacaugcguuugccgcgacaacuggcacgggagcaauagacccugggugucuuucaaccagaaucuggaauaucagauuggauacaucuguuccggcauuuuuggggauaacccucggcccaaugacaagaccggaagcugcggcccggugucuuccaacggggccaauggagucaagggcuucagcuuuaaauauggcaacgggguguggaucggacgcacaaaguccauuucuagcagaaaaggcuucgagaugaucugggauccuaacggguggaccggaaccgacaauaacuuuuccaucaagcaagacauuguuggcaucaaugaauggucuggguacagcggcuccuucgugcagcaucccgagcuuacaggacuggauuguauucggccuugcuucugggucgaacucauccgcggcagacccaaagagaacacgauuuggaccagcgggucuuccaucagcuuuuguggaguuaauucugacacagugggcugguccuggcccgauggggcugagcugccuuucaccaucgacaaguga

SEQ ID NO: 215182 - RNA, 1410 nt, Artificial Sequence; identical to SEQ ID NO: 212329
  derived and/or modified CDS sequence (opt5) from neuraminidase__InfluenzaA__AFN20083

SEQ ID NO: 215183 - RNA, 1410 nt, Artificial Sequence
  derived and/or modified CDS sequence (opt5) from neuraminidase__InfluenzaA__AFN20094
augaaccccaaucagaagaucauuaccaucggcagcgugugcaugacaauugggauggccaaccugauccuccaaauuggaaauaucaucuccauuuggaucucucacagcauucagcugggcaaccagucccagaucgagacguguaaucaaucugugauuaucuacgaaaacaauaccuggguuaaccagacauaugugaauauuagcaacaccaauuucgcugccgggcaguccguggucucugugaaacuugcgggaaacagcucccugugcccuguuagcggcugggcuaucuacucuaaggacaauuccaucagaauugggagcaaaggagauguguuugucauccgggagccguucauuucuuguagcccccucgaaugccgcacauuuuuccugacccagggcgcccuucugaacgacaagcauuccaauggcacaaucaaagauagaucuccuuaucggacccucauguccugucccauuggggaggugccuagccccuacaacucccgcuuugaaucuguugccuggagcgcuuccgccugccacgacggaaucaacuggcugacgaucggcauuagcgggccugauaauggagcuguggccguccugaaguauaacggcaucauuaccgacacaaucaagucuuggagaaauaacauucuccggacccaagaguccgagugugcgugcgugaaugggagcuguuucacaaucaugaccgauggaccgucugacggccaggccagcuacaaaaucuuucgcauugaaaagggcaaaaucgugaaguccgucgagaugaacgcucccaauuaucauuacgaagagugcucuuguuacccugauagcuccgagauuacgugcguuugcagagacaacuggcacgggagcaaucggcccugggugucuuucaaccagaaucuggaauaucagaucggauacauuuguuccggcaucuuuggggauaacccucgccccaaugacaaagccggaagcugcggcccggugucuuccaacggggcuaauggagucaagggcuucagcuuuaaguauggcaacgggguguggauuggaagaacaaaauccaucucuagccggaagggcuucgagaugaucugggauccuaacggguggaccggaacagacaauaacuuuuccauuaaacaagacaucguuggcauuaaugaauggucuggguacagcggcuccuucgugcagcaucccgagcuuaccggacuggauuguauccgcccuugcuucugggucgaacucauuagaggccggcccaaggagaacaccaucuggacaagcgggucuuccaucagcuuuuguggagucaauucugacacgaugggcugguccuggcccgauggggccgagcugccuuucaccauugacaaauga

SEQ ID NO: 215184 - RNA, 1410 nt, Artificial Sequence; identical to SEQ ID NO: 212788
  derived and/or modified CDS sequence (opt5) from neuraminidase__InfluenzaA__AFN20100

SEQ ID NO: 215185 - RNA, 1410 nt, Artificial Sequence
  derived and/or modified CDS sequence (opt5) from neuraminidase__InfluenzaA__AFN20114
augaaccccaaucagaagaucauuaccaucggcagcgugugcaugacaauugggauggccaaccugauccuccaaauuggaaauaucaucuccauuuggaucucucacagcauucagcugggcaaccagaaucagaucgagacguguaaccaauccgucauuaccuacgaaaauaacacauggguuaaucagaccuaugugaacaucucuaauacaaacuucgcugccgggcagagcguggucuccgugaaacuugcgggaaauucuagccugugcccuguuuccggcugggcuauuuacagcaaggacaacucuaucagaaucggguccaaaggagauguguuugucauucgggagccguucaucagcuguucuccccucgaaugccgcaccuuuuuccugacacagggcgcccuucugaaugacaagcauuccaacggcaccauuaaagauagaagcccuuaucggacgcucaugucuugucccaucggggaggugccuucccccuacaacagccgcuuugaauccguugccuggucugcuagcgccugccacgacggaauuaauuggcugaccaucggcaucuccgggccugauaacggagcuguggccguccugaaguauaauggcauuaucacagacaccauuaagagcuggagaaacaauauccuccggacacaagagucugagugugcgugcgugaacggguccuguuucaccgugaugacggauggaccgagcgacggccaggccucuuacaaaauuuuuaagaucgaaaaaggcaagaucgucaaaagcguugagaugaaugcucccaacuaucauuacgaagagugcuccuguuacccugauucuagcgagauuacaugcgugugccgcgacaauuggcacggguccaacagacccugggugagcuucaaucagaaccuggaauaucagaucggauacauuuguucuggcaucuuuggggauaauccucggcccaacgacaagaccggauccugcagcccggucucuuccaauggcgccaacggggugaagggauucagcuuuaaauauggcaacggcguuuggauugggcgcacaaaguccaccucuagcagaaauggauucgagaugaucugggauccuaacggcuggaccgggacagacaauuccuuuucuaugaaacaagacauugugggaaucaacgaauggagcggcuacuccgggagcuucguccagcaucccgagcuuacgggccuggauuguauccggccuugcuucuggguggaacucauucgcggaagacccaaggagaauaccguuuggacaucuggcuccagcaucucuuuuuguggggugaacuccgacaccgucggauggagcuggcccgauggcgcugagcugccuuucacaauugacaaauga

SEQ ID NO: 215186 - RNA, 1410 nt, Artificial Sequence
  derived and/or modified CDS sequence (opt5) from neuraminidase__InfluenzaA__AFN20128
augaaccccaaucagaagaucauuaccaucggcagcgugugcaugacaauugggauggccaaccugauccuccaaauuggaaauaucaucuccauuuggaucucucacagcauucagcugggcaaccagucccagaucgagacguguaaucaaucugucauuaccuacgaaaacaauacauggguuaaccagaccuaugugaauaucagcaacacaaauuucgcugccgggcaguccguggucucugugaaacuugcgggaaacagcucccugugcccuguuagcggcugggcuauuuacucuaaggacaauuccaucagaaucgggagcaaaggagauguguuugucauucgggagccguucaucucuuguagcccccucgaaugccgcaccuuuuuccugacacagggcgcccuucugaacgacaagcauuccaauggcaccauuaaagauagaucuccuuaucggacgcucauguccugucccaucggggaggugccuagccccuacaacucccgcuuugaaucuguugccuggagcgcuuccgccugccacgacggaauuaacuggcugaccaucggcaucagcgggccugauaauggagcuguggccguccugaaguauaacggcauuaucacagacaccauuagaucuuggcggaauaacauccuccgcacacaagaguccgagugugcgugcgugaaugggagcuguuucaccauuaugacggauggaccgucugacggccaggccagcuacaagaucuuuagaaucgaaaaaggcaagauuaucaaauccguggagaugaacgcucccaauuaucauuacgaagagugcucuuguuacccugauagcuccgagauuacaugcgucugccgggacaacuggcacgggagcaaucgccccuggguuucuuucaaccagaaucuggaauaucagaucggauacauuuguuccggcaucuuuggggauaacccuagaagcaaugacaagaccggaucuugcggccccguguccagcaacggggccaauggagugaaaggcuucuccuuuaaguauggcaacggggucuggauuggacggacaaagucuaucagcucccgcaaaggcuucgagaugaucugggauccgaacggguggaccggaaccgacaauaacuuuucuauuaagcaagacaucgugggcauuaaugaauggagcggguacuccggcagcuucguucagcauccugagcuuacaggacuggauuguaucagacccugcuucuggguggaacucauucggggccgcccuaaagagaacacgaucuggaccucuggguccagcaucucuuuuuguggagucaauuccgacacagugggcuggagcuggcccgauggggcugagcugcccuucaccauugacaaguga

SEQ ID NO: 215187 - RNA, 1410 nt, Artificial Sequence; identical to SEQ ID NO: 212329
  derived and/or modified CDS sequence (opt5) from neuraminidase__InfluenzaA__AFN87935

SEQ ID NO: 215188 - RNA, 1410 nt, Artificial Sequence
  derived and/or modified CDS sequence (opt5) from neuraminidase__InfluenzaA__AFN87937
augaaccccaaucagaagaucauuaccaucggcagcgugugcaugacaauugggauggccaaccugauccuccaaauuggaaauaucaucuccauuuggaucucucacagcauucagcugggcaaccagaaucagaucgagacguguaaccaauccgucauuaccuacgaaaauaacacauggguuaaucagaccuaugugaacaucucuaauacaaacuucgcugccgggcagagcguggucuccgugaaacuugcgggaaauucuagccugugcccuguuuccggcugggcuauuuacagcaaggacaacucuaucagaaucggguccaaaggagauguguuugucauucgggagccguucaucagcuguucuccccucgaaugccgcaccuuuuuccugacacagggcgcccuucugaaugacaagcauuccaacggcaccauuaaagauagaagcccuuaucggacgcucaugucuugucccaucggggaggugccuucccccuacaacagccgcuuugaauccguugccuggucugcuagcgccugccacgacggaauuaauuggcugaccaucggcaucuccgggccugauaacggagcuguggccguccugaaguauaauggcauuaucacagacaccauuaagagcuggagaaacaauauccuccggacacaagagucugagugugcgugcgugaacggguccuguuucaccgugaugacggauggaccgagcgacggccaggccucuuacaaaauuuuuaagaucgaaaaaggcaagaucgucaaaagcguugagaugaaugcucccaacuaucauuacgaagagugcuccuguuacccugauucuagcgagauuacaugcgugugccgcgacaauuggcacggguccaacagacccugggugagcuucaaucagaaccuggaauaucagaucggauacauuuguucuggcaucuuuggggauaauccucggcccaacgacaagaccggauccugcggcccggucagcucuaauggggccaacggagugaagggcuucuccuuuaaauauggcaacgggguuuggauuggacgcacaaagagcaccuccucuagaaauggcuucgagaugaucugggauccuaacggguggaccggaacagacaauagcuuuuccaugaaacaagacauugugggcaucaacgaauggucuggguacagcggcuccuucguccagcaucccgagcuuacgggacuggauuguauccggccuugcuucuggguggaacucauucgcggcagacccaaggagaauaccguuuggacaagcgggucuuccaucagcuuuuguggagugaacucugacaccgucggcugguccuggcccgauggggcugagcugccuuucacaauugacaaauga

SEQ ID NO: 215189 - RNA, 1410 nt, Artificial Sequence
  derived and/or modified CDS sequence (opt5) from neuraminidase__InfluenzaA__AFN87940
augaaccccaaucagaagaucauuaccaucggcagcgugugcaugacaauugggauggccaaccugauccuccaaauuggaaauaucaucuccauuuggaucucucacagcauucagcugggcaaccagaaucagaucgagacguguaaccaauccgucauuaccuacgaaaauaacacauggguuaaucagaccuaugugaacaucucuaauacaaacuucgcugccgggcagagcguggucuccgugaaacuugcgggaaauucuagccugugcccuguuuccggcugggcuauuuacagcaaggacaacucuaucagaaucggguccaaaggagauguguuugucauucgggagccguucaucagcuguucuccccucgaaugccgcaccuuuuuccugacacagggcgcccuucugaaugacaagcauuccaacggcaccauuaaagauagaagcccuuaucggacgcucaugucuugucccaucggggaggugccuucccccuacaacagccgcuuugaauccguugccuggucugcuagcgccugccacgacggaauuaauuggcugaccaucggcaucuccgggccugauaacggagcuguggccguccugaaguauaauggcauuaucacagacaccauuaagagcuggagaaacaauauccuccggacacaagagucugagugugcgugcgugaacggguccuguuucaccgugaugacggauggaccgagcgacggccaggccucuuacaaaauuuuuaagaucgaaaaaggcaagaucgucaaaagcguugagaugaaugcucccaacuaucauuacgaagagugcuccuguuacccugauucuagcgagauuacaugcgugugccgcgacaauuggcacggguccaacagacccugggugagcuucaaucagaaccuggaauaucagaucggauacauuuguucuggcaucuuuggggauaauccucggcccaacgacaagaccggauccugcggcccggucagcucuaauggggccaacggagugaagggcuucuccuuuaaauauggcaacgggguuuggauuggacgcacaaagagcaccuccucuagaaauggcuucgagaugaucugggauccuaacggguggaccggaacagacaauagcuuuuccauuaaacaagacaucgugggcaucaacgaauggucuggguacagcggcuccuucguccagcaucccgagcuuacgggacuggauuguauucggccuugcuucuggguggaacucauccgcggcagacccaaggagaauaccauuuggacaagcgggucuuccaucagcuuuuguggaguuaacucugacaccgugggcugguccuggcccgauggggcugagcugccuuucacaauugacaaauga

SEQ ID NO: 215190 - RNA, 1410 nt, Artificial Sequence; identical to SEQ ID NO: 208810
  derived and/or modified CDS sequence (opt5) from neuraminidase__InfluenzaA__AFN87942

SEQ ID NO: 215191 - RNA, 1410 nt, Artificial Sequence; identical to SEQ ID NO: 215188
  derived and/or modified CDS sequence (opt5) from neuraminidase__InfluenzaA__AFN87944

SEQ ID NO: 215192 - RNA, 1410 nt, Artificial Sequence
  derived and/or modified CDS sequence (opt5) from neuraminidase__InfluenzaA__AFN87946
augaaccccaaucagaagaucauuaccaucggcagcgugugcaugacaauugggauggccaaccugacgcuccaaaucggaaauauuaucuccaucuggauuucucacagcauccagcugggcaaccagaaucagauugagaccuguaaccaauccgucaucaauuacgaaaacaauacauggguuaaccagaccuaugugaauauuucuaacacaaauuucgcugccgggcagagcguggucuccgugaaacuugcgggaaacucuagccugugcccuguuuccggcugggcuaucuacagcaaggacaauucuauuagaaucggguccaaaggagauguguuugucauccgggagccguucgugagcuguucuccccucgaaugccgcaccuuuuuccugacacagggcgcccuucugaacgacaagcauuccaacggcaccauuaaagauagaagcccuuaucggacgcucaugucuugucccaucggggagguuccuucccccuacaauagccgcuuugaauccguggccuggucugcuagcgccugccacgacggaauuaacuggcugaccaucggcauuuccgggccugauaauggagcugucgccgugcugaaguauaacggcaucaucacagacaccauuaagagcuggagaaauaacauccuccggacacaagagucugagugugcgugcgugaauggguccuguuucaccgucaugacggauggaccgagcgacggccaggccucuuacaaaauuuuucgcaucgaaaagggcaaaauuguuaagagcguggagaugaacgcucccaauuaucauuacgaagagugcuccuguuacccugauucuagcgaggugacaugcgucugcagagacaacuggcacggguccaaucggcccugggugagcuucaaccagaaucuggaauaucagaucggauacaucuguucuggcauuuuuggggauaacccucgccccaaugacaaaaccggauccugcggcccgguuagcucuaacggggccaacggagugaagggcuucuccuuuaaguauggcaauggggucuggaucggaagaacaaaaagcauuuccucucggaacggcuucgagaugaucugggauccuaauggguggaccggaaccgacaacaauuuuagcauuaagcaagacaucgugggcauuaacgaaugguccggguacucuggcagcuucguucagcaucccgagcuuacaggacuggauuguauccgcccuugcuucuggguggaacucaucagaggccggcccaaagagaauacgauuuggaccuccgggagcucuaucuccuuuuguggagucaacagcgacacagugggcuggucuuggcccgauggggcugagcugccuuucaccauugacaaguga

SEQ ID NO: 215193 - RNA, 1410 nt, Artificial Sequence
  derived and/or modified CDS sequence (opt5) from neuraminidase__InfluenzaA__AFN87948
augaaccccaaucagaagaucauuaccaucggcagcgugugcaugacaauugggauggccaaccugauccuccaaauuggaaauaucaucuccauuuggaucucucacagcauucagcugggcaaccagaaucagaucgagacguguaaccaauccgucauuaccuacgaaaauaacacauggguuaaucagaccuaugugaacaucucuaauacaaacuucgcugccgggcagagcguggucuccgugaaacuugcgggaaauucuagccugugcccuguuuccggcugggcuauuuacagcaaggacaacucuaucagaaucggguccaaaggagauguguuugucauucgggagccguucaucagcuguucuccccucgaaugccgcaccuuuuuccugacacagggcgcccuucugaaugacaagcauuccaacggcaccauuaaagauagaagcccuuaucggacgcucaugucuugucccaucggggaggugccuucccccuacaacagccgcuuugaauccguugccuggucugcuagcgccugccacgacggaauuaauuggcugaccaucggcaucuccgggccugauaacggagcuguggccguccugaaguauaauggcauuaucacagacaccauuaagagcuggagaaacaauauccuccggacacaagagucugagugugcgugcgugaacggguccuguuucaccgugaugacggauggaccgagcgacggccaggccucuuacaaaauuuuuaagaucgaaaaaggcaagaucgucaaaagcguugagaugaaugcucccaacuaucauuacgaagagugcuccuguuacccugauucuagcgagauuacaugcgugugccgcgacaauuggcacggguccaacagacccugggugagcuucaaucagaaccuggaauaucagaucggauacauuuguucuggcaucuuuggggauaauccucggcccaacgacaagaccggauccugcggcccggucagcucuaauggggccaacggagugaagggcuucuccuuuaaauauggcaacgggguuuggauuggacgcacaaagagcaccuccucuagaaauggcuucgagaugaucugggauccuaacggguggaccggaacagacaauagcuuuuccauuaaacaagacaucgugggcaucaacgaauggucuggguacagcggcuccuucguccagcaucccgagcuuacgggacuggauuguauucggccuugcuucuggguggaacucauccgcggcagacccaaggagaauaccauuuggacaagcgggucuuccaucagcuuuuguggaguuaacucugacauugugggcugguccuggcccgauggggcugagcugccuuucaccaucgacaaauga

SEQ ID NO: 215194 - RNA, 1410 nt, Artificial Sequence
  derived and/or modified CDS sequence (opt5) from neuraminidase__InfluenzaA__AFN87950
augaaccccaaucagaagaucauuaccaucggcagcgugugcaugacaauugggauggccaaccugauccuccaaauuggaaauaucaucuccauuuggaucucucacagcauucagcugggcaaccagucccagaucgagacguguaaucaaucugucauuaccuacgaaaacaauacauggguuaaccagaccuaugugaauaucagcaacacaaauuucgcugccgggcaguccguggucucugugaaacuugcgggaaacagcucccugugcccuguuagcggcugggcuauuuacucuaaggacaauuccaucagaaucgggagcaaaggagauguguuugucauucgggagccguucaucucuuguagcccccucgaaugccgcaccuuuuuccugacacagggcgcccuucugaacgacaagcauuccaauggcaccauuaaagauagaucuccuuaucggacgcucauguccugucccaucggggaggugccuagccccuacaacucccgcuuugaaucuguugccuggagcgcuuccgccugccacgacggaauuaacuggcugaccaucggcaucagcgggccugauaauggagcuguggccguccugaaguauaacggcauuaucacagacaccauuaagucuuggagaaauaacauccuccggacacaagaguccgagugugcgugcgugaaugggagcuguuucaccgugaugacggauggaccgucugacggccaggccagcuacaaaauuuuucgcaucgaaaagggcaaaaucgucaaguccguugagaugaacgcucccaauuaucauuacgaagagugcucuuguuacccugauagcuccgagauuacaugcgugugcagagacaacuggcacgggagcaaucggcccugggugucuuucaaccagaaucugaaauaucagaucggauacauuuguuccggcaucuuuggggauaacccucgccccaaugacaagaccggaagcugcggcccggucucuuccaacggggccaauggagugaagggcuucagcuuuaaauauggcaacgggguuuggauuggaagaacaaaguccaucucuagccggaaaggcuucgaaaugauuugggauccuaacggguggaccggaaccgacaauaacuuuuccaucaagcaagacaucauuggcaucaaugaguggucuggguacagcggcuccuucgugcagcaucccgaacuuacaggacuggauuguauucgcccuugcuucugggucgagcucaucagaggccggcccaaagaaaacacgauuuggaccagcgggucuuccaucagcuuuuguggaguuaauucugacacagugggcugguccuggcccgauggggcugagcugccuuucaccaucgacaaguga

SEQ ID NO: 215195 - RNA, 1410 nt, Artificial Sequence; identical to SEQ ID NO: 212781
  derived and/or modified CDS sequence (opt5) from neuraminidase__InfluenzaA__AFN87952

SEQ ID NO: 215196 - RNA, 1410 nt, Artificial Sequence
  derived and/or modified CDS sequence (opt5) from neuraminidase__InfluenzaA__AFN87954
augaaccccaaucagaagaucauuaccaucggcagcgugugcaugacaauugggauggccaaccugauccuccaaauuggaaauaucaucuccauuuggaucucucacagcauucagcugggcaaccagaaucagaucgagacguguaaccaauccgucauuaccuacgaaaauaacacauggguuaaucagaccuaugugaacaucucuaauacaaacuucgcugccgggcagagcguggucuccgugaaacuugcgggaaauucuagccugugcccuguuuccggcugggcuauuuacagcaaggacaacucuaucagaaucggguccaaaggagauguguuugucauucgggagccguucaucagcuguucuccccucgaaugccgcaccuuuuuccugacacagggcgcccuucugaaugacaagcauuccaacggcaccauuaaagauagaagcccuuaucggacgcucaugucuugucccaucggggaggugccuucccccuacaacagccgcuuugaauccguugccuggucugcuagcgccugccacgacggaauuaauuggcugaccaucggcaucuccgggccugauaacggagcuguggccguccugaaguauaauggcauuaucacagacaccauuaagagcuggagaaacaauauccuccggacacaagagucugagugugcgugcgugaacggguccuguuucaccgugaugacggauggaccgagcgacggccaggccucuuacaaaauuuuucgcaucgaaaagggcaaaaucgucaagagcguugagaugaaugcucccaacuaucauuacgaagagugcuccuguuacccugauucuagcgagauuacaugcgugugcagagacaauuggcacggguccaaccggcccugggugagcuucaaucagaaccuggaauaucagaucggauacauuuguucuggcaucuuuggggauaauccucgccccaacgacaaaaccggauccugcggcccggucagcucuaauggggccaacggagugaagggcuucuccuuuaaguauggcaacgggguuuggauuggaagaacaaaaagcaucuccucucggaagggcuucgagaugauuugggauccuaauggguggaccggaaccgacaacaauuuuagcaucaaacaagacaucgugggcauuaacgaaugguccggguacucuggcagcuucguccagcaucccgagcuuacaggacuggauuguauccgcccuugcuucuggguggaacucauuagaggccggcccaaggagaauacgaucuggaccuccgggagcucuauuuccuuuuguggaguuaacagcgacacaaugggcuggucuuggcccgauggggcugagcugccuuucaccaucgacaaauga

SEQ ID NO: 215197 - RNA, 1410 nt, Artificial Sequence
  derived and/or modified CDS sequence (opt5) from neuraminidase__InfluenzaA__AFN87956
augaaccccaaucagaagaucauuaccaucggcagcgugugcaugacaauugggauggccaaccugauccuccaaauuggaaauaucaucuccauuuggaucucucacagcauucagcugggcaaccagucccagaucgagacguguaaucaaucugucauuaccuacgaaaacaauacauggguuaaccagaccuaugugaauaucagcaacacaaauuucgcugccgggcaguccguggucucugugaaacuuguuggaaacagcucccugugcccugugagcggcugggcgauuuacucuaaggacaauuccaucagaaucgggagcaaaggagaugucuuugugauucgggagccguucaucucuuguagcccccucgaaugccgcaccuuuuuccugacacagggcgcccuucugaacgacaagcauuccaauggcaccauuaaagauagaucuccuuaucggacgcucauguccugucccaucggggagguuccuagccccuacaacucccgcuuugaaucuguggcuuggagcgccuccgcuugccacgacggaauuaacuggcugaccaucggcaucagcgggccugauaauggagccgucgcugugcugaaguauaacggcauuaucacagacaccauuaagucuuggagaaauaacauccuccggacacaagaguccgagugugccugcgugaaugggagcuguuucaccauuaugacggauggaccgucugacggccaggcgagcuacaaaaucuuucgcaucgaaaagggcaaaauugucaaguccguugagaugaacgcccccaauuaucauuacgaagagugcucuuguuacccugauagcuccgagaucacaugcgugugcagagacaacuggcacgggagcaaucggcccugggugucuuucaaccagaaucuggaauaucagauuggauacaucuguuccggcauuuuuggggauaacccucgccccaaugacaaaaccggaagcugcggcccggucucuuccaacggggcuaauggagugaagggcuucagcuuuaaguauggcaacgggguuuggaucggaagaacaaaauccauuucuagccggaagggcuucgagaugaucugggauccuaacggguggaccggaaccgacaauaacuuuuccaucaaacaagacauugugggcacaaaugaauggucuggguacagcggcuccuucguccagcaucccgagcuuacgggacuggauuguauccgcccuugcuucuggguggaacucauuagaggccggcccaaggagaacaccaucuggacaagcgggucuuccauuagcuuuuguggaguuaauucugacaccgugggcugguccuggcccgauggggccgagcugccuuucacaaucgacaacuga

SEQ ID NO: 215198 - RNA, 1410 nt, Artificial Sequence
  derived and/or modified CDS sequence (opt5) from neuraminidase__InfluenzaA__AFN87958
augaaccccaaucagaagaucauuaccaucggcagcgugugcaugacaauugggauggccaaccugauccuccaaauuggaaauaucaucuccauuuggaucucucacagcauucagcugggcaaccagaaucagaucgagacguguaaccaauccgucauuaccuacgaaaauaacacauggguuaaucagaccuaugugaacaucucuaauacaaacuucgcugccgggcagagcguggucuccgugaaacuugcgggaaauucuagccugugcccuguuuccggcugggcuauuuacagcaaggacaacucuaucagaaucggguccaaaggagauguguuugucauucgggagccguucaucagcuguucuccccucgaaugccgcaccuuuuuccugacacagggcgcccuucugaaugacaagcauuccaacggcaccauuaaagauagaagcccuuaucggacgcucaugucuugucccaucggggaggugccuucccccuacaacagccgcuuugaauccguugccuggucugcuagcgccugccacgacggaauuaauuggcugaccaucggcaucuccgggccugauaacggagcuguggccguccugaaguauaauggcauuaucacagacaccauuaagagcuggagaaacaauauccuccggacacaagagucugagugugcgugcgugaacggguccuguuucaccgugaugacggauggaccgagcgacggccaggccucuuacaaaauuuuuaagaucgaaaaaggcaagaucgucaaaagcguugagaugaaugcucccaacuaucauuacgaagagugcuccuguuacccugauucuagcgagauuacaugcgugugccgcgacaauuggcacggguccaacagacccugggugagcuucaaucagaaccuggaauaucagaucggauacauuuguucuggcaucuuuggggauaauccucggcccaacgacaagaccggauccugcggcccggccagcucuaauggggcuaacggagucaagggcuucuccuuuaaauauggcaacgggguguggauuggacgcacaaagagcaccuccucuagaaauggcuucgagaugaucugggauccuaacggguggaccggaacagacaauagcuuuuccaugaaacaagacauuguuggcaucaacgaauggucuggguacagcggcuccuucgugcagcaucccgagcuuacgggacuggauuguauccggccuugcuucugggucgaacucauucgcggcagacccaaggagaauaccguguggacaagcgggucuuccaucagcuuuuguggaguuaacucugacaccgugggcugguccuggcccgauggggccgagcugccuuucacaauugacaaauga

SEQ ID NO: 215199 - RNA, 1410 nt, Artificial Sequence
  derived and/or modified CDS sequence (opt5) from neuraminidase__InfluenzaA__AFN87960
augaaccccaaucagaagaucauuaccaucggcagcgugugcaugacaauugggauggccaaccugauccuccaaauuggaaauaucaucuccauuuggaucucucacagcauucagcugggcaaccagucccagaucgagacguguaaucaaucugucauuaccuacgaaaacaauacauggguuaaccagaccuaugugaauaucagcaacacaaauuucgcugccgggcaguccguggucucugugaaacuugcgggaaacagcucccugugcccuguuagcggcugggcuauuuacucuaaggacaauuccaucagaaucgggagcaaaggagauguguuugucauucgggagccguucaucucuuguagcccccucgaaugccgcaccuuuuuccugacacagggcgcccuucugaacgacaagcauuccaauggcaccauuaaagauagaucuccuuaucggacgcucauguccugucccaucggggaggugccuagccccuacaacucccgcuuugaaucuguugccuggagcgcuuccgccugccacgacggaauuaacuggcugaccaucggcaucagcgggccugauaauggagcuguggccguccugaaguauaacggcauuaucacagacaccauuaagucuuggagaaauaacauccuccggacacaagaguccgagugugcgugcgugaaugggagcuguuucaccauuaugacggauggaccgucugacggccaggccagcuacaaaaucuuucgcaucgaaaagggcaaaauugugaaguccgucgagaugaacgcucccaauuaucauuacgaagagugcucuuguuacccugauagcuccgagaucacaugcguuugcagagacaacuggcacgggagcaaucggcccugggugucuuucaaccagaaucuggaauaucagauuggauacaucuguuccggcauuuuuggggauaacccucgccccaaugacaaaaccggaagcugcggcccggugucuuccaacggggccaauggagucaagggcuucagcuuuaaguauggcaacgggguguggaucggaagaacaaaauccauuucuagccggaagggcuucgagaugaucugggauccuaacggguggaccggaaccgacaauaacuuuuccaucaaacaagacauuguuggcaucaaugaauggucuggguacagcggcuccuucgugcagcaucccgagcuuacaggacuggauuguauucgcccuugcuucuggaucgaacucauuagaggccggcccaaggagaacacgaucuggaccagcgggucuuccaucagcuuuuguggagucaauucugacacagugggcugguccuggcccgauggggcugagcugccuuucaccauugacaaauga

SEQ ID NO: 215200 - RNA, 1413 nt, Artificial Sequence
  derived and/or modified CDS sequence (opt5) from neuraminidase__InfluenzaA__AFO64805
augaaccccaaucagaagaucauuaccaucggcagcauuuccaucgccauugggaucaucucucugaugcuccaaauuggaaacaucauuagcaucugggcuucccacucuauucagacaggcagccagaaucauacggggaucugcaaccagagaauuaucaccuacgagaauagcacaugggugaaccacaccuaugucaauaucaacaauacaaacguuguggccggaaaagacaagaccucugugacacuggcgggcaauagcucccuuuguagcauuucugggugggcuaucuacaccaaagauaacuccauucggaucggaagcaagggcgacgucuucgugauucgcgaaccuuuuaucucuugcucccaucuggaguguagaacguucuuucucacccaaggcgcccugcuuaaugauaaacacagcaacgggacaguuaaggaccggucuccguaucgcgcccugauguccugcccccucggagaagcuccuagccccuacaauuccaaguucgagucuguggccuggagcgcuuccgccugucaugauggcaugggguggcugaccaucggaauuagcggcccugacaacggggcggucgccgugcugaaauauaacggaaucauuacagaaaccaucaagucuuggaaaaagcggauucucagaacgcaggaguccgagugcguuugugugaauggcagcugcuuuacaaucaugaccgauggccccaacaauggggcugccucuuacaaaaucuucaagauugaaaagggaaaagucacaaagagcaucgagcugaacgcuccuaauucccacuaugaagaguguucuugcuacccggacaccggcaccgugaugugugugugccgcgauaacuggcacgggagcaauagacccugggucuccuuuaaccagaaucuugacuaccagauuggauauaucugcagcggcguuuucggggauaacccucggcccaaagacggagagggcucuuguaauccugugacaguggauggcgccgacggggucaagggauuuuccuacaaauauggcaacgggguguggauuggacgcacgaaguccaauagacugcggaaaggcuucgaaaugaucugggaccccaacggguggaccgauacagacucugauuuuuccguuaagcaagacguggucgcgauuaccgauuggagcggcuacuccggaucuuucgugcagcauccggagcucacaggccuggacugcauccgcccuuguuuuuggguugaacuugugagagggcugccccgggagaauaccacgaucuggacaagcggauccucuauuagcuucugcggcgucaacuccgauaccgccaacuggagcuggccugacggggcugaacuccccuucaccaucgauaaguga

SEQ ID NO: 215201 - RNA, 1413 nt, Artificial Sequence
  derived and/or modified CDS sequence (opt5) from neuraminidase__InfluenzaA__AFO64816
augaaccccaaucagaagaucauuaccaucggcagcauuugcauggccaucgggauuaucucccugauccuccaaauuggaaacaucgugucuauuuggaucagccacuccauucagacaggcucucagaauuacacggggaucuguaaccagagaauuaucaccuaugagaauagcacaugggucaaccaaaccuacguuaauaucaacaauacaaacgugguggcuggacaggacaccacauccgucgcccuggcgggcaauucuagccuuugcccuauuuccgggugggcuaucuauagcaaagauaacucuauucggaucggauccaagggcgacguguucguuauucgcgaaccguuuaucagcuguucucaucuggagugcagaaccuucuuucucacgcagggcgcccugcuuaaugauaaacacuccaacgggaccgugaaggaccggagccccuaccgcgcccugaugucuuguccuaucggagaagcucccuccccuuauaauagcagauucgaguccgucgccuggucugcuagcgccugccaugauggcaugggguggcucacaauuggaaucuccggccccgacgauggggcgguggccguucugaaauacaacggaauuaucaccgaaacaauuaagagcuggcggcgcagaauccugcggacccaggagucugagugugugugcgucaacggcuccuguuuuacgaucaugacagacggcccuaauaacgggccggcuagcuauaagauuuucaaaaucgaaaagggaaaagugaccaagucuauugagcucgaugcccccaauagccacuacgaagagugcuccuguuacccugacgcuggcacagugaugugcgucugccgcgauaacuggcaugggucuaauagacccuggguuagcuuuaaccaaaaucuggacuaucagaucggauacauuuguuccggcguguucggggauaacccucggcccaaagacggaaagggcagcugcgacccggugaccgucgauggcgccgacggggugaagggauuuucuuaucgcuacggcaaugggguuuggaucggaagaaccaaauccaacagcucucggcgcggcuucgagaugauuugggauccuaauggguggacagacacggauuccaaguuucuugugaaacaggacgucguggcgaugaccgauuggagcggcuauuccggaucuuucguucagcaccccgaacugacaggccucgacuguaugagaccuugcuuuuggguggagcugauccgggggagaccccgcgaaaacaccacaaucuggaccagcggauccucuauuagcuucuguggcgucaauggggauacggccaacugguccuggcccgacggagcugagcuuccuuucacaaucgauaaguga

SEQ ID NO: 215202 - RNA, 1413 nt, Artificial Sequence
  derived and/or modified CDS sequence (opt5) from neuraminidase__InfluenzaA__AFO64827
augaaccccaaucagaagaucauuaccaucggcagcauuuccauggccaucgggauuaucucucugauccuccaaauuggaaacaucauuagcaucugggugucccacucuauucagacaggcagccagaaucauacggggaucugcaaccagagaauuaucaccuacgagaauagcacaugggucaaccaaaccuauguuaauaucaacaauacaaacgugauugcuggaaaagacaagaccucugugacacuggccggcaauagcucccuuuguccuauccgggggugggcgauuuacaccaaagauaacagcauccgcauuggaucuaagggcgacgucuucgugaucagagaaccguuuaucuccugcagccaccuggagugucggacguucuuucucacccagggcgcucugcuuaaugauaaacauucuaacgggacaguuaaggaccgcucccccuauagagcccugaugagcugcccucucggagaagcccccucuccuuacaauucccgguucgagagcguggcuugguccgccucugcuugucacgauggcaugggguggcugaccauuggaaucagcggccccgacgauggggccgucgcggugcugaaguauaacggaauuaucacagaaaccauuaaauccuggaagaaacgcauccucagaacgcaggagagcgagugcguuugugugaacggcucuugcuuuacaaucaugaccgacggcccuuccaauggggccgcuagcuaccggauuuucaagaucgaaaaaggaaaggucacaaagucuauugagcuggaugccccgaacagccauuaugaagaguguuccugcuaccccgacaccggcaccgugaugugugugugccgcgauaauuggcacgggucuaacagaccuugggucagcuuuaaucagaaccuugacuaccaaaucggauauauuugcuccggcguuuucggggauaauccccggccuaaagacggaaagggcagcugugaccccgugacaguggauggcgcugacggggucaaaggauuuucuuaccgcuauggcaacgggguguggaucggaagaacgaaguccaaucgguuccgcaaaggcuuugagaugauuugggauccgaacggguggaccgacacagauagcgacuuccugguuaagcaggauguggucgccaugaccgacuggucuggcuacuccggauccuuugugcagcacccugaacucacaggccuggauugcaugagacccuguuucuggguugagcuugugcgggggagaccucgcgaaaauaccacgaucuggacauccggaucuagcaucuccuucugcggcgucaacucugacaccgcgaauuggagcuggcccgauggggccgagcugcccuuuaccauugacaaauga

SEQ ID NO: 215203 - RNA, 1413 nt, Artificial Sequence
  derived and/or modified CDS sequence (opt5) from neuraminidase__InfluenzaA__AFO64838
augaaccccaaucagaagaucauuaccaucggcagcauuuccauggccaucgggauuaucucucugauccuccaaauuggaaacaucauuagcaucugggcuucccacucuauucagacaggcagccagaaucauacggggaucugcaaccagagaauuaucaccuacgagaauagcacaugggugaaccaaaccuaugucaauaucaacaauacaaacguuguggccggaaaagacaagaccucugugacacuggcgggcaauagcucccuuuguccuauucgggggugggcuaucuacaccaaagauaacagcauucgcaucggaucuaagggcgacgucuucgugauuagagaaccguuuaucuccugcagccaccuggagugucggacguucuuucucacccagggcgcccugcuuaaugauaaacauucuaacgggacaguuaaggaccgcucccccuauagagcccugaugagcugcccucucggagaagcucccucuccuuacaauucccgguucgagagcguggccugguccgcuucugccugucacgauggcaugggguggcugaccaucggaauuagcggccccgacaacggggcggucgccgugcugaaguauaacggaaucauuacagaaaccaucaaauccuggaagaaacgcauucucagaacgcaggagagcgagugcguuugugugaauggcucuugcuuuacaaucaugaccgauggcccuuccaacggggcugccagcuaccggaucuucaagauugaaaaaggacgcgucacaaagucuaucgagcuggacgcuccgaauuaucauuacgaagaguguagcugcuaccccgauaccggcaccgugaugugugugugcagagacaacuggcacggguccaaucggccuugggucucuuuuaaccagaaucuugauuaucaaauuggauacaucugcagcggcguuuucggggacaacccccgcccuaaggauggagagggcuccuguaaucccgugacaguggacggcgccgacggggucaaaggauuuagcuauagauacggcaacgggguguggauuggacggacgaagucuaaucgccugagaaaaggcuucgaaaugaucugggauccgaacggguggaccgacacagauuccgacuuuagcaugaagcaggauguuguggcgaugaccgacuggucuggcuauuccggauccuucguccagcacccugagcucacaggccuggauugcaugcggcccuguuuuuggguggaacuuguuagagggcugccucgcgagaauaccacgauuuggacauccggaucuagcaucuccuucugcggcgugaacucugacaccgccaauuggagcuggcccgauggggcugaacuccccuucaccaucgacaaauga

SEQ ID NO: 215204 - RNA, 1413 nt, Artificial Sequence
  derived and/or modified CDS sequence (opt5) from neuraminidase__InfluenzaA__AFO64849
augaaccccaaucagaagaucauuaccaucggcagcauuuccauggccaucgggauuaucucucugauccuccaaauuggaaacaucauuagcaucugggcuucccacucuauucagacaggcagccagaaucauacggggaucugcaaccagagaauuaucaccuacgaaaauuccacaugggugaaccaaaccuaugucaauaucaacaauacaaacguuguggccggaaaagacaagaccucugugacacuggcgggcaauagcucccuuuguccuauucgggggugggcuaucuacaccaaagauaacagcauucgcaucggaucuaagggcgacgucuucgugauuagagagccguuuaucuccugcagccaccuggagugucggacguucuuucucacccagggcgcccugcuuaaugauaaacauucuaacgggacaguuaaggaccgcucccccuauagagcccugaugagcugcccucucggagaagcucccucuccuuacaauucccgguucgagagcguggccugguccgcuucugccugucacgauggcaugggguggcugaccaucggaauuagcggccccgacaacggggcggucgccgugcugaaguauaacggaaucauuacagaaaccaucaaauccuggaagaaacagauucuccgcacgcaggagagcgagugcguuugugugaauggcucuugcuuuacaaucaugaccgauggcccuuccaacggggcugccagcuacagaaucuucaagauugaaaaaggaaagaucacaaagucuauugagcuggacgcuccgaauagccauuaugaagaguguuccugcuaccccgauaccggcaccgucaugugugugugccgggacaacuggcacgggucuaaucgcccuugggugagcuuuaaccaaaaucuugauuaccagaucggauauauuugcuccggcgucuucggggacaaccccagaccuaaagauggagagggcagcuguaaucccguuacaguggacggcgccgacggggugaagggauuuucuuaccgguauggcaacggggucuggaucggacgcacgaaauccaauagacugcggaagggcuucgaaaugauuugggauccgaacggguggaccgacacagauagcgacuuuucugugaaacaggauguuguggcgaugaccgacugguccggcuacagcggauccuucguccagcacccugagcucacaggccuggauugcaugcgccccuguuuuuggguggaacuuguuagagggcggccuagagagaaugccaccaucuggacgucuggaagcuccaucucuuucugcggcgugaacagcgacacagcuaauugguccuggcccgauggggccgaacugcccuucaccauugacaaguga

SEQ ID NO: 215205 - RNA, 1413 nt, Artificial Sequence; identical to SEQ ID NO: 207040
  derived and/or modified CDS sequence (opt5) from neuraminidase__InfluenzaA__AFO64860

SEQ ID NO: 215206 - RNA, 1413 nt, Artificial Sequence
  derived and/or modified CDS sequence (opt5) from neuraminidase__InfluenzaA__AFO64871
augaaccccaaucagaagaucauuaccaucggcagcauuuccaucgccauugggaucaucucucugauucuccaaaucggaaacauuaucagcauuugggcuucccacucuauccagacaggcagccagaaucauacgggggugugcaaccagagaauuaucaccuacgagaauagcacaugggucaaccaaaccuauguuaauaucaacaauacaaacgugguggccggaaaagacaagaccucuaugacacuggcgggcaauagcucccuuuguccuauucgggggugggcuaucuacaccaaagauaacagcauucgcaucggaucuaagggcgacgucuucgugauuagagaaccguuuaucuccugcagccaccuggagugucggacguucuuucucacccagggcgcccugcuuaaugauaaacauucuaacgggacaguuaaggaccgcucccccuauagagcccugaugagcugcccucucggagaagcucccucuccuuacaauucccgguucgagagcguggccugguccgcuucugccugucacgauggccugggguggcugaccaucggaauuagcggccccgacaacggggcggucgccgugcucaaguauaacggaaucauuacagaaaccaucaaauccuggaagaaacgcauucugagaacgcaggagagcgagugcguuuguaugaauggcucuugcuuuacaaucaugaccgauggcccuuccaacggggcugccagcuaccggaucuucaagauugaaaaaggacgcgugacaaagucuaucgagcuugacgcuccgaauuaucauuacgaagaguguagcugcuaccccgauaccggcaccgucaugugugugugcagagacaacuggcacggguccaaucggccuugggugucuuuuaaccagaaucuggauuaucaaauuggauacaucugcagcggcgucuucggggacaacccccgcccuaaggauggagagggcuccuguaaucccguuacaguggacggcgccgacggggugaaaggauuuagcuauagauacggcaacggggucuggauuggacggacgaagucuaaucgccucagaaaaggcuucgaaaugaucugggauccgaacggguggaccgacacagauuccgacuuuagcaugcggcaggauauuguggcgaugaccgacuggucuggcuauuccggauccuucguucagcacccugagcugacaggccuugauugcaugagacccuguuuuuggguggaacugguccgcgggcucccucgggagaauaccacgaucuggacauccggaucuagcaucuccuucugcggcgugaacucugacaccgccaauuggagcuggcccgauggggcugaacugcccuucaccauugacaaguga

SEQ ID NO: 215207 - RNA, 1413 nt, Artificial Sequence
  derived and/or modified CDS sequence (opt5) from neuraminidase__InfluenzaA__AFO64882
augaaccccaaucagaagaucauuaccaucggcagcauuuccaucgccauugggaucaucucucugaugcuccaaauuggaaacaucauuagcaucugggcuucccacucuauucagacaggcagccagaaucauacggggaucugcaaccagagaauuaucaccuacgagaauagcacaugggugaaccacaccuaugucaauaucaacaauacaaacguuguggccggaaaagacaagaccucugugacacuggcgggcaauagcucccuuuguagcauuucugggugggcuaucuacaccaaagauaacuccauucggaucggaagcaagggcgacgucuucgugauucgcgaaccuuuuaucucuugcucccaucuggaguguagaacguucuuucucacccaaggcgcccugcuuaaugauaaacacagcaacgggacaguuaaggaccggucuccguaucgcgcccugauguccugcccccucggagaagcuccuagccccuacaauuccaaguucgagucuguggccuggagcgcuuccgccugucaugauggcaugggguggcugaccaucggaauuagcggcccugacaacggggcggucgccgugcugaaauauaacggaaucauuacagaaaccaucaagucuuggaaaaagcggauucucagaacgcaggaguccgagugcguuugugugaauggcagcugcuuuacaaucaugaccgauggccccucuaacggggcugccagcuacaaaaucuucaagauugaaaagggaaaagucacaaaguccaucgagcugaaugcuccuaacucucacuaugaagaguguagcugcuacccggacaccggcaccgugaugugugugugccgcgauaauuggcacggguccaacagacccugggucagcuuuaaucagaaccuugacuaccagauuggauauaucugcucuggcguuuucggggauaauccucggcccaaagacggagagggcuccuguaacccugugacaguggauggcgccgacggggucaagggauuuagcuacaaauauggcaaugggguguggauuggacgcacgaagucuaacagacugcggaaaggcuucgaaaugaucugggaccccaauggguggaccgauacagacuccgauuuuagcguuaagcaagacguggucgcgauuaccgauugguccggcuacucuggauccuucgugcagcauccggagcucacaggccuggacugcauccgcccuuguuuuuggguugaacuugugagagggcggccccgcgagaacaccacgaucuggacauccggaucuagcauuuccuucugcggcgucaauagcgauaccgccaacuggucuuggccugacggggcugaacugcccuucaccaucgauaaguga

SEQ ID NO: 215208 - RNA, 1413 nt, Artificial Sequence
  derived and/or modified CDS sequence (opt5) from neuraminidase__InfluenzaA__AFO64893
augaaccccaaucagaagaucauuaccaucggcagcauuuccguggccaucgggauuaucucucugaugcuccaaaucggaaacauuaucagcauuugggcuucccacucuauccagacaggcagccagaaucauacggggauuugcaaccagagaaucauuaccuacgagaauagcacaugggucaaccacaccuauguuaauaucaacaauacaaacgugguggccggaaaagacaagaccucugucacacuggcgggcaauagcucccuuuguagcaucucugggugggcuauuuacaccaaagauaacuccauccggauuggaagcaagggcgacguguucguuauccgcgaaccuuuuauuucuugcucccaucuggaguguagaacguucuuucucacccaaggcgcccugcuuaaugauaaacacagcaacgggacagugaaggaccggucuccguaucgcgcccugauguccugcccccucggagaagcuccuagccccuacaauuccaaguucgagucugucgccuggagcgcuuccgccugucaugauggcaugggguggcugaccaucggaaucagcggcccugacaacggggcgguggccguucugaaauauaacggaauuaucacagaaaccauuaagucuuggaaaaagagaauccuccggacgcaggaguccgagugcgugugugucaauggcagcugcuuuacaauuaugaccgauggccccucugacggggcugccagcuacaaaaucuucaagaucgaaaagggaaaagugacaaaguccauugagcugaacgcuccuaauucucacuaugaagaguguagcugcuacccggauaccggcaccgugaugugugucugccgcgacaacuggcacggguccaauagacccuggguuagcuuuaaccagaaucuugauuaccagaucggauauauuugcucuggcguguucggggacaacccucggcccaaagauggagagggcuccuguaauccugugacagucgacggcgccgacggggugaagggauuuagcuacaaauauggcaacgggguuuggaucggacgcacgaagucuaauagauuccggaaaggcuuugaaaugauuugggaucccaacggguggaccgacacagauuccgacuucagcgugaagcaagaugucguggcgaucaccgacugguccggcuacucuggauccuuuguucagcauccggagcugacaggccucgauugcauucgcccuuguuucuggguggaacuggucagagggcggccccgcgagaauaccacgaucuggacauccggaucuagcaucuccuucugcggcgugaacagcgacaccgccaauuggucuuggccugauggggcugaacuucccuuuaccauugacaaguga

SEQ ID NO: 215209 - RNA, 1413 nt, Artificial Sequence
  derived and/or modified CDS sequence (opt5) from neuraminidase__InfluenzaA__AFO64904
augaaccccaaucagaagaucauuaccaucggcagcauuuccguggccaucgggauuaucucucugauccuccaaauuggaaacaucauuagcaugugggcuucccacucuauccagacaggcagccagaauuacacggggauuugcaaccagagaaucauuaccuaugagaauaacacaugggugaaucaaaccuacguuaacaucaauaacacaaaugugguggccggaaaagacaagaucuccaugacccuggcgggcaacucuagccuuuguccuauucgggggugggcuaucuauacaaaagauaauuccauucgcaucggaagcaagggcgacgucuucgugauuagagaaccguuuaucucuugcucccaucuggagugucggaccuucuuucucacgcagggcgcccugcuuaacgauaaacacagcaaugggaccguuaaggaccgcucucccuacagagcccugauguccugcccucucggagaagcucccagcccuuauaacucucgguucgaguccguggccuggagcgcuuccgccugucaugauggccugggguggcugacaaucggaauuucuggccccgacaacggggcggucgccgugcucaaguacaauggaaucauuaccgaaacaaucaaaagcuggaagaaacagauucugcgcacccaggaguccgagugcguuugugugaacggcagcugcuuuacgaucaugacagauggcccuucuaauagagcugccuccuaucggaucuucaagauugaaaaagggcgcgucaccaagagcaucgagcuugacgcuccgaacuaccacuacgaagaguguucuugcuaucccgauacaggaaccgugaugugugugugcagagacaauuggcauggcagcaaccggccuugggucuccuuuaaucaaaaccuggauuaccagauuggguauaucugcucuggaguuuucggcgacaauccccgcccuaaggauggggagggaagcuguaaccccgugaccguggacggcgccgacggcgucaaaggguuuuccuacaaguauggaaauggcguguggauugggagaacaaaaagcaaccggcuccgcaagggauucgaaaugaucugggauccgaauggcuggacggacaccgauucugacuuuuccaugaaacaggauguuguggcgaugacagacuggagcggguacucuggcuccuucguccagcacccugagcugaccggacuugauugcaugagacccuguuuuuggguggaacugguucggggccucccuagagagaacacaaccauuuggacgagcggguccucuaucagcuucugcggagucaauuccgaaacagccaacuggucuuggcccgacggcgcugagcugcccuucaccaucgauaaguga

SEQ ID NO: 215210 - RNA, 1413 nt, Artificial Sequence
  derived and/or modified CDS sequence (opt5) from neuraminidase__InfluenzaA__AFO65019
augaaccccaaucagaagaucauuaccaucggcagcauuuccaucgccauugggaucaucucucugaugcuccaaauuggaaacaucauuagcaucugggcuucccacucuauucagacaggcagccagaaucauacggggaucugcaaccagagaauuaucaccuacgagaauagcacaugggugaaccacaccuaugucaauaucaacaauacaaacguuguggccggaaaagacaagaccucugugacacuggcgggcaauagcucccuuuguagcauuucugggugggcuaucuacaccaaagauaacuccauucggaucggaagcaagggcgacgucuucgugauucgcgaaccuuuuaucucuugcucccaucuggaguguagaacguucuuucucacccaaggcgcccugcuuaaugauaaacacagcaacgggacaguuaaggaccggucuccguaucgcgcccugauguccugcccccucggagaagcuccuagccccuacaauuccaaguucgagucuguggccuggagcgcuuccgccugucaugauggcaugggguggcugaccaucggaauuagcggcccugacaacggggcggucgccgugcugaaauauaacggaaucauuacagaaaccaucaagucuuggaaaaagcggauucucagaacgcaggaguccgagugcguuugugugaauggcagcugcuuuacaaucaugaccgauggccccucuaacggggcugccagcuacaaaaucuucaagauugaaaagggaaaagucacaaaguccaucgagcugaaugcuccuaacucucacuaugaagaguguagcugcuacccggacaccggcaccgugaugugugugugccgcgauaauuggcacggguccaacagacccugggucagcuuuaaucagaaccuugacuaccagauuggauauaucugcucuggcguuuucggggauaauccucggcccaaagacggagagggcuccuguaacccugugacagccgauggcgcggacggggugaagggauuuagcuacaaauauggcaauggggucuggauuggacgcacgaagucuaacagacugcggaaaggcuucgaaaugaucugggaccccaauggguggaccgauacagacuccgauuuuagcgugaagcaagacguuguggccauuaccgauugguccggcuacucuggauccuucguccagcauccggagcucacaggccuggacugcauccgcccuuguuuuuggguggaacuuguuagagggcggccccgcgagaacaccacgaucuggacauccggaucuagcauuuccuucugcggcgugaauagcgauaccgcuaacuggucuuggccugacggggccgaacugcccuucaccaucgauaaguga

SEQ ID NO: 215211 - RNA, 1413 nt, Artificial Sequence; identical to SEQ ID NO: 208525
  derived and/or modified CDS sequence (opt5) from neuraminidase__InfluenzaA__AFO65030

SEQ ID NO: 215212 - RNA, 1413 nt, Artificial Sequence
  derived and/or modified CDS sequence (opt5) from neuraminidase__InfluenzaA__AFO65041
augaaccccaaucagaagaucauuaccaucggcagcauuuccaucgccauugggaucaucucucugaugcuccaaauuggaaacaucauuagcaucugggcuucccacucuauucagacaggcagccagaaucauacgggggugugcaaccagagaaucauuaccuacgagaauagcacaugggucaaccacaccuauguuaauaucaacaauacaaacgugguggccggaaaagacaagaccucugucacacuggcgggcaauagcucccuuuguagcaucucugggugggcuauuuacaccaaagauaacuccauccggauuggaagcaagggcgacguguucguuauccgcgaaccuuuuauuucuugcucccaucuggaguguagaacguucuuucucacccaaggcgcccugcuuaaugauaaacacagcaacgggacagugaaggaccggucuccguaucgcgcccugauguccugcccccucggagaagcuccuagccccuacaauuccaaguucgagucugucgccuggagcgcuuccgccugucaugauggcaugggguggcugaccaucggaaucagcggcccugacaacggggcgguggccguucugaaauauaacggaauuaucacagaaaccauuaagucuuggaaaaagcagauccucagaacgcaggaguccgagugcgugugugucaauggcagcugcuuuacaauuaugaccgauggccccucuaacggggcugccagcuacaaaaucuucaagaucgaaaagggaaaagugacaaaguccauugagcugaaugcuccuaacuuucacuaugaagaguguucuugcuacccggacaccggcaccgugaugugugucugccgggauaauuggcacgggagcaaccgccccuggguuuccuucaaucagaaccuugacuaccaaaucggauauauuugcagcggcguguuuggggauaauccuagacccaaagacggagagggcucuuguaacccugugacagucgauggcgccaauggggugaagggauucuccuacaaauauggcaacgggguuuggaucggacggacgaaguccaaucgccugagaaaaggcuuugaaaugauuugggaccccaacggguggaccgacacagauucugacuucuccgugaagcaggaugucguggcgaucaccgacuggagcggcuacuccggaucuuuuguucagcauccggagcucacaggccuggauugcauucggccuuguuucuggguggaacuuguccgcgggcugcccagagagaauaccacgaucuggacaagcggauccucuaucagcuucugcggcgugaacuccgacaccgccaacuggagcuggccugauggggcugaacuccccuuuaccauugacaaguga

SEQ ID NO: 215213 - RNA, 1413 nt, Artificial Sequence
  derived and/or modified CDS sequence (opt5) from neuraminidase__InfluenzaA__AFO65052
augaaccccaaucagaagaucauuaccaucggcagcauuuccaucgccauugggaucaucucucugaugcuccaaauuggaaacaucauuagcaucugggcuucccacucuauucagacaggcagccagaaucauacgggggugugcaaccagagaaucauuaccuacgagaauagcacaugggucaaccacaccuauguuaauaucaacaauacaaacgugaucgccggaaaagacaagaccucuaugacacuggcgggcaauagcucccuuuguagcauuucugggugggcuaucuacaccaaagauaacuccauucggaucggaagcaagggcgacguguucgucauucgcgaaccuuuuaucucuugcucccaucuggaguguagaacguucuuucucacccaaggcgcccugcuuaaugauaaacacagcaacgggacagugaaggaccggucuccguaucgcgcccugauguccugcccccucggagaagcuccuagccccuacaauuccaaguucgagucuguugccuggagcgcuuccgccuguaacgauggcaugggguggcugaccaucggaauuagcggcccugacaacggggcgguggccguccugaaauauaauggaaucauuacagaaaccaucaagucuuggaaaaagcagauucucagaacgcaggaguccgagugcguguguguuaacggcagcugcuuuacaaucaugaccgauggccccucuaauggggcugccagcuacaaaaucuucaagauugaaaagggaaaagugacaaaguccaucgagcugaacgcuccuaauuuucauuaugaagaguguucuugcuacccggacaccggcaccgucaugugugugugccgggauaacuggcacgggagcaaucgccccuggguguccuucaaccagaaucuugacuaccaaauuggauauaucugcagcggcgucuuuggggauaacccuagacccaaagacggagagggcucuuguaauccuguuacaguggauggcgccaacggggugaagggauucuccuacaaauauggcaauggggucuggauuggacggacgaaguccaaccgccugagaaaaggcuuugaaaugaucugggaccccaauggguggaccgacacagauucugacuucuccgugaagcaggauguuguggcgauuaccgacuggagcggcuacuccggaucuuuuguccagcacccggagcucacaggccuggauugcauccggccuuguuucuggguggaacuuguucgcgggcugcccagagagaacaccacgaucuggacaagcggauccucuauuagcuucugcggcgugaacuccgacaccgccaauuggagcuggccugauggggcugaacuccccuuuaccaucgacaaguga

SEQ ID NO: 215214 - RNA, 1413 nt, Artificial Sequence; identical to SEQ ID NO: 206900
  derived and/or modified CDS sequence (opt5) from neuraminidase__InfluenzaA__AFO66139

SEQ ID NO: 215215 - RNA, 1413 nt, Artificial Sequence
  derived and/or modified CDS sequence (opt5) from neuraminidase__InfluenzaA__AFO66150
augaaccccaaucagaagaucauuaccaucggcagcauuuccguggccaucgggauuaucucucugauccuccaaauuggaaacaucauuagcaucugggcuucccacucuauucagacaggcagccagaauuacacggggaucugcaaccagagaauuaucaccuaugagaaucggacaugggucaaccaaaccuacguuaauaucaacaauacaaacgugguggccggaaaagacaagaccuccaugacacuggcgggcaauucuagccuuuguccuauucgcgggugggcuaucuauaccaaagauaacuccauuagaaucggaagcaagggcgacgucuucgugauucgggaaccguuuaucucuugcucccaucuggagugucgcacguucuuucucacccagggcgcccugcuuaaugauaaacacagcaacgggacaaucaaggacagaucucccuuccgggcccugauguccugcccucucggagaagcucccagcccuuacaauucucgcuuugaguccguugccuggagcgcuuccgccugucaugauggccugggguggcugaccauuggaaucucuggccccgacaacggggcgguggccguccucaaguauaacggaauuaucacagaaaccauuaaaagcuggaagaaacagauccugagaacgcaggaguccgagugcguguguguuaauggcagcugcuucacaaucaugaccgauggcccuucuaaccgggcugccuccuaccgcauuuuuaagaucgaaaaagggagagugacaaagagcauugagcuugacgcuccgaauuaucacuacgaagaguguucuugcuaccccgauaccggaaccgucaugugugugugccgggacaacuggcauggcagcaaucgcccuuggguguccuucaaccaaaaucuggauuaucagaucggguacauuugcucuggagucuuuggcgacaaccccagaccuaaggauggggagggaagcuguaaucccguuacaguggacggcgccgacggcgugaaaggguucuccuaucgguacggaaacggcgucuggaucgggcgcaccaagagcaaucggauuagaaaaggauuugaaaugaucugggauccgaacggcuggacggacacagauucugacuucuccaugaagcaggaugugguugcgaugaccgacuggagcggguauucuggcuccuuugugcagcacccugagcucacaggacuggauugcaugagacccuguuucugggucgaacuugugcgcggccugccucgggagaauaccacgaucuggacaagcggguccucuauuagcuucugcggaguuaacuccgaaaccgccaauuggucuuggcccgacggcgcugagcuccccuuuaccaucgauaaauga

SEQ ID NO: 215216 - RNA, 1413 nt, Artificial Sequence
  derived and/or modified CDS sequence (opt5) from neuraminidase__InfluenzaA__AFO66161
augaaccccaaucagaagaucauuaccaucggcagcauuuccaucgccauugggaucaucucucugaugcuccaaauuggaaacaucauuagcaucugggcuucccacucuauucagacaggcagccagaaucauacgggggugugcaaccagagaaucauuaccuacgagaauagcacaugggucaaccacaccuauguuaauaucaacaauacaaacgugaucgccggaaaagacaagaccucugugacacuggcgggcaauagcucccuuuguagcauuucugggugggcuaucuacaccaaagauaacuccauucggaucggaagcaagggcgacgucuucgugauucgcgaaccuuuuaucucuugcucccaucuggaguguagaacguucuuucucacccaaggcgcccugcuuaaugauaaacacagcaacgggacaguuaaggaccggucuccguaucgcgcccugauguccugcccccucggagaagcuccuagccccuacaauuccaaguucgagucuguggccuggagcgcuuccgccugucaugauggcaugggguggcugaccaucggaauuagcggcccugacaacggggcggucgccgugcugaaauauaacggaaucauuacagaaaccaucaagucuuggaaaaagcagauucucagaacgcaggaguccgagugcguuugugugaauggcagcugcuuuacaaucaugaccgauggccccucuaacggggcugccagcuacaaaaucuucaagauugaaaagggaaaagucacaaaguccaucgagcugaaugcuccuaacuuucacuaugaagaguguucuugcuacccggacaccggcaccgugauuugugugugccgggauaauuggcacgggagcaaccgccccugggucuccuucaaucagaaccuugacuaccaaaucggauauauuugcagcggcguuuuuggggauaauccuagacccaaagacggagagggcucuuguaacccugugacaguggauggcgccaauggggucaagggauucuccuacaaauauggcaacgggguguggaucggacggacgaaguccaaucgccugagaaaaggcuuugaaaugauuugggaccccaacggguggaccgacacagauucugacuucuccguuaagcaggauguggucgcgaucaccgacuggagcggcuacuccggaucuuuugugcagcauccggagcucacaggccuggauugcauccggccuuguuucuggguugaacuugugcgcgggcugcccaaggagaauaccacgauuuggacaagcggauccucuaucagcuucugcggcgucaacuccgacaccgccaacuggagcuggccugauggggcugaacuccccuuuaccauugacaaauga

SEQ ID NO: 215217 - RNA, 1413 nt, Artificial Sequence
  derived and/or modified CDS sequence (opt5) from neuraminidase__InfluenzaA__AFO66172
augaaccccaaucagaagaucauuaccaucggcagcauuuccaucgccauugggaucaucucucugaugcuccaaauuggaaacaucauuagcaucugggcuucccacucuauucagacaggcagccagaaucauacggggaucugcaaccagagaauuaucaccuacgagaauagcacaugggugaaccacaccuaugugaauaucaacaauacaaacguuguggccggaaaagacaagaccucugugacacuggcgggcaauagcucccuuuguagcauuucugggugggcuaucuacaccaaagauaacuccauucggaucggaagcaagggcgacgucuucgugauucgcgaaccuuuuaucucuugcucccaucuggaguguagaacguucuuucucacccaaggcgcccugcuuaaugauaaacacagcaacgggacaguuaaggaccggucuccguaucgcgcccugauguccugcccccucggagaagcuccuagccccuacaauuccaaguucgagucuguggccuggagcgcuuccgccugucaugauggcaugggguggcugaccaucggaauuagcggcccugacaacggggcggucgccgugcugaaauauaacggaaucauuacagaaaccaucaagucuuggaaaaagcggauucucagaacgcaggaguccgagugcguuuguaugaauggcagcugcuuuacaaucaugaccgauggccccucuaacggggcugccagcuacaaaaucuucaagauugaaaagggaaaagugacaaaguccaucgagcugaaugcuccuaacuuucacuaugaagaguguucuugcuacccggacaccggcaccgucaugugugugugccgcgauaauuggcacgggagcaacagacccuggguguccuucaaucagaaccuugacuaccagauuggauauaucugcagcggcgucuuuggggauaauccucggcccaaagacggagagggcucuuguaacccuguuacaguggauggcgccgacggggugaagggauucuccuacaaauauggcaauggggucuggauuggacgcacgaaguccaacagacugcggaaaggcuuugaaaugaucugggaccccaauggguggaccgauacagacucugauuucuccgugaagcaagacguuguggcgauuaccgauuggagcggcuacuccggaucuuuuguccagcauccggagcucacaggccuggacugcauccgcccuuguuucuggguggaacuuguuagagggcugccccgggagaacaccacgaucuggacaagcggauccucuauuagcuucugcggcgucaauuccgauaccgccaacuggagcuggccugacggggcugaacuccccuuuaccaucgauaaguga

SEQ ID NO: 215218 - RNA, 1413 nt, Artificial Sequence; identical to SEQ ID NO: 207002
  derived and/or modified CDS sequence (opt5) from neuraminidase__InfluenzaA__AFO66183

SEQ ID NO: 215219 - RNA, 1413 nt, Artificial Sequence
  derived and/or modified CDS sequence (opt5) from neuraminidase__InfluenzaA__AFO66194
augaaccccaaucagaagaucauuaccaucggcagcauuuccaucgccauugggaucaucucucugaugcuccaaauuggaaacaucauuagcaucugggcuucccacucuauucagacaggcagccagaaucauacgggggugugcaaccagagaaucauuaccuacgagaauagcacaugggucaaccacaccuauguuaauaucaacaauacaaacgugaucgccggaaaagacaagaccucugugacacuggcgggcaauagcucccuuuguagcauuucugggugggcuaucuacaccaaagauaacuccauucggaucggaagcaagggcgacgucuucgugauucgcgaaccuuuuaucucuugcucccaucuggaguguagaacguucuuucucacccaaggcgcccugcuuaaugauaaacacagcaacgggacaguuaaggaccggucuccguaucgcgcccugauguccugcccccucggagaagcuccuagccccuacaauuccaaguucgagucuguggccuggagcgcuuccgccugucaugauggcaugggguggcugaccaucggaauuagcggcccugacaacggggcggucgccgugcugaaauauaacggaaucauuacagaaaccaucaagucuuggaaaaagcagauucucagaacgcaggaguccgagugcguuugugugaauggcagcugcuuuacaaucaugaccgauggccccucuaacggggcugccagcuacaaaaucuucaagauugaaaagggaaaagucacaaaguccaucgagcugaaugcuccuaacuuucacuaugaagaguguucuugcuacccggacaccggcaccgugaugugugugugccgggauaauuggcacgggagcaaccgccccugggucuccuucaaucagaaccuugacuaccaaauuggauauaucugcagcggcguuuuuggggauaauccuagacccaaagacggagagggcucuuguaacccugugacaguggauggcgccaauggggucaagggauucuccuacaaauauggcaacgggguguggauuggacggacgaaguccaaucgccugagaaaaggcuuugaaaugaucugggaccccaacggguggaccgacacagauucugacuucuccguuaagcaggauauuguggcgaucaccgacuggagcggcuacuccggaucuuuuguccagcauccggagcucacaggccuggauugcauccggccuuguuucuggguggaacuuguucgcgggcugcccaaggagaauaccacgauuuggacaagcggauccucuaucagcuucugcggcgugaacuccgacaccgccaacuggagcuggccugauggggcugaacuccccuuuaccauugacaaauga

SEQ ID NO: 215220 - RNA, 1410 nt, Artificial Sequence; identical to SEQ ID NO: 208627
  derived and/or modified CDS sequence (opt5) from neuraminidase__InfluenzaA__AFO66205

SEQ ID NO: 215221 - RNA, 1413 nt, Artificial Sequence; identical to SEQ ID NO: 206487
  derived and/or modified CDS sequence (opt5) from neuraminidase__InfluenzaA__AFO66216

SEQ ID NO: 215222 - RNA, 1413 nt, Artificial Sequence; identical to SEQ ID NO: 206458
  derived and/or modified CDS sequence (opt5) from neuraminidase__InfluenzaA__AFO66227

SEQ ID NO: 215223 - RNA, 1413 nt, Artificial Sequence
  derived and/or modified CDS sequence (opt5) from neuraminidase__InfluenzaA__AFO66238
augaaccccaaucagaagaucauuaccaucggcagcauuuccaucgccauugggaucaucucucugaugcuccaaauuggaaacaucauuagcaucugggcuucccacucuauucagacaggcagccagaaucauacggggaucugcaaccagagaauuaucaccuacgagaauagcacaugggugaaccacaccuaugucaauaucaacaauacaaacguuguggccggaaaagacaagaccucugugacacuggcgggcaauagcucccuuuguagcauuucugggugggcuaucuacaccaaagauaacuccauucggaucggaagcaagggcgacgucuucgugauucgcgaaccuuuuaucucuugcucccaucuggaguguagaacguucuuucucacccaaggcgcccugcuuaaugauaaacacagcaacgggacaguuaaggaccggucuccguaucgcgcccugauguccugcccccucggagaagcuccuagccccuacaauuccaaguucgagucuguggccuggagcgcuuccgccugucaugauggcaugggguggcugaccaucggaauuagcggcccugacaacggggcggucgccgugcugaaauauaacggaaucauuacagaaaccaucaagucuuggaaaaagcagauucucagaacgcaggaguccgagugcguuuguaugaauggcagcugcuuuacaaucaugaccgauggccccucuaacggggcugccagcuacaaaaucuucaagauugaaaagggaaaagugacaaaguccaucgagcugaaugcuccuaacuuucacuaugaagaguguucuugcuacccggacaccggcaccgucaugugugugugccgggauaauuggcacgggagcaaccgccccuggguguccuucaaucagaaccuugacuaccaaauuggauauaucugcagcggcgucuuuggggauaauccuagacccaaagacggagagggcucuuguaacccuguuacaguggauggcgccgacggggugaagggauucuccuacaaauauggcaauggggucuggauuggacggacgaaguccaaccgccugagaaaaggcuuugaaaugaucugggaccccaauggguggaccaacacagauucugacuucuccgugaagcaggauguuguggcgauuaccgacuggagcggcuacuccggaucuuuuguccagcauccggagcucacaggccuggauugcauccggccuuguuucuggguggaacuuguucgcgggcugcccagagagaauaccacgaucuggacaagcggauccucuauuagcuucugcggcgugaacuccgacaccgccaacuggagcuggccugauggggcugaacuccccuuuaccaucgacaaguga

SEQ ID NO: 215224 - RNA, 1413 nt, Artificial Sequence
  derived and/or modified CDS sequence (opt5) from neuraminidase__InfluenzaA__AFO66249
augaaccccaaucagaagaucauuaccaucggcagcauuuccaucgccauugggaucaucucucugaugcuccaaauuggaaacaucauuagcaucugggcuucccacucuauucagacaggcagccagaaucauacggggaucugcaaccagagaauuaucaccuacgagaauagcacaugggugaaccacaccuaugucaauaucaacaauacaaacguuguggccggaaaagacaagaccucugugacacuggcgggcaauagcucccuuuguagcauuucugggugggcuaucuacaccaaagauaacuccauucggaucggaagcaagggcgacgucuucgugauucgcgaaccuuuuaucucuugcucccaucuggaguguagaacguucuuucucacccaaggcgcccugcuuaaugauaaacacagcaacgggacaguuaaggaccggucuccguaucgcgcccugauguccugcccccucggagaagcuccuagccccuacaauuccaaguucgagucuguggccuggagcgcuuccgccugucaugauggcaugggguggcugaccaucggaauuagcggcccugacaacggggcggucgccgugcugaaauauaacggaaucauuacaggcaccaucaagucuuggaaaaagcagauucucagaacgcaggaauccgagugcguuuguaugaauggcagcugcuuuacaaucaugaccgaugggcccucuaacggagcugccagcuacaaaaucuucaagauugagaagggcaaagugacaaaguccaucgaacugaaugcuccuaacuuucacuaugaggaauguucuugcuacccggacaccgggaccgucaugugugugugccgggauaauuggcacggaagcaaccgccccuggguguccuucaaucagaaccuugacuaccaaauuggcuauaucugcagcggggucuuuggagauaauccuagacccaaagacggcgagggcucuuguaacccuguuacaguggauggggccgacggagugaagggcuucuccuacaaauaugggaauggagucuggauuggccggacgaaguccaaccgccugagaaaaggguuugagaugaucugggaccccaauggcuggaccaacacagauucugacuucuccgugaagcaggauguuguggcgauuaccgacuggagcggauacuccggcucuuuuguccagcauccggaacucacagggcuggauugcauccggccuuguuucuggguggagcuuguucgcggacugcccagagaaaauaccacgaucuggacaagcggcuccucuauuagcuucugcggggugaacuccgacaccgccaacuggagcuggccugauggagcugagcuccccuuuaccaucgacaaguga

SEQ ID NO: 215225 - RNA, 1413 nt, Artificial Sequence
  derived and/or modified CDS sequence (opt5) from neuraminidase__InfluenzaA__AFP33330
augaaccccaaucagaagaucauuaccaucggcagcauuuccguggccaucgggauuaucucucugauccuccaaauuggaaacaucauuagcaucugggcuucccacucuauucaggccggcagccagaauuacacagggaucugcaaccagaaaauuaucacguaugagaauagaaccugggucaaccaaacauacguuaauaucaacaauaccaacgugguggcgggaaaggacaaaacauccaugacccuggcuggcaauucuagccuuuguccuauucgggggugggccaucuauacaaaggauaacuccauucgcaucggaagcaaaggcgacgucuucgugauuagagaaccguuuaucucuugcucccaucuggagugucggaccuucuuucucacgcagggcgcccugcuuaaugauaagcacagcaacgggaccaucaaggaccgcucucccuucagagcucugauguccugcccucucggagaagcccccagcccuuacaauucucgguuugaguccguugcuuggagcgccuccgcgugucaugauggccugggguggcugacaauuggaaucucuggccccgacaacggggccguggcuguccucaaauauaacggaauuaucaccgaaacaauuaagagcuggaaaaagcagauccugcgcacccaggaguccgagugcguguguguuaauggcagcugcuucacgaucaugacagauggcccuucuaacagagccgcuuccuaccggauuuuuaaaaucgaaaaggggcgcgugaccaagagcauugagcuugacgccccgaauuaucacuacgaagaguguucuugcuaccccgauacaggaaccgucaugugugugugcagagacaacuggcauggcagcaaucggccuuggguguccuucaaccaaaaucuggauuaucagaucggguacauuugcucuggagucuuuggcgacaacccccgcccuaaagauggggagggaagcuguaaucccguuaccguggacggcgcggacggcgugaagggguucuccuauagauacggaaacggcgucuggaucgggcggacaaaaagcaaucgccucagaaagggauuugaaaugauuugggauccgaacggcuggacggacaccgauucugacuucuccaugaaacaggaugugguugccaugacagacuggagcggguauucuggcuccuuugugcagcacccugagcugaccggacuugauugcaugcggcccuguuucugggucgaacuggugagaggccucccucgcgagaauacaaccaucuggacgagcggguccucuaucagcuucugcggaguuaacuccgaaacagcuaauuggucuuggcccgacggcgccgagcugcccuuuaccauugauaaguga

SEQ ID NO: 215226 - RNA, 1413 nt, Artificial Sequence
  derived and/or modified CDS sequence (opt5) from neuraminidase__InfluenzaA__AFP33331
augaaccccaaucagaagaucauuaccaucggcagcauuuccaucgccauugggaucaucucucugaugcuccaaauuggaaacaucauuagcaucugggcuucccacucuauucagacaggcagccagaaucauacggggaucugcaaccagagaauuaucaccuacgagaauagcacaugggugaaccacaccuaugugaauaucaacaauacaaacguuauugccggaaaagacaagaccucugugacacuggcgggcaauagcucccuuuguagcaucucugggugggcuauuuacaccaaagauaacuccauccggauuggaagcaagggcgacguguucgucauccgcgaaccuuuuaucucuugcucccaucuggaguguagaacguucuuucucacccaaggcgcccugcuuaaugauaaacacagcaacgggacagugaaggaccggucuccguaucgcgcccugauguccugcccccucggagaagcuccuagccccuacaauuccaaguucgagucuguugccuggagcgcuuccgccugucaugauggcaugggguggcugaccauuggaaucagcggcccugacaacggggcgguggccguccugaaauauaacggaauuaucacagaaaccauuaagucuuggaaaaagagaauccuccggacgcaggaguccgagugcguguguguuaauggcagcugcuuuacaaucaugaccgauggccccucuaacggggcugccagcuacaaaauuuucaagaucgaaaagggaaaagugacaaaguccauugagcugaaugcuccuaacuuucacuaugaagaguguucuugcuacccggacaccggcaccgucaugugugugugccgcgauaauuggcacgggagcaacagacccuggguguccuucaaucagaaccuugacuaccagaucggauauauuugcagcggcgucuuuggggauaauccucggcccaaagacggagagggcucuuguaacccuguuacaguggauggcgccgacggggugaagggauucuccuacaaauauggcaauggggucuggaucggacgcacgaaguccaacagacugcggaaaggcuuugaaaugauuugggaccccaauggguggaccgauacagacucugauuucuccgugaagcaagacguuguggcgaucaccgauuggagcggcuacuccggaucuuuuguccagcauccggagcucacaggccuggacugcauccgcccuuguuucuggguggaacuuguuagagggcugccccgggagaacaccacgauuuggacaagcggauccucuaucagcuucugcggcgucaauuccgauaccgccaacuggagcuggccugacggggcugaacuccccuuuaccauugauaaguga

SEQ ID NO: 215227 - RNA, 1410 nt, Artificial Sequence; identical to SEQ ID NO: 213215
  derived and/or modified CDS sequence (opt5) from neuraminidase__InfluenzaA__AFQ32576

SEQ ID NO: 215228 - RNA, 1410 nt, Artificial Sequence
  derived and/or modified CDS sequence (opt5) from neuraminidase__InfluenzaA__AFQ37282
augaaccccaaucagaagaucauuaccaucggcagcgugugcaugacaauugggauggccaaccugauccuccaaauuggaaauaucaucuccauuuggaucucucacagcauucagcugggcaaccagaaucagaucgagacguguaaccaauccgucauuaccuacgaaaauaacacauggguuaaucagaccuaugugaacaucucuaauacaaacuucgcugccgggcagagcguggucuccgugaaacuugcgggaaauucuagccugugcccuguuuccggcugggcuauuuacagcaaggacaacucuaucagaaucggguccaaaggagauguguuugucauucgggagccguucaucagcuguucuccccucgaaugccgcaccuuuuuccugacacagggcgcccuucugaaugacaagcauuccaacggcaccauuaaagauagaagcccuuaucggacgcucaugucuugucccaucggggaggugccuucccccuacaacagccgcuuugaauccguugccuggucugcuagcgccugccacgacggaauuaauuggcugaccaucggcaucuccgggccugauaacggagcuguggccguccugaaguauaauggcauuaucacagacaccauuaagagcuggagaaacaauauccuccggacacaagagucugagugugcgugcgugaacggguccuguuucaccgugaugacggauggaccgagcgacggccaggccucuuacaaaauuuuucgcaucgaaaagggcaaaaucgucaagagcguugagaugaaugcucccaacuaucauuacgaagagugcuccuguuacccugauucuagcgagauuacaugcgugugcagagacaauuggcacggguccaaccggcccugggugagcuucaaucagaaccuggaauaucagaucggauacauuuguucuggcaucuuuggggauaauccucgccccaacgacaaaaccggauccugcggcccggucagcucuaauggggccaacggagugaagggcuucuccuuuaaguauggcaacgggguuuggauuggaagaacaaaaagcaucuccucucggaauggcuucgagaugauuugggauccuaacggguggaccggaaccgacaauaacuuuagcaucaagcaagacaucgugggcauuaaugaaugguccggguacucuggcagcuucguccagcaucccgagcuuacaggacuggauuguauccgcccuugcuucuggguggaacucauuagaggccggcccaaagagaacacgaucuggaccgggggauccagcauuucuuuuuguggcguuaauuccgacacagugggguggagcuggcccgauggagcugagcugccuuucaccaucgacaaguga

SEQ ID NO: 215229 - RNA, 1410 nt, Artificial Sequence
  derived and/or modified CDS sequence (opt5) from neuraminidase__InfluenzaA__AFQ55691
augaaccccaaucagaagaucauuaccaucggcguggucaacacaacgcugagcaccauugcccuccugaucgggguuggaaaucuuguguucaacacagugauucacgagaaaaucggcgaccaucaaaccgucacacacccuaccacaaccacgccggcuauccccaauugcuccgauaccauuaucacauacaacaauaccauuaucaacaauauuacaaccacgaucauuacagaagccgagagaccuuuuaagucuccccugccucucugucccuuccggggguuuuucccuuuucauaaagacaacgcgauccgccugggagaaaauaaggaugugaucguuaccagagagccguaugugagcugcgacaacgauaauuguugguccuucgcucuugcccagggcgcccugcucgggacaaaacacucuaacggaaccauuaaggaccggacccccuaccgcagccugaucagauuuccuauuggcacagcucccguccugggcaauuauaaggaaaucugcauugccugguccucuagcuccuguuucgaugggaaagaguggaugcaugugugcaugacgggaaacgacaacgaugcuagcgcccagaucaucuacgcgggcaagaugaccgacucuauuaaauccuggcggaaggauauccuccgcacacaggagagcgaaugucaaugcauugacgggaccuguguuguggccgucacagauggaccugcugccucuuccgcugaccacagaaucuauuggauucgggagggcaaaaucaucaaguacgaagacgugcccaagaccaaaauucagcaccuggaggagugcagcuguuauguggaugucgacguuuacugcaucugccgcgauaauuggaaggggucuaacagaccguggaugcggauuaauaacgaaacgauccuugagacaggauacguguguuccaaauuucauagcgacaccccucgccccgccgauccuuccaccgugucuugcgacagccccuccaaugucaacggcggccccggggugaagggauucggcuuuaaagcggggaaugauguuuggcugggaagaacagugagcaccucuggccgguccggguucgaaauuaucaaggucacagagggauggauuaacagcccuaaucacgccaaaucuaucacgcagacccucaugagcaacaaugacugguccggcuauucuggcagcuuuaucauuaagacaaaggauuguuuccagccgugcuucuacguggaacugauccgcgggagacccaacaaaaaugacgauguuuccuggaccagcaacucuauugugacauuuuguggacuugacaaugagccuggcuccgggaacuggcccgacggaagcaacaucggcuucaugccuaaguga

SEQ ID NO: 215230 - RNA, 1410 nt, Artificial Sequence
  derived and/or modified CDS sequence (opt5) from neuraminidase__InfluenzaA__AFR68156
augaaccccaaucagaagaucauuaccaucggcagcgugugcaugacaauugggauggccaaccugauccuccaaauuggaaauaucaucuccauuuggaucucucacagcauucagcugagaaaccagucccagaucgagacguguaaucaaucugucauuaccuacgaaaacaauacauggguuaaccagaccuaugugaauaucagcaacacaaauuucgcugccggccaguccguggucucugugaaacuugcggggaacagcucccugugcccuguuagcggaugggcuauuuacucuaaggacaauuccauccggaucggcagcaaaggggauguguuugucauucgcgagccguucaucucuuguucuccccucgaaugcagaaccuuuuuccugacacagggagcccuucugaacgacaagcauagcaauggcaccauuaaagaucggucuccuuaucgcacgcucauguccugucccaucggcgaggugccuagccccuacaacuccagauuugaaucuguugccuggagcgcuuccgccugccacgacgggauuaacuggcugaccaucggaaucagcggcccugauaauggggcuguggccguccugaaguauaacggaauuaucacagacaccauuaagucuuggcggaauaacauccuccgcacacaagaguccgagugugcgugcgugaauggcagcuguuucaccauuaugacggaugggccgucugacggacaggccagcuacaaaaucuuuagaaucgaaaagggcaaaauugugaaguccgucgagaugaacgcucccaauuaucauuacgaagagugcucuuguuacccugauagcuccgagaucacaugcguuugccgggacaacuggcacggcagcaaucgccccugggugucuuucaaccagaaucuggaauaucagauuggguacaucuguuccggaauuuuuggcgauaacccuagacccaaugacaaaaccgggagcugcggaccggugucuuccaacggcgccaauggggucaagggauucagcuuuaaguauggcaacggcguguggaucgggcggacaaaauccauuucuagccgcaagggauucgagaugaucugggauccuaacggcuggaccgggaccgacaauaacuuuuccaucaaacaagacauuguuggaaucaaugaauggucuggcuacagcggguccuucgugcagcaucccgagcuuacaggccuggauuguauuagaccuugcuucugggucgaacucauccggggacgccccaaggagaacacgauuuggaccagcggcuccuccaucagcuuuugugggguuaauucugacacagugggaugguccuggcccgauggcgcugagcugccuuucaccaucgacaaauga

SEQ ID NO: 215231 - RNA, 1410 nt, Artificial Sequence; identical to SEQ ID NO: 215230
  derived and/or modified CDS sequence (opt5) from neuraminidase__InfluenzaA__AFR68166

SEQ ID NO: 215232 - RNA, 1410 nt, Artificial Sequence
  derived and/or modified CDS sequence (opt5) from neuraminidase__InfluenzaA__AFR68176
augaaccccaaucagaagaucauuaccaucggcagcgugucccugacaauuucuacgaucugcuucuuuaugcaaauugccauccucaucaccacagucacccugcacuucaaacaguacgaguuuaacagcccuccgaauaaccagguuaugcuuugugaacccacaauuaucgagagaaauauuaccgaaaucguguaucugacaaacaccacgauugagaaggaaaucugcccuaaacucgcugaguaccggaauugguccaagccccagugugacauuaccggguucgccccuuuuucuaaagauaacagcauccgccuguccgcgggaggcgacaucugggugacaagagagcccuaugucucuugcgauccugacaaguguuaccaauucgcucuugggcagggaaccacacugaauaacgugcauagcaauaacaccguucgggaucgcacgccguauagaacacuccugaugaaugaacugggcgugcccuuucaccucgggaccaagcaggucugcauugccugguccucuagcuccugucaugacggaaaagccuggcugcacgugugcaucacaggcgaugacaagaacgcuaccgccagcuucauuuacaauggccggcuuguugauucuguggcuuccuggagcaaagacauccugcgcacccaggagucugaaugugucugcauuaacgggacaugugccguggugaugacggauggauccgcgagcggcaaggccgacaccaaaauccucuuuaucaaggaggggaagauuguccauacauccacccugucuggaagcgcucaacacguugaggaaugcuccugcuauccuagauaccccggcgugcggugugugugccgcgauaacuggaaagggagcaauagaccuaucgucgacauuaacaucaaggaccacucuauuguguccagcuacguuuguucuggacuugugggcgauacaccccggaaaaaugacagcuccucuagcggccauugccuggauccgaacaaugaggaagggggacacggcgucaaggggugggccuucgacgauggaaacgacguguggaugggccgcaccaucaaugagacguccagacucggguaugaaacauuuaaaguuaucgagggauggagcaacccuaagucuaaacugcagauuaaucgccaggugaucgucgaucggggcaacagauccggcuacagcgggauuuucucuguggagggaaagaauuguaucaaccggugcuuuuaugucgaacugauuagaggccgcaaggaggaaaccgaggugcucuggaccuccaauagcaucguuguguucugugggacauccggaaccuacggcacagggucuuggcccgacggcgcugaucugaaccuuaugccuauuuga

SEQ ID NO: 215233 - RNA, 1410 nt, Artificial Sequence; identical to SEQ ID NO: 208810
  derived and/or modified CDS sequence (opt5) from neuraminidase__InfluenzaA__AFR84677

SEQ ID NO: 215234 - RNA, 1410 nt, Artificial Sequence; identical to SEQ ID NO: 209697
  derived and/or modified CDS sequence (opt5) from neuraminidase__InfluenzaA__AFR84687

SEQ ID NO: 215235 - RNA, 1410 nt, Artificial Sequence; identical to SEQ ID NO: 208800
  derived and/or modified CDS sequence (opt5) from neuraminidase__InfluenzaA__AFR84696

SEQ ID NO: 215236 - RNA, 1410 nt, Artificial Sequence; identical to SEQ ID NO: 208810
  derived and/or modified CDS sequence (opt5) from neuraminidase__InfluenzaA__AFR84706

SEQ ID NO: 215237 - RNA, 1410 nt, Artificial Sequence; identical to SEQ ID NO: 208800
  derived and/or modified CDS sequence (opt5) from neuraminidase__InfluenzaA__AFR84716

SEQ ID NO: 215238 - RNA, 1410 nt, Artificial Sequence; identical to SEQ ID NO: 208800
  derived and/or modified CDS sequence (opt5) from neuraminidase__InfluenzaA__AFR84726

SEQ ID NO: 215239 - RNA, 1410 nt, Artificial Sequence; identical to SEQ ID NO: 208800
  derived and/or modified CDS sequence (opt5) from neuraminidase__InfluenzaA__AFR84736

SEQ ID NO: 215240 - RNA, 1410 nt, Artificial Sequence; identical to SEQ ID NO: 208800
  derived and/or modified CDS sequence (opt5) from neuraminidase__InfluenzaA__AFR84746

SEQ ID NO: 215241 - RNA, 1410 nt, Artificial Sequence; identical to SEQ ID NO: 208800
  derived and/or modified CDS sequence (opt5) from neuraminidase__InfluenzaA__AFR84756

SEQ ID NO: 215242 - RNA, 1410 nt, Artificial Sequence; identical to SEQ ID NO: 208800
  derived and/or modified CDS sequence (opt5) from neuraminidase__InfluenzaA__AFR84766

SEQ ID NO: 215243 - RNA, 1410 nt, Artificial Sequence; identical to SEQ ID NO: 208800
  derived and/or modified CDS sequence (opt5) from neuraminidase__InfluenzaA__AFR84776

SEQ ID NO: 215244 - RNA, 1410 nt, Artificial Sequence; identical to SEQ ID NO: 208800
  derived and/or modified CDS sequence (opt5) from neuraminidase__InfluenzaA__AFR84786

SEQ ID NO: 215245 - RNA, 1410 nt, Artificial Sequence; identical to SEQ ID NO: 208800
  derived and/or modified CDS sequence (opt5) from neuraminidase__InfluenzaA__AFR84796

SEQ ID NO: 215246 - RNA, 1410 nt, Artificial Sequence; identical to SEQ ID NO: 208810
  derived and/or modified CDS sequence (opt5) from neuraminidase__InfluenzaA__AFR84806

SEQ ID NO: 215247 - RNA, 1410 nt, Artificial Sequence; identical to SEQ ID NO: 208800
  derived and/or modified CDS sequence (opt5) from neuraminidase__InfluenzaA__AFR84816

SEQ ID NO: 215248 - RNA, 1410 nt, Artificial Sequence; identical to SEQ ID NO: 208810
  derived and/or modified CDS sequence (opt5) from neuraminidase__InfluenzaA__AFR84826

SEQ ID NO: 215249 - RNA, 1410 nt, Artificial Sequence
  derived and/or modified CDS sequence (opt5) from neuraminidase__InfluenzaA__AFR84836
augaaccccaaucagaagaucauuaccaucggcagcgugugcaugacaauugggauggccaaccugauccuccaaauuggaaauaucaucuccauuuggaucucucacagcauucagcugggcaaccagaaucagaucgagacguguaaccaauccgucauuaccuacgaaaauaacacauggguuaaucagaccuaugugaacaucucuaauacaaacuucgcugccgggcagagcguggucuccgugaaacuugcgggaaauucuagccugugcccuguuggcgggugggcuauuuacuccaaggacaacagcgugagaaucggaucuaaaggcgaugucuuugugauccgggagccguucauuuccuguagcccccucgaaugccgcaccuuuuuccugacacagggcgcccuucugaaugacaagcauucuaacgggaccaucaaagauagauccccuuaucggacgcucaugagcugucccauuggagagguuccuucucccuacaacucccgcuuugaaagcguggccugguccgcuucugccugccacgacggcaucaauuggcugaccauugggaucagcggaccugauaacggcgcugucgccgugcugaaguauaaugggaucauuacagacaccaucaaguccuggagaaacaauauucuccggacacaagagagcgagugugcgugcgugaacggaucuuguuucaccgucaugacggauggcccguccaauggccaggccagcuacaaaaucuuucgcauugaaaaggggaaaaucguuaagucuguggagaugaacgcucccaauuaucauuacgaagagugcagcuguuacccugacuccucugagaucacaugcgugugcagagauaacuggcacggaagcaaucggcccugggucuccuucaaccagaaucuggaauaucagauuggcuacaucuguagcgggauuuuuggagacaacccucgccccaaugauaaaaccggcucuugcgggccgguguccagcaacggagccaacggcguuaagggcuucucuuuuaaguaugggaauggaguguggaucggcagaacaaaauccauuagcucccggaacggguucgagaugaucugggacccuaauggauggaccgaaaccgauaacaauuuuucuauuaagcaagacaucgucggcaucaacgaguggagcggguacuccggcucuuucgugcagcaucccgaacuuacaggacuggacuguauucgcccuugcuucuggguugagcucaucagaggccggcccaaagagaauacgauuuggaccagcggguccagcaucucuuuuuguggagugaacuccgauacagucggcuggagcuggcccgacggggcugaacugccuuucaccauugauaaguga

SEQ ID NO: 215250 - RNA, 1410 nt, Artificial Sequence; identical to SEQ ID NO: 209614
  derived and/or modified CDS sequence (opt5) from neuraminidase__InfluenzaA__AFR84846

SEQ ID NO: 215251 - RNA, 1410 nt, Artificial Sequence; identical to SEQ ID NO: 208810
  derived and/or modified CDS sequence (opt5) from neuraminidase__InfluenzaA__AFR84856

SEQ ID NO: 215252 - RNA, 1410 nt, Artificial Sequence
  derived and/or modified CDS sequence (opt5) from neuraminidase__InfluenzaA__AFR84866
augaaccccaaucagaagaucauuaccaucggcagcgugugcaugacaauugggauggccaaccugauccuccaaauuggaaauaucaucuccauuuggaucucucacagcauucagcugggcaaccagaaucagaucgagacguguaaccaauccgucauuaccuacgaaaauaacacauggguuaaucagaccuaugugaacaucucuaauacaaacuucgcugccgggcagagcguggucuccgugaaacuugcgggaaauucuagccugugcccuguuuccggcugggcuauuuacagcaaggacaacucuaucagaaucggguccaaaggagauguguuugucauucgggagccguucaucagcuguucuccccucgaaugccgcaccuuuuuccugacacagggcgcccuucugaaugacaagcauuccaacggcaccauuaaagauagaagcccuuuucggacgcucaugucuugucccaucggggaggugccuucccccuauaacagccgcuucgaauccguugccuggucugcuagcgccugccacgacggaauuaauuggcugaccaucggcaucuccgggccugauaacggagcuguggccguccugaaguacaauggcauuaucacagacaccauuaagagcuggagaaacaauauccuccggacacaagagucugagugugcgugcgugaacggguccuguuuuaccgugaugacggauggaccgagcgacggccaggccucuuauaaaauuuuccgcaucgaaaagggcaaaaucgucaagagcguugagaugaaugcucccaacuaccauuaugaagagugcuccuguuacccugauucuagcgagauuacaugcgugugcagagacaauuggcacggguccaaccggcccugggugagcuuuaaucagaaccuggaauaccagaucggauauauuuguucuggcaucuucggggauaauccucgccccaacgacaaaaccggauccugcggcccggucagcucuaauggggccaacggagugaagggcuuuuccuucaaguacggcaacgggguuuggauuggaagaacaaaaagcaucuccucucggaauggcuuugagaugauuugggauccuaacggguggaccggaaccgacaauaacuucagcaucaagcaagacaucgugggcauuaaugaaugguccggguauucuggcagcuucguccagcaucccgagcuuacaggacuggauuguauccgcccuugcuuuuggguggaacucauuagaggccggcccaaagagaacacgaucuggaccuccgggagcucuauuuccuucuguggaguuaauagcgacacagugggcuggucuuggcccgauggggcugagcugccuuuuaccaucgacaaguga

SEQ ID NO: 215253 - RNA, 1410 nt, Artificial Sequence; identical to SEQ ID NO: 209518
  derived and/or modified CDS sequence (opt5) from neuraminidase__InfluenzaA__AFR84876

SEQ ID NO: 215254 - RNA, 1410 nt, Artificial Sequence; identical to SEQ ID NO: 209614
  derived and/or modified CDS sequence (opt5) from neuraminidase__InfluenzaA__AFR84895

SEQ ID NO: 215255 - RNA, 1410 nt, Artificial Sequence; identical to SEQ ID NO: 209614
  derived and/or modified CDS sequence (opt5) from neuraminidase__InfluenzaA__AFR84905

SEQ ID NO: 215256 - RNA, 1410 nt, Artificial Sequence; identical to SEQ ID NO: 209614
  derived and/or modified CDS sequence (opt5) from neuraminidase__InfluenzaA__AFR84915

SEQ ID NO: 215257 - RNA, 1410 nt, Artificial Sequence; identical to SEQ ID NO: 209614
  derived and/or modified CDS sequence (opt5) from neuraminidase__InfluenzaA__AFR84925

SEQ ID NO: 215258 - RNA, 1353 nt, Artificial Sequence
  derived and/or modified CDS sequence (opt5) from neuraminidase__InfluenzaA__AFU83119
augaaccccaaucagaagaucauuaccaucggcagcgugucccugacaauugccacggucugcuuccucaugcaaaucgcuauucuggccaccacaguuacccuucacuuuaaacagaacgaguguucuaucccuagcuccaaucagguggugccgugcgaacccaucauugucgagagaaacgugacagaauaccgggacuggucuaagccucagugucaaaucaccggguucgcgcccuuuagcaaagauaauuccauucgccugucugcuggaggcgacaucuggguuacaagagagccuuaugugagcugcucccccgauaaguguuaccaguucgcccucgggcagggaaccacgcuggacaacaaacauagcaauggcaccauucacgaucggaucccucaucgcacacuucugaugaacgaacucggggucccguuucaccugggaaccaaacaggugugcauugccuggucuuccagcucuugucaugacggcagagcuuggcugcacguuugcgugacaggcgaugaccggaaugccaccgcuuccuucaucuaugaugggguccucguggacagcaucggaucuuggucccaaaacauucugcgcacgcaggagagcgagugugugugcaucaauggcacauguaccgucguuaugacagauggguccgccucuggcagagcggacacccggauucuuuuuaucaaggaaggaaagauugugcacgugagcccccuguccgggagcgcccagcauaucgaggaaugcucuugcuacccucgcuaucccgaugucagaugugugugccgggacaacuggaagggauccaaucgcccuaucauugacaucagcauggcugauuacggcauugacucuagcuauguuuguuccggccucgugggggauacccccagaaacgacgauucuagcuccaauagcaacugcaaagacccgaacaaugagcggggaaacccuggcgucaaggggugggccuucgauuacggaaaugacguguggaugggccgcacaaucucuaaagauuccagaagcggguacgagacguuucggguuauuggaggcuggaccaucgcuaacucuaagucccaggugaauagacaagucaucguggacaacaauaacuggagcggcuauuccgggauuuucucugucgaaggaaagagcuguaucaaucgcugcuuuuacguggagcugauucggggcagaccccaggaaacacgcguuugguggaccuccaacucuaucguggccuucugugggacaagcggaaccuauggcacgggguccuggccugauggcgcgaauauuaacuuuaugcccaucuga

SEQ ID NO: 215259 - RNA, 1410 nt, Artificial Sequence
  derived and/or modified CDS sequence (opt5) from neuraminidase__InfluenzaA__AFV53208
augaaccccaaucagaagaucauuaccaucggcagcgugucccugacaauugccacggucugcuuccucauccaaauugcuauccugguuaccacagugacccuucacuuuaaacagcaugagugugacucuccugccagcaaccaggugaugccgugcgaacccaucauuaucgagagaaauauuacagaaaucgucuaccugaacaauaccacaauugagaaggaaaucuguccuaaagugguugaguaucggaacugguccaagccccagugccaaauuaccggguucgcgccuuuuucuaaagauaauagcauccgccucuccgcuggaggcgacaucugggugacgagagagcccuacgucucuugugauccugggaagugcuaucaguucgcccugggacagggcaccacacuugacaacaagcacagcaaugauaccauucaugaccggaucccgcaccgcacacugcucaugaacgaacugggggugcccuuucaucugggaaccagacagguuuguauugccugguccucuagcuccugccacgauggcaaggcuuggcuccacguguguaucacgggcgacgauaaaaaugccacagcuagcuucauuuacgacgggcggcugauggauucuaucggauccuggagccaaaacauccuucgcacccaggagucugaaugcgucuguauuaauggcacaugcaccguggugaugaccgacggguccgccagcggcagagcggauacacggauccuguuuauugaggagggaaaaaucguccauauuuccccucucucugggagcgcccagcacguugaagagugcuccuguuauccccgcuacccuggagugagaugcaucugucgggacaacuggaagggcagcaaucgccccgugaucgacauuaacauggaagauuauucuaucgacuccagcuacgucugcucuggccuggugggggauacgccgagaaacgacgaucggagcuccaauucuaacugucgcaauccuaacaaugagagaggaaaccagggcguuaaagggugggcuuucgacaauggagaugacguguggaugggccggaccauuagcaaggaucuuagauccggguacgaaacauuuaaggucaucggaggcuggagcacccccaacucuaaaucccaaauuaaucgccaggugaucguugacagcgauaaccggucuggcuauuccgggauuuucagcguggagggaaaguccugcaucaauagauguuuuuacgucgagcugauccgcggccggaaacaggaaacaagagugugguggaccucuaacagcauugucguguucugcgggacguccggaacauauggcaccgggucuuggccugacggcgccaauaucaacuuuaugcccauuuga

SEQ ID NO: 215260 - RNA, 1410 nt, Artificial Sequence
  derived and/or modified CDS sequence (opt5) from neuraminidase__InfluenzaA__AFV53219
augaaccccaaucagaagaccaucacaauuggcagcgugucccugacgaucgccaccgucugcuuccucaugcaaauugcuauccuggccacaaccguuacacuucacuuuaaacagcaugagugugacucuccugcgagcaaccaggugaugccgugcgaacccauuaucaucgagagaaauauuaccgaaaucguguaccugaacaauacaaccauugagaaggaaaucuguccugaggucguggaguaucggaacugguccaaaccccagugccaaauuacgggguucgcuccuuuuucuaaggauaauagcauccgccucuccgccggaggcgacauuuggguuaccagagaacccuacgugucuugugauccugggaaaugcuaucaguucgcccugggacagggcacaacccuugacaacaagcacagcaaugggacaauccaugaucggaucccgcaccgcacccugcucaugaacgagcugggaguccccuuucaucugggcacgaaacagguguguguugcuugguccucuagcuccugccacgacggcaaggccuggcuccacgugugugucacaggggaugacagaaaugcuaccgccagcuucauuuacgauggacggcugguggacucuaucggcuccuggagccaaaacauucuucgcacacaggaaucugagugcguguguaucaaugggaccugcaccgucguuaugacagauggauccgcgagcggcagagccgacacgcggauucuguuuaucaaggaggggaaaaucgugcauauuuccccucucucuggaagcgcucagcacaucgaagagugcuccuguuauccccgcuacccugaugugagaugcauuugucgggacaacuggaagggcagcaaucgccccgucaucgacauuaacauggaagauuauucuaucgacuccagcuacgugugcucuggccugguuggggauaccccgagaaacgacgauagcuccucuaauagcaacugucgggacccuaauaacgagcgcggaaaucccggcgugaaagggugggccuucgauaacggagacgaugucuggaugggcagaacaaucaauaaggaaucccggagcggguacgagaccuuuaaggugauuggaggcuggucuacaccuaacuccaaaagccagguuaauagacaagugaucgucgacaacaauaacuggucuggcuauuccgggauuuucagcguggagggaaaguccugcaucaaucgcuguuuuuacgucgaacuuauucggggcagaccccaggagacccgcgugugguggacgucuaacagcaucguuguguucugcgggacauccggaaccuauggcaccgggucuuggcccgauggcgcuaauauuaacuuuaugccuaucuga

SEQ ID NO: 215261 - RNA, 1410 nt, Artificial Sequence
  derived and/or modified CDS sequence (opt5) from neuraminidase__InfluenzaA__AFV53230
augaaccccaaucagaagaucauuaccaucggcagcgugucccugacaauugccacggucugcuuccucaugcaaaucgcuauucugguuaccacagugacccuucacuuuaaacagcaugagugugacucuccugccagcaaccaggugaugccgugcgaacccaucaucauugagagaaauaucacagaaauugucuaccugaacaauaccacaaucgagaaggaaauuuguccuaaagugguugaguaucggaacugguccaagccccagugcaaaaucaccggguucgcgccuuuuucuaaggauaauagcauucgccucuccgcuggaggcgacaucugggugacgagagagcccuacgucucuugugauccugggaagugcuaucaauucgcccugggacagggcaccacacuugacaacaaacacagcaaugauaccauccaugaccggauuccgcaccgcacacugcucaugaacgaacugggggugcccuuucaucugggaaccagacagguuuguaucgccugguccucuagcuccugccacgauggcaaggcuuggcuccacgugugugucacgggcgacgauaaaaaugccacagcuagcuucauuuacgacgggcggcugguggauucuaucggauccuggagccagaacauucuucgcacccaagagucugaaugcguguguaucaauggcacaugcaccgucguuaugaccgacggguccgccagcggcagagcggauacaaagauccuguuuauugaggagggaaaaaucgugcauauuuccccucucucugggagcgcccagcacguggaagagugcuccuguuauccccgguacccugacguccgcugcaucuguagagacaacuggaagggaagcaaucggcccgugguugauauuucuauggaagacuauuccaucgauagcucuuacgugugcagcggccuggucggcgacacgccgcgcaacgaugacagauccucuaacagcaauugucggaacccuaauaacgagcgcgggaaucagggagugaagggcugggcuuucgauaacggggacgauguuuggaugggaagaaccaucuccaaagaccuucggagcggcuacgaaacauuuaaggugauugggggauggucuacccccaauuccaaaagccagaucaacagacaagucauuguggauucugacaaucgcuccggcuauagcggcaucuucuccgucgaggggaagucuugcauuaaccgguguuuuuacguggagcugaucagaggacgcaaacaggaaacacggguuugguggaccagcaauuccauuguggucuucugcggcacgucugggacauauggaaccggcagcuggccugacggggccaacaucaaucucaugcccaucuga

SEQ ID NO: 215262 - RNA, 1410 nt, Artificial Sequence; identical to SEQ ID NO: 208477
  derived and/or modified CDS sequence (opt5) from neuraminidase__InfluenzaA__AFV53241

SEQ ID NO: 215263 - RNA, 1410 nt, Artificial Sequence; identical to SEQ ID NO: 206163
  derived and/or modified CDS sequence (opt5) from neuraminidase__InfluenzaA__AFV53252

SEQ ID NO: 215264 - RNA, 1413 nt, Artificial Sequence
  derived and/or modified CDS sequence (opt5) from neuraminidase__InfluenzaA__AFV53263
augaaccccaaucagaagaucauuaccaucggcagcauuugcauggccaucgggacaauuucccugauccuccaaaucggaaacauuaucucuauuuggaucagccacuccauucagacgggcucucagaaucauaccgggaucuguaaccagagaauuaucacauacgagaauaacaccugggugaaucaaacauaugucaacaucagcaauaccaacguuguggcuggaaaagacacaaccuccaugauucuggccggcaauucuagccuuugcccuauccgggggugggcgauuuacuccaaggauaacagcauccgcauuggaucuaaaggcgacguguucgucaucagagaaccguuuaucuccuguagccaccuggagugccggacguucuuucucacccagggcgcucugcuuaaugauaagcauucuaacgggacagugaaagaccgcucccccuauagagcccugaugagcuguccuauuggagaagcccccucuccuuacaauucccgguucgagagcguugcuugguccgccucugcuugccacgauggcaugggguggcucaccaucggaauuagcggccccgacgauggggccguggcgguccugaaguauaacggaaucauuacagaaaucaucaaguccuggcgcaaacagauucugagaacccaggagagcgagugugugugcguuaacggcucuuguuuuacgaucaugacagacggcccuuccaaucggccggccagcuaccgcauuuucaagaucgaaaaagggaagauuaccaaaucuaucgagcucgaugcucccaacagccauuaugaagagugcuccuguuacccugacacaggaaaggugaugugcgucugcagagauaauuggcacggcucuaaccggcccugggugagcuuuaaucaaaaccuggacuaccagauuggguauaucuguuccggaguguucggcgauaauccucgccccaaggacgggaaaggaagcugcgacccggucaacguugauggcgccgacggcgugaagggguuuucuuacagauauggaaauggcguguggaucgggcggaccaaauccaacagcucucgcaagggauucgagaugauuugggauccuaauggcuggaccaacacagacgggaauuuuuccgucaaacaggaugugguugcuaugacggacuggagcggcuacuccggaucuuucgugcagcaccccgaacuuaccggccuggauuguaucagaccuugcuuuugggucgagcucauucgggggagaccccgcgaagagacaaccaucuggacaagcggauccucuauuagcuucuguggcgugaacuccgacaccguuaauuggagcuggcccgauggggccgaacugccuuucacgaucgacaaguga

SEQ ID NO: 215265 - RNA, 1410 nt, Artificial Sequence
  derived and/or modified CDS sequence (opt5) from neuraminidase__InfluenzaA__AFV53274
augaaccccaaucagaagaucauuaccaucggcagcgugucccugauuaucgccacagucugcuuccucaugcaaauugcuauccugguuacgaccgugacacuucacuuuaaacagcaugagugugacucuccugccagcaaccaggugaugccgugcgaacccaucauuaucgagagaaauauuaccgaaaucgucuaccugaacaauacaaccauugagaaggaaaucuguccuaaagugguugaguaucggaacugguccaagccccagugccaaauuacaggguucgcgccuuuuucuaaagauaauagcauccgccucuccgcuggaggcgacaucugggugaccagagagcccuacgucucuugugauccugggaagugcuaucaguucgcccugggacagggcacgacccuugacaacaagcacagcaaugauacaauucaugaccggaucccgcaccgcacccugcucaugaacgaacugggggugcccuuucaucugggaacaagacagguuuguguggccugguccucuagcuccugccacgauggcaaggcuuggcuccacgucugugugaccggcgacgauaaaaaugccacggcuagcuucauuuacgacgggcggcugguggauucuaucggauccuggagccaaaacauucuucgcacacaggagucugaaugcgucuguaucaauggaaccugcacaguugugaugaccgacggguccgccagcggcagagcggauacccggauccuguuuauugaggagggcaaaaucgugcauauuuccccucucucugggagcgcccagcacgucgaagagugcuccuguuauccccgcuacccugacgugagaugcaucugucgggacaacuggaagggaagcaaucgccccguuauugauaucaacauggaagacuauucuaucgauuccagcuacgugugcucuggccuggucggcgacacaccgagaaacgaugaccggagcuccaauucuaacugucgcaauccuaacaaugagagagggaaccccggagugaaaggcugggcuuucgauaauggggacgauguuuggaugggacggacgauuagcaaggaccuuagauccggcuacgaaaccuuuaaggugaucgggggauggagcacaccuaacucuaaaucccagauuaaucgccaagucaucguggauagcaacaauuggucuggcuauuccggcauuuucagcgucgaggggaaguccugcaucaaccgguguuuuuacguggagcugauuagaggacgccagcaggaaacccggguuugguggacaucuaauagcaucguggucuucugcggcaccuccgggacguauggaacaggcucuuggcccgacggggccaacaucaauuuuaugcccauuuga

SEQ ID NO: 215266 - RNA, 1410 nt, Artificial Sequence
  derived and/or modified CDS sequence (opt5) from neuraminidase__InfluenzaA__AFV53285
augaaccccaaucagaagaucauuaccaucggcagcgugucccugacaauugccacggucugcuuccucaugcaaaucgcuauucuggccaccacaguuacccuucacuuuaaacagcaugagugugacucuccugcgagcaaccaggugaugccgugcgaacccaucaucauugagagaaauaucacagaaauuguguaccugaacaauaccacaaucgagaaggaaauuuguccugaggucguggaguaucggaacugguccaaaccccagugccaaaucaccggguucgcuccuuuuucuaaggauaauagcauucgccucuccgccggaggcgacaucuggguuacgagagaacccuacgugucuugugauccugggaaaugcuaucaguucgcccugggacagggcaccacacuugacaacaagcacagcaaugggaccauccaugaucggauuccgcaccgcacacugcucaugaacgagcugggaguccccuuucaucugggcaccaaacagguguguguugcuugguccucuagcuccugccacgacggcaaggccuggcuccacgugugugucacgggggaugacagaaaugcuacagccagcuucaucuacgauggacggcugguggacucuauuggcuccuggagccaaaacauccuucgcacccaggaaucugagugcguguguauuaaugggacaugcaccgucguuaugaccgauggauccgcgagcggcagagccgacacacggauccuguuuaucaaggaggggaaaauugugcauaucuccccucucucuggaagcgcucagcacauugaagagugcuccuguuauccccgccauccugaugugagaugcaucugucgggacaacuggaagggcagcaaucgccccgucauuaacaucaacauggaagacuacucuaucgauuccagcuaugugugcucuggccugguuggggacacgccgagaaaugaugacagcuccucuaacagcaauugucgggauccuaacaaugagcgcggaaaccccggcgugaaagggugggccuucgacaauggagaugacgucuggaugggcagaaccauuaacaaggauucccggagcggguacgaaacauuuaaggugaucggaggcuggucuaccccuaauuccaaaagccagguuaacagacaagugauugucgacaauaacaauuggucuggcuacuccgggaucuucagcguggagggaaaguccugcauuaaccgcuguuuuuaugucgagcuuauccggggcagaccccaggaaacacgcgugugguggaccucuaauagcauuguuguguucugcgggacguccggaacauacggcaccgggucuuggcccgauggcgcuaacaucaacuuuaugccuaucuga

SEQ ID NO: 215267 - RNA, 1410 nt, Artificial Sequence
  derived and/or modified CDS sequence (opt5) from neuraminidase__InfluenzaA__AFV53296
augaaccccaaucagaagaucauuaucauuggcagcgugucccugaccaucgccacagucugcuuccucaugcaaauugcuauccugguuacgaccgugacacuucacuuuaaacagcaugagugugacucuccugccagcaaccaggugaugccgugcgaacccaucauuaucgagagaaauauuaccgaaaucgucuaccugaacaauacaaccauugagaaggaaaucuguccugaggugguugaguaucggaacugguccaaaccccagugccaaauuacaggguucgcgccuuuuucuaaggauaauagcauccgccucuccgcuggaggcgacaucugggugaccagagaacccuacgucucuugugauccuagcaaaugcuaucaguucgcccuggggcagggaacgacccuugacaacaagcacuccaaugauacaauucaugaccggaucccgcaccgcacccugcucaugaacgagcugggcgugcccuuucaucuggggacaagacagguuuguguggccuggucuagcuccagcugccacgauggaaaggcuuggcuccacgucugugugaccggcgacgauaaaaaugccacggcuucuuucauuuacgacggccggcugguggauuccaucgggagcuggucucaaaacauucuucgcacacaggaauccgagugcgucuguaucaauggaaccugcacaguugugaugaccgacggcagcgccuccgggagagcggauacccggauccuguuuauugaggaaggaaagaucgugcauauuucuccucucagcggcuccgcccagcacgucgaggaaugcagcuguuauccccgcuacccugacgugagaugcaucugucgggacaacuggaaagggucuaaucgccccguuauugauaucaacauggaggacuauuccaucgauagcucuuacgugugcagcggacuggucggcgacacaccgagaaacgaugaccgguccucuaauagcaacugucgcgauccuaauaacgaaagaggcaaucccggggugaagggaugggcuuucgacaacggcgaugacguuuggauggggcggacgauuuccaaagaucuuagaagcggauacgagaccuuuaaggugaucggcggguggucuacaccuaauuccaagagccagauuaaccgccaagucaucguggacucuaauaacugguccggauauagcggcauuuucuccgucgagggcaaaucuugcaucaaucgguguuuuuacguggaacugauuagagggcgccagcaggagacccggguuugguggacaagcaacuccaucguggucuucugcggaaccucuggcacguaugggacaggaagcuggcccgacggcgccaauaucaacuuuaugcccauuuga

SEQ ID NO: 215268 - RNA, 1410 nt, Artificial Sequence
  derived and/or modified CDS sequence (opt5) from neuraminidase__InfluenzaA__AFV53307
augaaccccaaucagaagaucauuaccaucggcagcgugucccugacaauugccacggucugcuuccucaugcaaaucgcuauucuggccaccacaguuacccuucacuuuaaacagcaugagugugacucuccugcgagcaaccaggugaugccgugcgaacccaucaucauugagagaaauaucacagaaauuguguaccugaacaauaccacaaucgagaaggaaauuuguccugaggucguggaguaucggaacugguccaaaccccagugccaaaucaccggguucgcuccuuuuucuaaggauaauagcauucgccucuccgccggaggcgacaucuggguuacgagagaacccuacgugucuugugauccugggaaaugcuaucaguucgcccugggacagggcaccacacuugacaacaagcacagcaaugggaccauccaugaucggauuccgcaccgcacacugcucaugaacgagcugggaguccccuuucaucugggcaccaaacagguguguguugcuugguccucuagcuccugccacgacggcaaggccuggcuccacgugugugucacgggggaugacagaaaugcuacagccagcuucaucuacgauggacggcugguggacucuauuggcuccuggagccaaaacauccuucgcacccaggaaucugagugcguguguauuaaugggacaugcaccgucguuaugaccgauggauccgcgagcggcagagccgacacacggauccuguuuaucaaggaggggaaaauugugcauaucuccccucucucuggaagcgcucagcacguggaagagugcuccuguuauccccgcuacccugaugucagaugcauuugucgggacaacuggaagggcagcaaucgccccgugaucgacauuaacauggaagauuauucuaucgacuccagcuacguuugcucuggccuggugggggauacgccgagaaacgacgauagcuccucuaauagcaacugucgggacccuaauaacgagcgcggaaaucccggcgucaaagggugggccuucgauaacggagacgauguguggaugggcagaaccaucaauaaggacucccggagcggguacgaaacauuuaagguuauuggaggcuggucuaccccuaacuccaaaagccaggugaauagacaagucaucguggauaacaauaacuggucuggcuauuccgggauuuucagcgucgagggaaaguccugcaucaaucgcuguuuuuacguggagcuuauucggggcagaccccaggaaacacgcguuugguggaccucuaacagcaucguggucuucugcgggacguccggaacauauggcaccgggucuuggcccgacggcgcuaauauuaacuuuaugccuaucuga

SEQ ID NO: 215269 - RNA, 1410 nt, Artificial Sequence
  derived and/or modified CDS sequence (opt5) from neuraminidase__InfluenzaA__AFV53317
augaaccccaaucagaagaucauuaccaucggcagcgugucccugacaauugccacggucugcuuccucaugcaaaucgcuauucuggccaccacaguuacccuucacuuuaaacagcaugagugugacucuccugcgagcaaccaggugaugccgugcgaacccaucaucauugagagaaauaucacagaaauuguguaccugaacaauaccacaaucgagaaggaaauuuguccugaggucguggaguaucggaacugguccaaaccccagugccaaaucaccggguucgcuccuuuuucuaaggauaauagcauucgccucuccgccggaggcgacaucuggguuacgagagaacccuacgugucuugugauccugggaaaugcuaucaguucgcccugggacagggcaccacacuugacaacaagcacagcaaugggaccauccaugaucgguccccgcaccgcacacugcucaugaacgagcugggaguccccuuucaucugggcaccaaacaggugugugcugccuggucuagcuccagcugccacgacggcaaggcuuggcuccacguuugugugacgggggaugacagaaaugccacagcgucuuucauuuacgauggacggcuggucgacuccaucggcagcuggucucaaaacauucuucgcacccaggaauccgagugcguguguaucaaugggacaugcaccguggucaugaccgauggaagcgccuccggcagagcugacacacggauucuguuuaucaaggaggggaaaaucguucauauuggaccucucucuggcagcgcccagcacaucgaagagugcuccuguuauccccgcuacccugaugugagaugcauuugucgggacaacuggaagggcagcaaucgccccgugaucgacauuaacauggaagauuauucuaucgacuccagcuacgucugcucugggcuggugggagauacgccgagaaacgacgauagcuccucuaauagcaacugucgggacccuaauaacgagcgcggcaaucccgggguuaaaggaugggcuuucgauaacggcgacgauguguggauggggagaaccaucuccaaggaccuucggagcggauacgaaacauuuaaggucauuggcggcuggucuaccccuaauuccaaaagccaggugaacagacaaguuaucguggauaauaacaauuggucuggguauuccggaauuuucagcgucgagggcaaguccugcaucaaccgcuguuuuuacguggagcugauucgggggagaccccaggaaacacgcgucugguggaccucuaauagcaucgugguuuucugcggaacguccggcacauaugggaccggcucuuggcccgacggagccaacauuaauuuuaugccuaucuga

SEQ ID NO: 215270 - RNA, 1410 nt, Artificial Sequence
  derived and/or modified CDS sequence (opt5) from neuraminidase__InfluenzaA__AFV53328
augaaccccaaucagaagaucauuaccaucggcagcgugucccugacaauugccacggucugcuuccucaugcacaucgcuauucuggccaccacaguuacccuucauuuuaaacaacacgagugugacucuccugcgagcaaccaggcuaugccgugcgaacccaucaucauugagagaaauaucacagaaauuguguaccugaacaauaccacaaucgagaaggaaauuuguccugagguggucgaguaucggaacugguccaaaccccagugccagaucaccggguucgccccuuuuucuaaggauaauagcauucgccucuccgccggaggcgacaucugggugacgagagaacccuacguuucuugugauccugggaaaugcuaucaauucgcucugggacagggcaccacacuugacaacaagcauagcaaugggaccauccacgaucggauuccgcaucgcacacugcucaugaacgagcugggagugcccuuucaccugggcaccaagcaggucuguguggccugguccucuagcuccugccacgacggcaaggcuuggcuccauguuuguaucacgggggaugacagaaaugccacagcgagcuucauuuacgauggacggcugguggacucuaucggcuccuggagccagaacauucuucgcacccaagaaucugagugcgucuguaucaaugggacaugcaccguggugaugaccgauggauccgccagcggcagagcugacacacggauccuguuuauuaaagaggggaaaaucguccacauuuccccucucucuggaagcgcccagcauaucgaagagugcuccuguuauccccgcuacccugauguuagaugcauuugucgggacaacuggaagggcagcaaucgccccgugaucgacaucaacauggaagauuauucuauugacuccagcuacgugugcucuggccuggucggggauacgccgagaaacgacgauagcuccucuaauagcaacugucgggacccuaauaacgagcgcggaaaucccggcgugaaagggugggcuuucgauaacggagacgauguuuggaugggcagaaccaucuccaaggaccuucggagcggguacgaaacauuuaaggugauuggaggcuggucuaccccuaauuccaaaagccaggucaacagacaggugaucguugauaauaacaauuggucuggcuauuccgggauuuucagcguggagggaaaguccugcaucaaccgcuguuuuuacgucgagcugauucggggcagaccccaagaaacacgcgugugguggaccucuaauagcaucgucguguucugcgggacguccggaacauauggcaccgggucuuggcccgacggcgccaacaucaauuuuaugccuauuuga

SEQ ID NO: 215271 - RNA, 1410 nt, Artificial Sequence
  derived and/or modified CDS sequence (opt5) from neuraminidase__InfluenzaA__AFV53339
augaaccccaaucagaagaucauuaccaucggcagcgccucccugacaauugcuacggugugcuuccucaugcaaaucgccauucuggucaccacaguuacccuucacuuuaaacagcaugagugugacucuccugcgagcaaccaggugaugccgugcgaacccaucaucauugagagaaauaucacagaaauuguguaccugaacaauaccacaaucgagaaggaaauuuguccuaaagucguggaguaucggaacugguccaagccccagugcaaaaucaccggguucgcuccuuuuucuaaggauaauagcauucgccucuccgccggaggcgacaucuggguuacgagagagcccuacgugucuugugauccugggaagugcuaucaauucgcccugggacagggcaccacacuugacaacaaacacagcaaugauaccauccaugaccggauuccgcaccgcacacugcucaugaacgaacuggggguccccuuucaucugggaaccagacagguguguaucgcuugguccucuagcuccugccacgauggcaaggccuggcuccacguuugugugacgggcgacgauaaaaaugcuacagccagcuucauuuacgacgggcggcuggucgauucuaucggauccuggagccagaacauucuucgcacccaagagucugaaugcguguguaucaauggcacaugcaccguggucaugaccgacggguccgcgagcggcagagccgauacacggauccuguuuauugaggagggaaagaucguucauauguccccucucucugggagcgcucagcacguggaagagugcuccuguuauccccgcuacccugacgugagaugcauuugucgggacaacuggaaaggaagcaaucgccccgucguggauaucaacauggaagacuauucuauugauuccagcuacguuugcucuggccuggugggcgacacgccgagaaacgaugaccggagcuccaauucuaacugucgcaauccuaacaaugagaaggggaaccagggagucaagggcugggccuucgauaauggggacgauguguggaugggaagaaccaucagcaaagaccuucgguccggcuacgaaacauuuaagguuaucgggggauggagcacccccaacucuaaaucccagauuaauagacaagugaucgucgauagcgacaaccgcucuggcuauuccggcauuuucagcguggaggggaaguccugcaucaaucgguguuuuuacgucgagcugauuagaggacgcaaacaggaaacacgggugugguggaccucuaacagcaucguuguguucugcggcacguccgggacauauggaaccggcucuuggccugacggggcuaauauuaaccucaugcccaucuga

SEQ ID NO: 215272 - RNA, 1410 nt, Artificial Sequence; identical to SEQ ID NO: 208810
  derived and/or modified CDS sequence (opt5) from neuraminidase__InfluenzaA__AFX96367

SEQ ID NO: 215273 - RNA, 1410 nt, Artificial Sequence; identical to SEQ ID NO: 208810
  derived and/or modified CDS sequence (opt5) from neuraminidase__InfluenzaA__AFX96386

SEQ ID NO: 215274 - RNA, 1410 nt, Artificial Sequence; identical to SEQ ID NO: 209164
  derived and/or modified CDS sequence (opt5) from neuraminidase__InfluenzaA__AFX96401

SEQ ID NO: 215275 - RNA, 1410 nt, Artificial Sequence; identical to SEQ ID NO: 209164
  derived and/or modified CDS sequence (opt5) from neuraminidase__InfluenzaA__AFX96411

SEQ ID NO: 215276 - RNA, 1410 nt, Artificial Sequence; identical to SEQ ID NO: 209164
  derived and/or modified CDS sequence (opt5) from neuraminidase__InfluenzaA__AFX96421

SEQ ID NO: 215277 - RNA, 1410 nt, Artificial Sequence; identical to SEQ ID NO: 209164
  derived and/or modified CDS sequence (opt5) from neuraminidase__InfluenzaA__AFX96431

SEQ ID NO: 215278 - RNA, 1410 nt, Artificial Sequence; identical to SEQ ID NO: 209164
  derived and/or modified CDS sequence (opt5) from neuraminidase__InfluenzaA__AFX96441

SEQ ID NO: 215279 - RNA, 1410 nt, Artificial Sequence; identical to SEQ ID NO: 209164
  derived and/or modified CDS sequence (opt5) from neuraminidase__InfluenzaA__AFX96451

SEQ ID NO: 215280 - RNA, 1410 nt, Artificial Sequence; identical to SEQ ID NO: 209164
  derived and/or modified CDS sequence (opt5) from neuraminidase__InfluenzaA__AFX96461

SEQ ID NO: 215281 - RNA, 1410 nt, Artificial Sequence; identical to SEQ ID NO: 208810
  derived and/or modified CDS sequence (opt5) from neuraminidase__InfluenzaA__AFX96471

SEQ ID NO: 215282 - RNA, 1410 nt, Artificial Sequence; identical to SEQ ID NO: 208810
  derived and/or modified CDS sequence (opt5) from neuraminidase__InfluenzaA__AFX96481

SEQ ID NO: 215283 - RNA, 1410 nt, Artificial Sequence; identical to SEQ ID NO: 208810
  derived and/or modified CDS sequence (opt5) from neuraminidase__InfluenzaA__AFX96491

SEQ ID NO: 215284 - RNA, 1410 nt, Artificial Sequence; identical to SEQ ID NO: 208810
  derived and/or modified CDS sequence (opt5) from neuraminidase__InfluenzaA__AFX96501

SEQ ID NO: 215285 - RNA, 1410 nt, Artificial Sequence; identical to SEQ ID NO: 208810
  derived and/or modified CDS sequence (opt5) from neuraminidase__InfluenzaA__AFX96511

SEQ ID NO: 215286 - RNA, 1410 nt, Artificial Sequence
  derived and/or modified CDS sequence (opt5) from neuraminidase__InfluenzaA__AFX96521
augaaccccaaucagaagaucauuaccaucggcagcgugugcaugacaauugggauggccaaccugauccuccaaauuggaaauaucaucuccauuuggaucucucacagcauucagcugggcaaccagaaucagaucgagacguguaaccaauccgucauuaccuacgaaaauaacacauggguuaaucagaccuaugugaacaucucuaauacaaacuucgcugccagacagagcguggucuccgugaaacuugcgggaaauucuagccugugcccuguuuccgggugggcuauuuacagcaaggacaacucuauccggaucggcuccaaaggggauguguuugucauucgcgagccguucaucagcuguucuccccucgaaugcagaaccuuuuuccugacacagggagcccuucugaaugacaagcauuccaacggcaccauuaaagaucggagcccuuaucgcacgcucaugucuugucccaucggcgaggugccuucccccuacaacagcagauuugaauccguugccuggucugcuagcgccugccacgacgggauuaauuggcugaccaucggaaucuccggcccugauaacggggcuguggccguccugaaguauaauggaauuaucacagacaccauuaagagcuggcggaacaauauccuccgcacacaagagucugagugugcgugcgugaacggcuccuguuucaccgugaugacggaugggccgagcgacggacaggccucuuacaaaauuuuuagaaucgaaaagggcaaaaucgucaagagcguugagaugaaugcucccaacuaucauuacgaagagugcuccuguuacccugauucuagcgagauuacaugcgugugccgggacaauuggcacggcuccaaccgccccugggugagcuucaaucagaaccuggaauaucagaucggguacauuuguucuggaaucuuuggcgauaauccuagacccaacgacaaaaccggguccugcggaccggucagcucuaauggcgccaacggggugaagggauucuccuuuaaguauggcaacggcguuuggauugggcggacaaaaagcaucuccucucgcaauggauucgagaugauuugggauccuaacggcuggaccgggaccgacaauaacuuuagcaucaagcaagacaucgugggaauuaaugaaugguccggcuacucugggagcuucguccagcaucccgagcuuacaggccuggauuguaucagaccuugcuucuggguggaacucauucggggacgccccaaagagaacacgaucuggaccuccggcagcucuauuuccuuuugugggguuaauagcgacacagugggauggucuuggcccgauggcgcugagcugccuuucaccaucgacaaguga

SEQ ID NO: 215287 - RNA, 1410 nt, Artificial Sequence; identical to SEQ ID NO: 208810
  derived and/or modified CDS sequence (opt5) from neuraminidase__InfluenzaA__AFX96531

SEQ ID NO: 215288 - RNA, 1410 nt, Artificial Sequence; identical to SEQ ID NO: 208810
  derived and/or modified CDS sequence (opt5) from neuraminidase__InfluenzaA__AFX96541

SEQ ID NO: 215289 - RNA, 1410 nt, Artificial Sequence; identical to SEQ ID NO: 208810
  derived and/or modified CDS sequence (opt5) from neuraminidase__InfluenzaA__AFX96551

SEQ ID NO: 215290 - RNA, 1410 nt, Artificial Sequence; identical to SEQ ID NO: 213334
  derived and/or modified CDS sequence (opt5) from neuraminidase__InfluenzaA__AFX96561

SEQ ID NO: 215291 - RNA, 1410 nt, Artificial Sequence; identical to SEQ ID NO: 208810
  derived and/or modified CDS sequence (opt5) from neuraminidase__InfluenzaA__AFX96571

SEQ ID NO: 215292 - RNA, 1410 nt, Artificial Sequence; identical to SEQ ID NO: 208810
  derived and/or modified CDS sequence (opt5) from neuraminidase__InfluenzaA__AFX96581

SEQ ID NO: 215293 - RNA, 1410 nt, Artificial Sequence; identical to SEQ ID NO: 208810
  derived and/or modified CDS sequence (opt5) from neuraminidase__InfluenzaA__AFX96591

SEQ ID NO: 215294 - RNA, 1410 nt, Artificial Sequence; identical to SEQ ID NO: 208810
  derived and/or modified CDS sequence (opt5) from neuraminidase__InfluenzaA__AFX96601

SEQ ID NO: 215295 - RNA, 1410 nt, Artificial Sequence; identical to SEQ ID NO: 208810
  derived and/or modified CDS sequence (opt5) from neuraminidase__InfluenzaA__AFX96611

SEQ ID NO: 215296 - RNA, 1410 nt, Artificial Sequence; identical to SEQ ID NO: 208810
  derived and/or modified CDS sequence (opt5) from neuraminidase__InfluenzaA__AFX96621

SEQ ID NO: 215297 - RNA, 1410 nt, Artificial Sequence; identical to SEQ ID NO: 208810
  derived and/or modified CDS sequence (opt5) from neuraminidase__InfluenzaA__AFX96631

SEQ ID NO: 215298 - RNA, 1410 nt, Artificial Sequence
  derived and/or modified CDS sequence (opt5) from neuraminidase__InfluenzaA__AFX96641
augaaccccaaucagaagaucauuaccaucggcagcgugugcaugacaauugggauggccaaccugauccuccaaauuggaaauaucaucuccauuuggaucucucacagcauucagcugggcaaccagaaucagaucgagacguguaaccaauccgucauuaccuacgaaaauaacacauggguuaaucagaccuaugugaacaucucuaauacaaacuucgcugccgggcagagcguggucuccgugaaacuugcgggaaauucuagccugugcccuguuuccggcugggcuauuuacagcaaggacaacucuaucagaaucggguccaaaggagauguguuugucauucgggagccguucaucagcuguucuccccucgaaugccgcaccuuuuuccugacacagggcgcccuucugaaugacaagcauuccaacggcaccauuaaagauagaagcccuuaucggacgcucaugucuugucccaucggggaggugccuucccccuacaacagcaaguuugaauccguugccuggucugcuagcgccugccacgacggaauuaauuggcugaccaucggcaucuccgggccugauaacggagcuguggccguccugaaguauaauggcauuaucacagacaccauuaaaagcuggcgcaacaauauccucagaacacaagagucugagugugcgugcgugaacggguccuguuucaccgugaugacggauggaccgagcgacggccaggccucuuacaagauuuuucggaucgaaaaaggcaagaucgucaaaagcguugagaugaaugcucccaacuaucauuacgaagagugcuccuguuacccugauucuagcgagauuacaugcgugugccgcgacaauuggcacggguccaacagacccugggugagcuucaaucagaaccuggaauaucagaucggauacauuuguucuggcaucuuuggggauaauccucggcccaacgacaagaccggauccugcggcccggucagcucuaauggggccaacggagugaagggcuucuccuuuaaauauggcaacgggguuuggauuggacgcacaaagagcaucuccucuagaaauggcuucgagaugauuugggauccuaacggguggaccggaaccgacaauaacuuuagcaucaaacaagacaucgugggcauuaaugaaugguccggguacucuggcagcuucguccagcaucccgagcuuacaggacuggauuguauccggccuugcuucuggguggaacucauucgcggcagacccaaggagaacacgaucuggaccuccgggagcucuauuuccuuuuguggaguuaauagcgacacagugggcuggucuuggcccgauggggcugagcugccuuucaccaucgacaaauga

SEQ ID NO: 215299 - RNA, 1410 nt, Artificial Sequence; identical to SEQ ID NO: 208810
  derived and/or modified CDS sequence (opt5) from neuraminidase__InfluenzaA__AFX96651

SEQ ID NO: 215300 - RNA, 1410 nt, Artificial Sequence; identical to SEQ ID NO: 208810
  derived and/or modified CDS sequence (opt5) from neuraminidase__InfluenzaA__AFX96661

SEQ ID NO: 215301 - RNA, 1410 nt, Artificial Sequence; identical to SEQ ID NO: 208810
  derived and/or modified CDS sequence (opt5) from neuraminidase__InfluenzaA__AFX96671

SEQ ID NO: 215302 - RNA, 1410 nt, Artificial Sequence; identical to SEQ ID NO: 208810
  derived and/or modified CDS sequence (opt5) from neuraminidase__InfluenzaA__AFX96681

SEQ ID NO: 215303 - RNA, 1410 nt, Artificial Sequence; identical to SEQ ID NO: 208810
  derived and/or modified CDS sequence (opt5) from neuraminidase__InfluenzaA__AFX96691

SEQ ID NO: 215304 - RNA, 1410 nt, Artificial Sequence
  derived and/or modified CDS sequence (opt5) from neuraminidase__InfluenzaA__AFX96701
augaaccccaaucagaagaucauuaccaucggcagcgugugcaugacaauugggauggccaaccugauccuccaaauuggaaauaucaucuccauuuggaucucucacagcauucagcugggcaaccagaaucagaucgagacguguaaccaauccauuaucaccuacgaaaauaacacaugggucaaucagaccuauguuaacauuucuaauacaaacuucgcugccgggcagagcgugguguccgucaaacuugcgggaaauucuagccugugcccuguguccggcugggcuaucuacagcaaggacaacucuaucagaauuggguccaaaggagauguuuuugugauccgggagccguucauuagcuguucuccccucgaaugccgcaccuuuuuccugacacagggcgcccuucugaaugacaagcauuccaacggcaccaucaaagauagaagcccuuaucggacgcucaugucuugucccauuggggaggucccuucccccuacaacagccgcuuugaauccguggccuggucugcuagcgccugccacgacggaaucaauuggcugaccaucggcauuuccgggccugauaacggagcuguugccgugcugaaguauaauggcaucauuacagacaccaucaagagcuggagaaacaauauucuccggacacaagagucugagugugcgugcgucaacggguccuguuucaccgugaugacggauggaccgagcgacggccaggccucuuacaaaaucuuucgcaucgaaaagggcaaaauugugaagucugucgagaugaaugcucccaacuaucauuacgaagagugcuccuguuacccugauucuagcgagaucacaugcguuugcagagacaauuggcacggguccaaccggcccugggugagcuucaaucagaaccuggaauaucagauuggauacaucuguucuggcauuuuuggggauaauccucgccccaacgacaaaaccggauccugcggcccggugagcuucaauggggccaacggagucaagggcuuuucuuucaaguauggcaacgggguguggaucggaagaacaaaauccauuagcucccggaauggcuuugagaugaucugggauccuaacggguggaccggaaccgacaauaacuucucuaucaagcaagacauuguuggcaucaaugaauggagcggguacuccggcucuuucgugcagcaucccgagcuuacaggacuggauuguauucgcccuugcuuuugggucgaacucaucagaggccggcccaaagagaacacgauuuggaccagcggguccaucaucagcuucuguggagugaauagcgacacaguuggcugguccuggcccgauggggcugagcugccuuuuaccauugacaaguga

SEQ ID NO: 215305 - RNA, 1410 nt, Artificial Sequence; identical to SEQ ID NO: 208810
  derived and/or modified CDS sequence (opt5) from neuraminidase__InfluenzaA__AFX96711

SEQ ID NO: 215306 - RNA, 1410 nt, Artificial Sequence
  derived and/or modified CDS sequence (opt5) from neuraminidase__InfluenzaA__AFX96721
augaaccccaaucagaagaucauuaccaucggcagcgugugcaugacaauugggauggccaaccugauccuccaaauuggaaauaucaucuccauuuggaucucucacagcauucagcugggcaaccagaaucagaucgagacguguaaccaauccgucauuaccuacgaaaauaacacauggguuaaucagaccuaugugaacaucucuaauacaaacuucgcugccgggcagagcguggucuccgugaaacuugcgggaaauucuagccugugcccuguuuccggcugggcuauuuacagcaaggacaacucuaucagaaucggguccaaaggagauguguuugucauucgggagccguucaucagcuguucuccccucgaaugccgcaccuuuuuccugacacagggcgcccuucugaaugacaagcauuccaacggcaccauuaaagauagaagcccuuaucggacgcucaugucuugucccaucggggaggugccuucccccuacaacagccgcuuugaauccguugccuggucugcuagcgccugccacgacggaauuaauuggcugaccaucggcaucuccgggccugauaacggagcuguggccguccugaaguauaauggcauuaucacagacaccauuaagagcuggagaaacaauauccuccggacacaagagucugagugugcgugcgugaacggguccuguuucaccgugaugacggauggaccgagcgacggccaggccucuuacaaaauuuuucgcaucgaaaagggcaaaaucgucaagagcguugagaugaaugcucccaacuaucauuacgaagagugcuccuguuacccugauucuagcgagauuacaugcgugugcagagacaauuggcacggguccaaccggcccugggugagcuucaaucagaaccuggaauaucagaucggauacauuuguucuggcaucuuuggggauaauccucgccccaacgacaaaaccggauccugcggcccggucagcucuaauggggccaacggagugaagggcuucuccuuuaaguauggcaacgggguuuggauuggaagaacaaaaagcaucuccucucggaauggcuucgagaugauuugggauccuaacggguggaccggaaccgacaauaacuuuagcaucaagcaagacaucgugggcauuaaugaaugguccggguacucuggcagcuucguccagcaucccgagcuuacaggacuggauuguauccgcccuugcuucuggguggaacucauuagaggccggcccaaagagaacacgguuuggaccuccgggagcucuaucuccuuuuguggagugaauagcgacacagucggcuggucuuggcccgauggggcugagcugccuuucaccauugacaaguga

SEQ ID NO: 215307 - RNA, 1410 nt, Artificial Sequence; identical to SEQ ID NO: 215306
  derived and/or modified CDS sequence (opt5) from neuraminidase__InfluenzaA__AFX96731

SEQ ID NO: 215308 - RNA, 1410 nt, Artificial Sequence; identical to SEQ ID NO: 208810
  derived and/or modified CDS sequence (opt5) from neuraminidase__InfluenzaA__AFX96741

SEQ ID NO: 215309 - RNA, 1410 nt, Artificial Sequence; identical to SEQ ID NO: 208810
  derived and/or modified CDS sequence (opt5) from neuraminidase__InfluenzaA__AFX96751

SEQ ID NO: 215310 - RNA, 1410 nt, Artificial Sequence; identical to SEQ ID NO: 209828
  derived and/or modified CDS sequence (opt5) from neuraminidase__InfluenzaA__AFX96761

SEQ ID NO: 215311 - RNA, 1410 nt, Artificial Sequence; identical to SEQ ID NO: 208810
  derived and/or modified CDS sequence (opt5) from neuraminidase__InfluenzaA__AFX96771

SEQ ID NO: 215312 - RNA, 1410 nt, Artificial Sequence
  derived and/or modified CDS sequence (opt5) from neuraminidase__InfluenzaA__AFX96791
augaaccccaaucagaagaucauuaccaucggcagcgugugcaugacaauugggauggccaaccugauccuccaagucggaaauauuaucuccaucuggauuucucacagcauccagcugggcaaccagaaucagauugagacguguaaccaauccguuaucaccuacgaaaauaacacaugggugaaucagaccuaugugaacauuucuaauacaaacuucgcugccgggcagagcgucguguccguuaaacuugcgggaaauucuagccugugcccuguguccggcugggcuaucuacagcaaggacaacucuauuagaaucggguccaaaggagaugucuuugugauccgggagccguucauuagcuguucuccccucgaaugccgcaccuuuuuccugacacagggcgcccuucugaaugacaagcauuccaacggcaccaucaaagauagaagcccuuaucggacgcucaugucuugucccauuggggagguuccuucccccuacaacagccgcuuugaauccguggccuggucugcuagcgccugccacgacggaaucaauuggcugaccauuggcaucuccgggccugauaacggagcugucgccgugcugaaguauaauggcaucauuacagacaccaucaagagcuggagaaacaauauucuccggacacaagagucugagugugcgugcaucaacggguccuguuucaccgugaugacggauggaccgagcgacggccaggccucuuacaaaauuuuucgcaucgaaaagggcaaaaucgucaagagcguugagaugaaugcucccaacuaucauuacgaagagugcuccuguuacccugauucuagcgagauuacaugcgugugcagagacaauuggcacggguccaaccggcccugggugagcuucaaucagaaccuggaauaucagaucggauacauuuguucuggcaucuuuggggauaauccucgccccaacgacaaaaccggauccugcggcccggucagcucuaauggggccaacggagugaagggcuucuccuuuaaguauggcaacgggguuuggauuggaagaacaaaaagcaucuccucucggaauggcuucgagaugauuugggauccuaacggguggaccggaaccgacaauaacuuuagcaucaagcaagacaucgugggcauuaaugaaugguccggguacucuggcagcuucguccagcaucccgagcuuacaggacuggauuguauccgcccuugcuucuggguggaacucauuagaggccggcccaaagagaacacgaucuggaccuccgggagcucuauuuccuuuuguggaguuaauagcgacacagugggcuggucuuggcccgauggggcugagcugccuuucaccaucgacaaguga

SEQ ID NO: 215313 - RNA, 1410 nt, Artificial Sequence; identical to SEQ ID NO: 215312
  derived and/or modified CDS sequence (opt5) from neuraminidase__InfluenzaA__AFX96801

SEQ ID NO: 215314 - RNA, 1410 nt, Artificial Sequence
  derived and/or modified CDS sequence (opt5) from neuraminidase__InfluenzaA__AFX96811
augaaccccaaucagaagaucauuaccaucggcagcgugugcaugacaauugggauggccaaccugauccuccaaauuggaaauaucaucuccauuuggaucucucacagcauucagcugggcaaccagaaucagaucgagacguguaaccaauccgucauuaccuacgaaaauaacacauggguuaaucagaccuaugugaacaucucuaauacaaacuucgcugccgggcagagcguggucuccgugagacuugcgggaaauucuagccugugcccuguuuccggcugggcuauuuacagcaaagacaacucuauccggaucggguccaagggagauguguuugucauucgcgagccguucaucagcuguucuccccucgaaugcagaaccuuuuuccugacacagggcgcccuucugaaugacaaacauuccaacggcaccauuaaggaucggagcccuuaucgcacgcucaugucuugucccaucggggaggugccuucccccuacaacagcagauuugaauccguugccuggucugcuagcgccugccacgacggaauuaauuggcugaccaucggcaucuccgggccugauaacggagcuguggccguccugaaauauaauggcauuaucacagacaccauuaagagcuggcggaacaauauccuccgcacacaagagucugagugugcgugcgugaacggguccuguuucaccgugaugacggauggaccgagcgacggccaggccucuuacaagauuuuuagaaucgaaaaaggcaagaucgucaaaagcguugagaugaaugcucccaacuaucauuacgaagagugcuccuguuacccugauucuagcgagauuacaugcgugugccgggacaauuggcacggguccaaccgccccugggugagcuucaaucagaaccuggaauaucagaucggauacauuuguucuggcaucuuuggggauaauccuagacccaacgacaagaccggauccugcggcccggucagcucuaauggggccaacggagugaaaggcuucuccuuuaaguauggcaacgggguuuggauuggacggacaaagagcaucuccucucgcaauggcuucgagaugauuugggauccuaacggguggaccggaaccgacaauaacuuuagcaucaaacaagacaucgugggcauuaaugaaugguccggguacucuggcagcuucguccagcaucccgagcuuacaggacuggauuguaucagaccuugcuucuggguggaacucauucggggccgccccaaggagaacacgaucuggaccuccgggagcucuauuuccuuuuguggaguuaauagcgacacagugggcuggucuuggcccgauggggcugagcugccuuucaccaucgacaaauga

SEQ ID NO: 215315 - RNA, 1410 nt, Artificial Sequence; identical to SEQ ID NO: 208810
  derived and/or modified CDS sequence (opt5) from neuraminidase__InfluenzaA__AFX96821

SEQ ID NO: 215316 - RNA, 1410 nt, Artificial Sequence; identical to SEQ ID NO: 215312
  derived and/or modified CDS sequence (opt5) from neuraminidase__InfluenzaA__AFX96831

SEQ ID NO: 215317 - RNA, 1410 nt, Artificial Sequence
  derived and/or modified CDS sequence (opt5) from neuraminidase__InfluenzaA__AFX96841
augaaccccaaucagaagaucauuaccaucggcagcgugugcaugacaauugggauggccaaccugauccuccaaauuggaaauaucaucuccauuuggaucucucacagcauucagcugggcaaccagaaucagaucgagacguguaaccaauccgucauuaccuacgaaaauaacacauggguuaaucagaccuaugugaacaucucuaauacaaacuucgcugccgggcagagcguggucuccgugagacuugcgggaaauucuagccugugcccuguuuccggcugggcuauuuacagcaaagacaacucuauccggaucggguccaagggagauguguuugucauucgcgagccguucaucagcuguucuccccucgaaugcagaaccuuuuuccugacacagggcgcccuucugaaugacaaacauuccaacggcaccauuaaggaucggagcccuuaucgcacgcucaugucuugucccaucggggaggugccuucccccuacaacagcagauuugaauccguugccuggucugcuagcgccugccacgacggaauuaauuggcugaccaucggcaucuccgggccugauaacggagcuguggccguccugaaauauaauggcauuaucacagacaccauuaagagcuggcggaacaauauccuccgcacacaagagucugagugugcgugcgugaacggguccuguuucaccgugaugacggauggaccgagcgacggccaggccucuuacaagauuuuuagaaucgaaaaaggcaagaucgucaaaagcguugagaugaaugcucccaacuauuacuacgaagagugcuccuguuauccugauucuagcgagauuacaugcgugugccgggacaauuggcauggguccaaccgccccugggugagcuucaaucagaaccuggaauaccagaucggauauauuuguucuggcaucuuuggggauaauccuagacccaacgacaagaccggauccugcggcccggucagcucuaauggggccaacggagugaaaggcuucuccuuuaaguacggcaacgggguuuggauuggacggacaaagagcaucuccucucgcaauggcuucgagaugauuugggauccuaacggguggaccggaaccgacaauaacuuuagcaucaaacaagacaucgugggcauuaaugaaugguccggguauucuggcagcuucguccagcaccccgagcuuacaggacuggauuguaucagaccuugcuucuggguggaacucauucggggccgccccaaggagaacacgaucuggaccuccgggagcucuauuuccuuuuguggaguuaauagcgacacagugggcuggucuuggcccgauggggcugagcugccuuucaccaucgacaaauga

SEQ ID NO: 215318 - RNA, 1410 nt, Artificial Sequence; identical to SEQ ID NO: 208810
  derived and/or modified CDS sequence (opt5) from neuraminidase__InfluenzaA__AFX96859

SEQ ID NO: 215319 - RNA, 1410 nt, Artificial Sequence; identical to SEQ ID NO: 208810
  derived and/or modified CDS sequence (opt5) from neuraminidase__InfluenzaA__AFX96907

SEQ ID NO: 215320 - RNA, 1410 nt, Artificial Sequence; identical to SEQ ID NO: 208810
  derived and/or modified CDS sequence (opt5) from neuraminidase__InfluenzaA__AFX96917

SEQ ID NO: 215321 - RNA, 1410 nt, Artificial Sequence; identical to SEQ ID NO: 208810
  derived and/or modified CDS sequence (opt5) from neuraminidase__InfluenzaA__AFX96927

SEQ ID NO: 215322 - RNA, 1410 nt, Artificial Sequence
  derived and/or modified CDS sequence (opt5) from neuraminidase__InfluenzaA__AFX96937
augaaccccaaucagaagaucauuaccaucggcagcgugugcaugacaauugggauggccaaccugauccuccaaauuggaaauaucaucuccauuuggaucucucacagcauucagcugggcaaccagaaucagaucgagacguguaaccaauccgucauuaccuacgaaaauaacacauggguuaaucagaccuaugugaacaucucuagcacaaauuucgcugccgggcaguccguggucucugugaaacuugcgggaaacagcucccugugcccuguuagcggcugggcuauuuacucuaaggacaauuccaucagaaucgggagcaaaggagauguguuugucauucgggagccguucaucucuuguagcccccucgaaugccgcaccuuuuuccugacacagggcgcccuucugaacgacaagcauuccaauggcaccauuaaagauagaucuccuuaucggacgcucauguccugucccaucggggaggugccuagccccuacaacucccgcuuugaaucuguugccuggagcgcuuccgccugccacgacggaauuaacuggcugaccaucggcaucagcgggccugauaauggagcuguggccguccugaaguauaacggcauuaucacagacaccauuaagucuuggagaaauaacauccuccggacacaagaguccgagugugcgugcgugaaugggagcuguuucaccgugaugacggauggaccgucugacggccaggccagcuacaaaauuuuucgcaucgaaaagggcaaaaucgucaaguccguugagaugaacgcucccaauuaucauuacgaagagugcucuuguuacccugauagcuccgagauuacaugcgugugcagagacaacuggcacgggagcaaucggcccugggugucuuucaaccagaaucuggaauaucagaucggauacauuuguuccggcaucuuuggggauaacccucgccccaaugacaaaaccggaagcugcggcccggucucuuccaacggggccaauggagugaagggcuucagcuuuaaguauggcaacgggguuuggauuggaagaacaaaauccaucucuagccggaacggcuucgagaugauuugggauccuaauggguggaccggaaccgacaacaauuuuuccaucaagcaagacaucgugggcauuaacgaauggucuggguacagcggcuccuucguccagcaucccgagcuuacaggacuggauuguauccgcccuugcuucuggguggaacucauuagaggccggcccaaagagaauacgaucuggaccagcgggucuuccauuagcuuuuguggaguuaacucugacacagugggcugguccuggcccgauggggcugagcugccuuucaccaucgacaaguga

SEQ ID NO: 215323 - RNA, 1410 nt, Artificial Sequence; identical to SEQ ID NO: 208800
  derived and/or modified CDS sequence (opt5) from neuraminidase__InfluenzaA__AFY23991

SEQ ID NO: 215324 - RNA, 1410 nt, Artificial Sequence; identical to SEQ ID NO: 208810
  derived and/or modified CDS sequence (opt5) from neuraminidase__InfluenzaA__AFY24001

SEQ ID NO: 215325 - RNA, 1410 nt, Artificial Sequence; identical to SEQ ID NO: 208810
  derived and/or modified CDS sequence (opt5) from neuraminidase__InfluenzaA__AFY24022

SEQ ID NO: 215326 - RNA, 1410 nt, Artificial Sequence; identical to SEQ ID NO: 208810
  derived and/or modified CDS sequence (opt5) from neuraminidase__InfluenzaA__AFY24043

SEQ ID NO: 215327 - RNA, 1410 nt, Artificial Sequence
  derived and/or modified CDS sequence (opt5) from neuraminidase__InfluenzaA__AFY24153
augaaccccaaucagaagaucauuaccaucggcagcgugucccugacaauuucuacgaucugcuucuuuaugcaaauugccauccucaucaccacagucacccugcacuucaaacaguacgaguuuaacagcccuccgaauaaccagguuaugcuuugugaacccacaauuaucgagagaaauauuaccgaaaucguguaucugacaaacaccacgauugagaaggaaaucugcccuaaacucgcugaguaccggaauugguccaagccccaguguaacauuaccggguucgccccuuuuucuaaagacaauagcauccgccuguccgcgggaggcgauaucugggugacaagagagcccuaugucucuugcgacccugauaaguguuaccaauucgcucuugggcagggaaccacacugaacaaugugcauagcaacgacaccguucacgaucggacgccguaucgcacacuccugaugaaugaacugggcgugcccuuucaucucgggaccaagcaggucugcauugccugguccucuagcuccugucacgacggaaaagccuggcugcaugugugcguuacaggcgaugacaagaacgcuaccgccagcuucaucuacaauggcagacuuguggauucuauugucuccuggagcaaagagauccugcggacccaggaaucugagugugugugcauuaacgggacauguacgguggucaugaccgacggauccgcuagcggcaaggccgauacaaaaauccucuuuaucgaggaagggaagauuguucacaccuccacacugucuggaagcgcgcaacacguggaggaaugcuccugcuauccucgcuaccccggcgugagaugugucugccgggacaacuggaaggggagcaaucgcccuaucguggauauuaacaucaccgacuacucuauuguuuccagcuauguguguucuggacuugucggcgacacgccccggaaaaaugauagcuccucuagcucccauugccuggacccgaacaaugaggaaggcgggcacggagugaagggcugggccuucgaugacgggaacgauguuuggaugggaagaacaaucagcgagaaacuccgcucuggcuacgagaccuuuaaggugaucgaagggugguccaauccuaacagcaaacugcagauuaauagacaggucaucguggaccggggaaaccgcucuggcuauuccggcauuuucagcgucgaggggaaguccuguaucaauagaugcuuuuacguggaacugauucggggaagaaaagaggaaaccgagguucucuggacaucuaacagcaucguggucuucuguggcaccuccgggacauauggaacgggcucuuggcccgauggggcugacauuaaucugaugccuaucuga

SEQ ID NO: 215328 - RNA, 1410 nt, Artificial Sequence
  derived and/or modified CDS sequence (opt5) from neuraminidase__InfluenzaA__AFY24208
augaaccccaaucagaagaucauuaccaucggcagcgugucccugacaauuucuacgaucugcuucuuuaugcaaauugccauccucaucaccacagucacccugcacuucaaacaguacgaguuuaacagcccuccgaauaaccagguuaugcuuugugaacccacaauuaucgagagaaauauuaccgaaaucguguaucugacaaacaccacgauugagaaggaaaucugcccuaaacucgcugaguaccggaauugguccaagccccaguguaacauuaccggguucgccccuuuuucuaaagacaauagcauccgccuguccgcgggaggcgauaucugggugacaagagagcccuaugucucuugcgacccugauaaguguuaccaauucgcucuugggcagggaaccacacugaacaaugugcauagcaacgacaccguucacaaucggacgccguaucgcacacuccugaugaacgaacugggcgugcccuuucaucucgggaccaagcaggucugcauugccugguccucuagcuccugucacgauggaaaagccuggcugcaugugugcguuacaggcgacgaugagaaugcuaccgccagcuucaucuacaacggcagacuuguggacucuauugucuccuggagcaagaaaauccugcggacccaggaaucugagugugugugcauuaacgggacauguacgguggucaugaccgauggauccgcuagcggcaaggccgacacaaaaauccucuuuaucgaggaagggaagauuguucacaccuccacacugucuggaagcgcgcaacacguggaggaaugcuccugcuauccucgcuaccccggcgugagaugugucugccgggauaauuggaaggggagcaaccgcccuaucguggacauuaauaucaaagauuacucuauuguuuccagcuauguguguucuggacuugucggcgacacccccagaaagaacgacagcuccucuagcucccauugccuggauccgaauaacgaggaaggcgggcacggagugaaaggcugggccuucgacgaugggaaugacguuuggaugggacggacgaucagcgagcgccucagaucuggcuacgagacauuuaaggugaucgaagggugguccaacccuaauagcaaacugcagauuaaccggcaggucaucguggaucgcggaaauagaucuggcuauuccggcauuuucagcgucgaggggaaguccuguaucaaccggugcuuuuacguggaacugauuagaggacgcaaacaggagaccgaaguucucuggaccucuaauagcaucguggucuucuguggcacauccgggaccuauggaacaggcucuuggcccgacggggcugauauuaaccugaugccuaucuga

SEQ ID NO: 215329 - RNA, 1410 nt, Artificial Sequence; identical to SEQ ID NO: 208001
  derived and/or modified CDS sequence (opt5) from neuraminidase__InfluenzaA__AFY24219

SEQ ID NO: 215330 - RNA, 1410 nt, Artificial Sequence
  derived and/or modified CDS sequence (opt5) from neuraminidase__InfluenzaA__AGB12978
augaaccccaaucagagaaucauuaccaucggcagcgugugcaugacaauugggauggccaaccugauccuccaaauuggaaauaucaucuccauuuggaucucucacagcauucagcugggcaaccagaaucagaucgagacguguaaccaauccgucauuaccuacgaaaauaacacauggguuaaucagaccuaugugaacaucucuaauacaaacuucgcugcccggcagagcguggucuccgugaaacuugcgggaaauucuagccugugcccuguuuccgggugggcuauuuacagcaaggacaacucuauccgcaucggcuccaagggggauguguuugucauuagagagccguucaucagcuguucuccccucgaaugccggaccuuuuuccugacacagggagcccuucugaaugacaaacauuccaacggcaccauuaaggaucgcagcccuuauagaacgcucaugucuugucccaucggcgaggugccuucccccuacaacagccgguuugaauccguugccuggucugcuagcgccugccacgacgggauuaauuggcugaccaucggaaucuccggcccugauaacggggcuguggccguccugaaauauaauggaauuaucacagacaccauuaagagcuggcgcaacaauauccucagaacacaagagucugagugugcgugcgugaacggcuccuguuucaccauuaugacggaugggccgagcgacggacaggccucuuacaagaucuuucggaucgaaaaaggcaagauugugaaaagcgucgagaugaaugcucccaacuaucauuacgaagagugcuccuguuacccugauucuagcgagaucacaugcguuugccgcgacaauuggcacggcuccaacagacccugggugagcuucaaucagaaccuggaauaucagauuggguacaucuguucuggaauuuuuggcgauaauccucggcccaacgacaagaccggguccugcggaccggugagcucuaauggcgccaacggggucaaaggauucuccuuuaaguauggcaacggcguguggaucgggcgcacaaagagcauuuccucuagaaaaggauucgagaugaucugggauccuaauggcuggaccgggaccgacaacaauuuuagcaucaagcaagacauuguuggaaucaacgaaugguccggcuacucugggagcuucgugcagcaucccgagcuuacaggccuggauuguauucggccuugcuucugggucgaacucauccgcggaagacccaaagagaauacgauuuggaccuccggcagcucuaucuccuuuuguggggugaacagcgacacaguuggauggucuuggcccgauggcgcugagcugccuuucaccaucgacaaguga

SEQ ID NO: 215331 - RNA, 1410 nt, Artificial Sequence; identical to SEQ ID NO: 212329
  derived and/or modified CDS sequence (opt5) from neuraminidase__InfluenzaA__AGB12989

SEQ ID NO: 215332 - RNA, 1410 nt, Artificial Sequence; identical to SEQ ID NO: 212781
  derived and/or modified CDS sequence (opt5) from neuraminidase__InfluenzaA__AGB13009

SEQ ID NO: 215333 - RNA, 1410 nt, Artificial Sequence; identical to SEQ ID NO: 212781
  derived and/or modified CDS sequence (opt5) from neuraminidase__InfluenzaA__AGB13019

SEQ ID NO: 215334 - RNA, 1410 nt, Artificial Sequence; identical to SEQ ID NO: 212781
  derived and/or modified CDS sequence (opt5) from neuraminidase__InfluenzaA__AGB13029

SEQ ID NO: 215335 - RNA, 1410 nt, Artificial Sequence; identical to SEQ ID NO: 213030
  derived and/or modified CDS sequence (opt5) from neuraminidase__InfluenzaA__AGB13039

SEQ ID NO: 215336 - RNA, 1410 nt, Artificial Sequence; identical to SEQ ID NO: 212781
  derived and/or modified CDS sequence (opt5) from neuraminidase__InfluenzaA__AGB13051

SEQ ID NO: 215337 - RNA, 1410 nt, Artificial Sequence
  derived and/or modified CDS sequence (opt5) from neuraminidase__InfluenzaA__AGB13069
augaaccccaaucagaagaucauuaccaucggcagcauuugcaugacaaucgggauggccaaccugauucuccaaaucggaaauaucauuuccaucuggauuucucacagcauccagcugggcaaccagaaucagauugagacguguaaccaauccgugaucaccuacgaaaauaacacaugggucaaucagaccuauguuaacauuucuaauacaaacuucgcugccgggcagagcgugguguccgucaaacuugcgggaaauucuagccugugcccuguguccggcugggcuaucuacagcaaggacaacucuaucagaauuggguccaaaggagauguuuuugugauccgggagccguucauuagcuguucuccccucgaaugccgcaccuuuuuccugacacagggcgcccuucugaaugacaagcauuccaacggcaccaucaaagauagaagcccuuaucggacgcucaugucuugucccauuggggaggucccuucccccuacaacagccgcuuugaauccguggccuggucugcuagcgccugccacgacggaaucaauuggcugaccaucggcauuuccgggccugauaacggagcuguugccgugcugaaguauaauggcaucauuacagacaccaucaagagcuggagaaacaauauucuccggacacaagagucugagugugcgugcgucaacggguccuguuucaccgugaugacggauggaccgagcgacggccaggccucuuacaaaaucuuucgcaucgaaaagggcaaaauugucaagagcguggagaugaaugcucccaacuaucauuacgaagagugcuccuguuacccugauucuagcgagaucacaugcguuugcagagacaauuggcacggguccaaccggcccuggauuagcuucaaucagaaccuggaauaucagaucggauacauuuguucuggcaucuuuggggauaauccucgccccaacgacaaaaccggauccugcggcccggugagcucuaauggggccaacggagugaagggcuucuccuuuaaguauggcaacggggucuggauuggaagaacaaaaagcaucuccucucggaauggcuucgagaugaucugggauccuaacggguggaccggaaccgacaauaacuuuagcauuaagcaagacaucgugggcauuaaugaaugguccggguacucuggcagcuucguucagcaucccgagcuuacaggacuggauuguauccgcccuugcuucuggguggaacucauuagaggccggcccaaagagaacacgaucuggaccuccgggagcucuaucuccuuuuguggagucaauagcgacacagugggcuggucuuggcccgauggggcugagcugccuuucaccauugacaaguga

SEQ ID NO: 215338 - RNA, 1410 nt, Artificial Sequence
  derived and/or modified CDS sequence (opt5) from neuraminidase__InfluenzaA__AGB13074
augaaccccaaucagaagaucauuaccaucggcagcgugugcaugacaauugggauggccaaccugauccuccaaauuggaaauaucaucuccauuuggaucucucacagcauucagcugggcaaccagaaucagaucgagacguguaaccaauccgucauuaccuacgaaaauaacacauggguuaaucagaccuaugugaacaucucuaauacaaacuucgcugccgggcagagcguggcguccgucaaacuugcuggaaauucuagccugugcccuguguccggcugggccauuuacagcaaggacaacucuguuagaaucggguccaaaggagauguguuugucauccgggagccguucauuagcuguucuccccucgaaugccgcaccuuuuuccugacacagggcgcccuucugaaugacaagcauuccaacggcaccaucaaagauagaagcccuuaucggacgcucaugucuugucccauuggggaggugccuucccccuacaacagccgcuuugaauccguugcuuggucugccagcgcuugccacgacggaaucaauuggcugaccauuggcaucuccgggccugauaacggagccguggcgguccugaaguauaauggcaucauuacagacaccaucaagagcuggagaaacaauauucuccggacacaagagucugagugugccugcgugaacggguccuguuucaccgugaugacggauggaccgagcgacggccaggcuucuuacaaaaucuuucgcauugaaaagggcaaaaucgucaagagcguugagaugaaugcccccaacuaucauuacgaagagugcuccuguuacccugauucuagcgagaucacaugcgugugcagagacaauuggcacggguccaaccggcccugggugagcuucaaucagaaccuggaauaucagauuggauacaucuguucuggcauuuuuggggauaauccucgccccaacgacaaaaccggauccugcggcccggucagcucuaauggggcuaacggagugaagggcuucuccuuuaaguauggcaacgggguuuggaucggaagaacaaaaagcauuuccucucggaauggcuucgagaugaucugggauccuaacggguggaccggaaccgacaauaacuuuagcauuaagcaagacaucgugggcaucaaugaaugguccggguacucuggcagcuucguccagcaucccgagcuuacaggacuggauuguauucgcccuugcuucuggguggaacucaucagaggccggcccaaagagaacacgauuuggaccuccgggagcucuaucuccuuuuguggaguuaauagcgacacagugggcuggucuuggcccgauggggccgagcugccuuucaccauugacaaguga

SEQ ID NO: 215339 - RNA, 1410 nt, Artificial Sequence
  derived and/or modified CDS sequence (opt5) from neuraminidase__InfluenzaA__AGB13115
augaaccccaaucagaagaucauuaccaucggcagcgugugcaugacaauugggauggccaaccugauccuccaaauuggaaauaucaucuccauuuggaucucucacagcauucagcugggcaaccagaaucagaucgagacguguaaccaauccgucauuaccuacgaaaauaacacauggguuaaucagaccuaugugaacaucucuaauacaaacuucgcugccgggcagagcguggucuccgugaaacuugcgggaaauucuagccugugcccuguuuccggcugggcuauuuacagcaaggacaacucuaucagaaucggguccaaaggagauguguuuguccuccgggagccguucauuagcuguucuccccuggaaugccgcaccuuuuuccuuacacagggcgcccugcucaaugacaagcauuccaacggcaccaucaaagauagaagcccuuaucggacgcugaugucuugucccauuggggaggugccuucccccuacaacagccgcuuugaauccguugccuggucugcuagcgccugccacgacggaaucaauuggcugaccauuggcaucuccgggccugauaacggagcuguggccguccucaaguauaauggcaucauuacagacaccaucaagagcuggagaaacaauauucugcggacacaagagucugagugugcgugcgugaacggguccuguuucaccaucaugacggauggaccgagcgacggccaggccucuuacaaaauuuuucgcaucgaaaagggcaaaaucgucaagagcguggagaugaaugcucccaacuaucauuacgaagagugcuccuguuacccugauucuagcgagauuacaugcguuugcagagacaauuggcggggguccaaccgccccugggugagcuucaaucagaaccuugaauaucagaucggauacauuuguucuggcaucuuuggggauaauccuagacccaacgacaaaaccggauccugcggcccggugagcucuaauggggccaacggagucaagggcuucuccuuuaaguauggcaacgggguguggauuggacggacaaaaagcaucuccucucgcaagggcuucgagaugauuugggauccuaauggguggaccggaaccgacaacaauuuuagcaucaaacaagacaucguuggcauuaacgaaugguccggguacucuggcagcuucgugcagcaccccgagcugacaggacucgauuguaucagaccuugcuucugggucgaacugauucggggccgccccaaggagaauacgaucuggaccuccgggagcucuauuuccuuuuguggagugaacagcgacacaguuggcuggucuuggcccgauggggcugagcuuccuuucaccaucgacaaauga

SEQ ID NO: 215340 - RNA, 1410 nt, Artificial Sequence; identical to SEQ ID NO: 212781
  derived and/or modified CDS sequence (opt5) from neuraminidase__InfluenzaA__AGB13133

SEQ ID NO: 215341 - RNA, 1410 nt, Artificial Sequence; identical to SEQ ID NO: 212329
  derived and/or modified CDS sequence (opt5) from neuraminidase__InfluenzaA__AGB13152

SEQ ID NO: 215342 - RNA, 1410 nt, Artificial Sequence; identical to SEQ ID NO: 212329
  derived and/or modified CDS sequence (opt5) from neuraminidase__InfluenzaA__AGB13162

SEQ ID NO: 215343 - RNA, 1410 nt, Artificial Sequence; identical to SEQ ID NO: 213152
  derived and/or modified CDS sequence (opt5) from neuraminidase__InfluenzaA__AGB13173

SEQ ID NO: 215344 - RNA, 1410 nt, Artificial Sequence
  derived and/or modified CDS sequence (opt5) from neuraminidase__InfluenzaA__AGB13183
augaaccccaaucagaagaucauuaccaucggcagcgugugcaugacaauugggauggccaaccugauccuccaaauuggaaauaucaucuccauuuggaucucucacagcauucagcugggcaaccagaaucagaucgagacguguaaccaauccgucauuaccuacgaaaauaacacauggguuaaucagaccuaugugaacaucucuaauacaaacuucgcugccgggcagagcguggucuccgugaaacuugcgggaaauucuagccugugcccuguuuccggcugggcuauuuacagcaaggacaacucuaucagaaucggguccaaaggagauguguuugucauucgggagccguucaucagcuguucuccccucgaaugccgcaccuuuuuccugacacagggcgcccuucugaaugacaagcauuccaacggcaccauuaaagauagaagcccuuaucggacgcucaugucuugucccaucggggaggugccuucccccuacaacagccgcuuugaauccguugccuggucugcuagcgccugccacgacggaauuaauuggcugaccaucggcaucuccgggcaagauaacggagcuguggccguccugaaguauaauggcauuaucacagacaccauuaagagcuggagaaacaauauccuccggacacaggagucugagugugcgugcgugaacggguccuguuucaccauuaugacggauggaccuagcgacggccaggccucuuacaaaaucuuucgcaucgaaaagggcaaaauugucaagagcguggagaugaaugcuccgaacuaucauuacgaagagugcuccuguuaccccgauucuagcgagaucacaugcguuugcagagacaauuggcacggguccaaccggccuugggugagcuucaaucagaaccuggaauaucaaauuggauacaucuguucuggcauuuuuggggauaauccccgcccuaacgacaaaaccggauccugcggccccgugagcucuaauggggccaacggagucaagggcuucuccuuuaaguauggcaacgggguguggaucggaagaacaaaaagcauuuccucucggaagggcuucgagaugaucugggauccgaauggguggaccggaaccgacaacaauuuuagcaucaaacaggacauuguuggcaucaacgaaugguccggguacucuggcagcuucgugcagcauccugagcuuacaggacuggauuguauucgccccugcuucugggucgaacucaucagaggccggccuaaggagaauacgauuuggaccuccgggagcucuaucuccuuuuguggagugaacagcgacacaguuggcuggucuuggcccgauggggcugagcugcccuucaccaucgacaaauga

SEQ ID NO: 215345 - RNA, 1410 nt, Artificial Sequence; identical to SEQ ID NO: 212781
  derived and/or modified CDS sequence (opt5) from neuraminidase__InfluenzaA__AGB13193

SEQ ID NO: 215346 - RNA, 1410 nt, Artificial Sequence; identical to SEQ ID NO: 212848
  derived and/or modified CDS sequence (opt5) from neuraminidase__InfluenzaA__AGB13203

SEQ ID NO: 215347 - RNA, 1410 nt, Artificial Sequence; identical to SEQ ID NO: 212781
  derived and/or modified CDS sequence (opt5) from neuraminidase__InfluenzaA__AGB13213

SEQ ID NO: 215348 - RNA, 1410 nt, Artificial Sequence; identical to SEQ ID NO: 212781
  derived and/or modified CDS sequence (opt5) from neuraminidase__InfluenzaA__AGB13223

SEQ ID NO: 215349 - RNA, 1410 nt, Artificial Sequence; identical to SEQ ID NO: 212781
  derived and/or modified CDS sequence (opt5) from neuraminidase__InfluenzaA__AGB13233

SEQ ID NO: 215350 - RNA, 1410 nt, Artificial Sequence
  derived and/or modified CDS sequence (opt5) from neuraminidase__InfluenzaA__AGB13243
augaaccccaaucagaagaucauuaccaucggcagcgugugcaugacaauugggauggccaaccugauccuccaaauuggaaauaucaucuccauuuggaucucucacagcauucagcugggcaaccagaaucagaucgagacguguaaccaauccgucauuaccuacgaaaauaacacauggguuaaucagaccuaugugaacaucucuaauacaaacuucgcugccgggcagagcguggucuccgugaaacuugcgggaaauucuagccugugcccuguuuccggcugggcuauuuacagcaaggacaacucuaucagaaucggguccaaaggagauguguuugucauucgggagccguucaucagcuguucuccccucgaaugccgcaccuuuuuccugacacagggcgcccuucugaaugacaagcauuccaacggcaccauuaaagauagaagcccuuaucggacgcucaugucuugucccaucggggaggugccuucccccuacaacagccgcuuugaauccguugccuggucugcuagcgccugccacgacggaauuaauuggcugaccaucggcaucuccgggccugauaacggagcuguggccguccugaaguauaauggcauuaucacagacaccauuaagagcuggagaaacaauauccuccggacacaagagucugagugugcgugcgugaacggguccuguuucaccauuaugacggauggaccgagcgacggccaggccucuuacaaaaucuuucgcaucgaaagaggcaagauugugaaaagcgucgagaugaaugcucccaacuauuacuacgaagagugcuccuguuauccugauucuagcgagaucacaugcguuugccgggacaauuggcauggguccaaccgccccugggugagcuucaaucagaaccuggaauaccagauuggauauaucuguucuggcguguuuggggauaauccuagacccaacgacaagaccggauccugcggcccggucagcucuaauggggccaacggagugaaaggcuucuccuuuaaguacggcaacgggguuuggauuggacggacaaagagcaucuccucucgcaaaggcuucgagaugauuugggauccuaauggguggaccggaaccgacaacaauuuuagcaucaagcaagacaucgugggcauuaacgaaugguccggguauucuggcagcuucguccagcaccccgagcuuacaggacuggauuguaucagaccuugcuucuggguggaacucauucggggccgccccaaagagaauacgaucuggaccuccgggagcucuauuuccuuuuguggaguuaacagcgacacagugggcuggucuuggcccgauggggcugagcugccuuucaccaucgacaaguga

SEQ ID NO: 215351 - RNA, 1410 nt, Artificial Sequence; identical to SEQ ID NO: 212848
  derived and/or modified CDS sequence (opt5) from neuraminidase__InfluenzaA__AGB13253

SEQ ID NO: 215352 - RNA, 1410 nt, Artificial Sequence
  derived and/or modified CDS sequence (opt5) from neuraminidase__InfluenzaA__AGB13263
augaaccccaaucagaagaucauuaccaucggcagcgugugcaugacaauugggauggccaaccugauccuccaaauuggaaauaucaucuccauuuggaucucucacagcauucagcugggcaaccagaaucagacggagaccuguaaccaauccgucaucacauacgaaaauaacaccuggguuaaucagacauaugugaacauuucuaauaccaacuucgcugccgggcagagcguggucuccgugaaacuugcgggaaauucuagccugugcccuguuuccggcugggcuaucuacagcaaggacaacucuauuagaaucggguccaaaggagauguguuugucauccgggagccguucauuagcuguucuccccucgaaugccgcacauuuuuccugacccagggcgcccuucugaaugacaagcauuccaacggcacgaucaaagauagaagcccuuaucggacccucaugucuugucccauuggggaggugccuucccccuacaacagccgcuuugaauccguugccuggucugcuagcgccugccacgacggaaucaauuggcugacaauuggcaucuccgggccugauaacggagcuguggccguccugaaguauaauggcaucauuaccgacacaaucaagagcuggagaaacaauauucuccggacccaagagucugagugugcgugcgugaacggguccuguuucacggugaugacagauggaccgagcgacggccaggccucuuacaaaaucuuucgcauugaaaagggcaaaaucgucaagagcguugagaugaaagcucccaauuaucauuacgaagagugcuccuguuacccugauucuagcgagauuaccugcgugugcagagacaacuggcacggguccaaucggcccugggugagcuucaaccagaaucuggaauaucgcaucggauacaucuguucuggcauuuuuggggauaacccuagacccaaugacaagacaggauccugcggcccggucagcucuaacggggccaauggagugaagggcuucuccuuuaaauauggcaacgggguuuggaucggacggaccaagagcauuuccucucgcaacggcuucgagaugaucugggauccuaauggguggaccggaacagacaacaauuuuagcauuaaacaggacaucaucggcauuaacgaaugguccggguacucuggcagcuucgugcaacaucccgagcuuacgggacuggauuguaucagaccuugcuucugggucgaacucauucggggccgccccaaggagaauaccaucuggacauccgggagcucuauuuccuuuuguggagugaacagcgacaccguuggcuggucuuggcccgauggggcugagcugccuuucacaguggacaaauga

SEQ ID NO: 215353 - RNA, 1410 nt, Artificial Sequence; identical to SEQ ID NO: 212781
  derived and/or modified CDS sequence (opt5) from neuraminidase__InfluenzaA__AGB13273

SEQ ID NO: 215354 - RNA, 1410 nt, Artificial Sequence
  derived and/or modified CDS sequence (opt5) from neuraminidase__InfluenzaA__AGB13283
augaaccccaaucagaagaucauuaccaucggcagcgugugcaugacaauugggauggccaaccugauccuccaaauuggaaauaucaucuccauuuggaucucucacagcauucagcugggcaaccagaaucagaucgagacguguaaccaauccgucauuaccuacgaaaauaacacauggguuaaucagaccuaugugaacaucucuaauacaaacuucgcugccgggcagagcguggucuccgugaaacuugcgggaaauucuagccugugcccuguuuccggcugggcuauuuacagcaaggacaacucuaucagaaucggguccaaaggagauguguuugucauucgggagccguucaucagcuguucuccccucgaaugccgcaccuuuuuccugacacagggcgcccuucugaaugacaagcauuccaacggcaccauuaaagauagaagcccuuaucggacgcucaugucuugucccaucggggaggugccuucccccuacaacagccgcuuugaauccguugccuggucugcuagcgccugccacgacggaauuaauuggcugaccaucggcaucuccgggccugauaacggagcuguggccguccugaaguauaauggcauuaucacagacaccauuaagagcuggagaaacaauauccuccggacacaagagucugagugugcgugcgugaacggguccuguuucaccauuaugacggauggaccgagcgacggccaggccucuuacaaaaucuuucgcaucgaaaagggcaaaauugucaagagcguggagaugaaugcucccaacuaucauuacgaagagugcuccuguuacccugauucuagcgagaucacaugcguuugcagagacaauuggcacggguccaaccggcccugggugagcuucaaucagaaccuggaauaucagauuggauacaucuguucuggcauuuuuggggauaauccucgccccaacgacaaaaccggauccugcggcccggugagcucuaauggggccaacggagucaagggcuucuccuuuaaguauggcaacgggguguggaucggaagaacaaaaagcauuuccucucggcgcggcuucgagaugaucugggauccuaauggguggaccggaaccgacaacaauuuuagcaucaagcaagacauuguuggcaucaacgaaugguccggguacucuggcagcuucgugcagcaucccgagcuuacaggacuggauuguauuagaccuugcuucugggucgaacucauccggggccgccccaaagagaauacgauuuggaccuccgggagcucuaucuccuuuuguggagugaacagcgacacaguuggcuggucuuggcccgauggggcugagcugccuuucaccaucgacaaguga

SEQ ID NO: 215355 - RNA, 1410 nt, Artificial Sequence; identical to SEQ ID NO: 212781
  derived and/or modified CDS sequence (opt5) from neuraminidase__InfluenzaA__AGB13293

SEQ ID NO: 215356 - RNA, 1410 nt, Artificial Sequence; identical to SEQ ID NO: 212781
  derived and/or modified CDS sequence (opt5) from neuraminidase__InfluenzaA__AGB13303

SEQ ID NO: 215357 - RNA, 1410 nt, Artificial Sequence
  derived and/or modified CDS sequence (opt5) from neuraminidase__InfluenzaA__AGB13313
augaaccccaaucagaagaucauuaccaucggcagcgugugcaugacaauugggauggccaaccugauccuccaaauuggaaauaucaucuccauuuggaucucucacagcauucagcugggcaaccagaaucagaucgagacguguaaccaauccgucauuaccuacgaaaauaacacauggguuaaucagaccuaugugaacaucucuaauacaaacuucgcugccgggcagagcguggucuccgcgaaacuugcuggaaauucuagccugugcccuguguccggcugggccauuuacagcaaggacaacucuaucagaaucggguccaaaggagauguuuuugugauucgggagccguucaucagcuguucuccccucgaaugccgcaccuuuuuccugacacagggcgcccuucugaaugacaagcauuccaacggcaccauuaaagauagaagcccuuaucggacgcucaugucuugucccaucggggaggucccuucccccuacaacagccgcuuugaauccguggcuuggucugccagcgcuugccacgacggaauuaauuggcugaccaucggcaucuccgggccugauaacggagccguugcggugcugaaguauaauggcauuaucacagacaccauuaagagcuggagaaacaauauccuccggacacaagagucugagugugccugcgucaacggguccuguuucaccgugaugacggauggaccgagcgacggccaggcuucuuacaaaauuuuucgcaucgaaaagggcaaaaucgucaagagcguggagaugaaugcccccaacuaucauuacgaagagugcuccuguuacccugauucuagcgagauuacaugcguuugcagagacaauuggcacggguccaaccggcccugggugagcuucaaucagaaccuggaauaucagaucggauacauuuguucuggcaucuuuggggauaauccucgccccaacgacaaaaagggauccugcggcccggugagcucuaauggggcuaacggagucaagggcuucuccuuuaaauauggcaacgggguguggauuggaagaaccaagagcaucuccucucggaauggcuucgagaugauuugggauccuaacggguggacaggaaccgacaauaacuuuagcaucaaacaagacaucguuggcauuaaugaaugguccggguacucuggcagcuucgugcagcaucccgagcuuaccggacuggauuguauccgcccuugcuucugggucgaacucauuagaggccggcccaaggagaacacaaucuggacguccgggagcucuauuuccuuuuguggagugaauagcgacaccguuggcuggucuuggcccgauggggccgagcugccuuucacaaucgacaaauga

SEQ ID NO: 215358 - RNA, 1410 nt, Artificial Sequence; identical to SEQ ID NO: 212781
  derived and/or modified CDS sequence (opt5) from neuraminidase__InfluenzaA__AGB13323

SEQ ID NO: 215359 - RNA, 1410 nt, Artificial Sequence
  derived and/or modified CDS sequence (opt5) from neuraminidase__InfluenzaA__AGB13333
augaaccccaaucagaagaucauuaccaucggcagcgugugcaugacaauugggauggccaaccugauccuccaaauuggaaauaucaucuccauuuggaucucucacagcauucagcugggcaaccagucccagaucgagacguguaaucaaucugucauuaccuacgaaaacaauacauggguuaaccagaccuaugugaauaucagcaacacaaauuucgcugccgggcaguccgcggugucugucaaacuugcuggaaacagcucccugugcccugugagcggcugggccauuuacucuaaggacaauuccaucagaaucgggagcaaaggagauguuuuugugauucgggagccguucaucucuuguagcccccucgaaugccgcaccuuuuuccugacacagggcgcccuucugaacgacaagcauuccaauggcaccauuaaagauagaucuccuuaucggacgcucauguccugucccaucggggaggucccuagccccuacaacucccgcuuugaaucuguggcuuggagcgccuccgcuugccacgacggaauuaacuggcugaccaucggcaucagcgggccugauaauggagccguugcggugcugaaguauaacggcauuaucacagacaccauuaagucuuggagaaauaacauccuccggacacaagaguccgagugugccugcgucaaugggagcuguuucaccauuaugacggauggaccgucugacggccaggcuagcuacaaaaucuuucgcaucgaaaagggcaaaauugugaaguccguggagaugaacgcccccaauuaucauuacgaagagugcucuuguuacccugauagcuccgagaucacaugcgucugcagagacaacuggcacgggagcaaucggcccuggguuucuuucaaccagaaucuggaauaucagauuggauacaucuguuccggcauuuuuggggauaacccucgccccaaugacaaaaccggaagcugcggcccggugucuuccaacggggcuaauggagugaagggcuucagcuuuaaguauggcaacggggucuggaucggaagaacaaaauccauuucuagccggaagggcuucgagaugaucugggauccuaacggguggaccggaaccgacaauaacuuuuccaucaaacaagacauugugggcaucaaugaauggucuggguacagcggcuccuucguucagcaucccgagcuuacaggacuggauuguauucgcccuugcuucuggguggaacucaucagaggccggcccaaggagaacacgauuuggaccagcgggucuuccaucagcuuuuguggagucaauucugacacagugggcugguccuggcccgauggggccgagcugccuuucaccaucgacaaauga

SEQ ID NO: 215360 - RNA, 1410 nt, Artificial Sequence; identical to SEQ ID NO: 212781
  derived and/or modified CDS sequence (opt5) from neuraminidase__InfluenzaA__AGB13343

SEQ ID NO: 215361 - RNA, 1410 nt, Artificial Sequence; identical to SEQ ID NO: 213030
  derived and/or modified CDS sequence (opt5) from neuraminidase__InfluenzaA__AGB13353

SEQ ID NO: 215362 - RNA, 1410 nt, Artificial Sequence
  derived and/or modified CDS sequence (opt5) from neuraminidase__InfluenzaA__AGB13363
augaaccccaaucagaagaucauuaccaucggcagcgugugcaugacaauugggauggccaaccugauccuccaaauuggaaauaucaucuccauuuggaucucucacagcauucagcugggcaaccagaaucagaucgagacguguaaccaauccgucauuaccuacgaaaauaacacauggguuaaucagaccuaugugaacaucucuaauacaaacuucgcugccgggcagagcguggcguccgucaaacuugcuggaaauucuagccugugcuccgugagcggcugggccauuuacucuaaggacaacuccaucagaaucgggagcaaaggagauguuuuugugauucgggagccuuucaucucuuguuccccgcucgaaugccgcaccuuuuuccugacacagggcgcccuucugaaugacaagcauagcaacggcaccauuaaagauagaucucccuaucggacgcucauguccuguccuaucggggagguccccagcccuuacaacucccgcuuugaaucuguggcuuggagcgccuccgcuugccacgacggaauuaauuggcugaccaucggcaucagcgggcccgauaacggagccguugcggugcugaaguauaauggcauuaucacagacaccauuaagucuuggagaaacaauauccuccggacacaagaguccgagugugccugcgucaacgggagcuguuucaccauuaugacggauggaccuucugacggccaggcuagcuacaaaaucuuucgcaucgaaaagggcaaaauugugaaguccguggagaugaaugccccgaacuaucauuacgaagagugcucuuguuaccccgauagcuccgagaucacaugcgucugcagagacaauuggcacgggagcaaccggccuuggguuucuuucaaucagaaccuggaauaucagauuggauacaucuguuccggcauuuuuggggauaauccccgcccuaacgacaaaaccggaagcugcggccccgugucuuccaauggggcuaacggagugaagggcuucagcuuuaaguauggcaacggggucuggaucggaagaacaaaauccauuucuagccggaagggcuucgagaugaucugggauccgaauggguggaccggaaccgacaacaauuuuuccaucaaacaagacauugugggcaucaacgaauggucuggguacagcggcuccuucguucagcauccugagcuuacaggacuggauuguauucgccccugcuucuggguggaacucaucagaggccggccuaaggagaauacgauuuggaccagcgggucuuccaucagcuuuuguggagucaacucugacacagugggcugguccuggcccgauggggccgagcugcccuucaccaucgacaaauga

SEQ ID NO: 215363 - RNA, 1410 nt, Artificial Sequence
  derived and/or modified CDS sequence (opt5) from neuraminidase__InfluenzaA__AGB13383
augaaccccaaucagaagaucauuaccaucggcagcgugugcaugacaauugggauggccaaccugauccuccaaauuggaaauaucaucuccauuuggaucucucacagcauucagcugggcaaccagaaucagaucgagacguguaaccaauccgucauuaccuacgaaaauaacacauggguuaaucagaccuaugugaacaucucuaauacaaacuucgcugccgggcagagcguggucuccgugaaacuugcgggaaauucuagccugugcccuguuuccggcugggcuauuuacagcaaggacaacucuaucagaaucggguccaaaggagauguguuugucauucgggagccguucaucagcuguucuccccucgaaugccgcaccuuuuuccugacacagggcgcccuucugaaugacaagcauuccaacggcaccauuaaagauagaagcccuuaucggacgcucaugucuugucccaucggggaggugccuucccccuacaacagccgcuuugaauccguugccuggucugcuagcgccugccacgacggaauuaauuggcugaccaucggcaucuccgggccugauaacggagcuguggccguccugaaguauaauggcauuaucacagacaccauuaagagcuggagaaacaauauccuccggacacaagagucugagugugcgugcgugaacggguccuguuucaccauuaugacggauggaccgagcgacggccaggccucuuacaaaaucuuucgcaucgaaaagggcaaaauugugaagucugucgagaugaaugcucccaacuaucauuacgaagagugcuccuguuacccugauucuagcgagaucacaugcguuugcagagacaauuggcacggguccaaccggcccugggugagcuucaaucagaaccuggaauaucagauuggauacaucuguucuggcauuuuuggggauaauccucgccccaacgacaaaaccggauccugcggcccggugagcucuaauggggccaacggagucaagggcuucuccuuuaaguauggcagcgggguguggaucggaagaacaaaauccauuucuagccggaagggcuucgagaugaucugggauccuaacggguggaccggaaccgacaauaacuuuuccaucaaacaagacauuguuggcaucaaugaauggucuggguacagcggcuccuucgugcagcaucccgagcuuacaggacuggauuguauucgcccuugcuucugggucgaacucaucagaggccggcccaaggagaacacgauuuggaccagcgggucuuccaucagcuuuuguggagugaauagcgacacaguuggcugguccuggcccgauggggcugagcugccuuucaccaucgacaaauga

SEQ ID NO: 215364 - RNA, 1410 nt, Artificial Sequence; identical to SEQ ID NO: 212329
  derived and/or modified CDS sequence (opt5) from neuraminidase__InfluenzaA__AGB13393

SEQ ID NO: 215365 - RNA, 1410 nt, Artificial Sequence; identical to SEQ ID NO: 213029
  derived and/or modified CDS sequence (opt5) from neuraminidase__InfluenzaA__AGB13403

SEQ ID NO: 215366 - RNA, 1410 nt, Artificial Sequence; identical to SEQ ID NO: 212329
  derived and/or modified CDS sequence (opt5) from neuraminidase__InfluenzaA__AGB13413

SEQ ID NO: 215367 - RNA, 1410 nt, Artificial Sequence; identical to SEQ ID NO: 212329
  derived and/or modified CDS sequence (opt5) from neuraminidase__InfluenzaA__AGB13423

SEQ ID NO: 215368 - RNA, 1410 nt, Artificial Sequence; identical to SEQ ID NO: 213029
  derived and/or modified CDS sequence (opt5) from neuraminidase__InfluenzaA__AGB13433

SEQ ID NO: 215369 - RNA, 1410 nt, Artificial Sequence; identical to SEQ ID NO: 213029
  derived and/or modified CDS sequence (opt5) from neuraminidase__InfluenzaA__AGB13443

SEQ ID NO: 215370 - RNA, 1410 nt, Artificial Sequence
  derived and/or modified CDS sequence (opt5) from neuraminidase__InfluenzaA__AGB13453
augaaccccaaucagaagaucauuaccaucggcagcgugugcaugacaauugggauggccaaccugauccuccaaauuggaaauaucaucuccauuuggaucucucacagcauucagcugggcaaccagucccagaucgagacguguaaucaaucugucauuaccuacgaaaacaauacauggguuaaccagaccuaugugaauaucagcaacacaaauuucgcugccgggcaguccguggucucugugaaacuugcgggaaacagcucccugugcccuguuagcggcugggcuauuuacucuaaggacaauuccaucagaaucgggagcaaaggagauguguuugucauucgggagccguucaucucuuguagcccccucgaaugccgcaccuuuuuccugacacagggcgcccuucugaacgacaagcauuccaauggcaccauuaaagauagaucuccuuaucggacgcucauguccugucccaucggggaggugccuagccccuacaacucccgcuuugaaucuguugccuggagcgcuuccgccugccacgacggaauuaacuggcugaccaucggcaucagcgggccugauaauggagcuguggccguccugaaguauaacggcauuaucacagacaccauuaagucuuggagaaauaacauccuccggacacaagaguccgagugugcgugcgugaaugggagcuguuucaccauuaugacggauggaccgucugacggccaggccagcuacaaaaucuuucgcaucgaaaagggcaaaauugugaaguccgucgagaugaacgcucccaauuaucauuacgaagagugcucuuguuacccugauagcuccgagaucacaugcguuugcagagacaacuggcacgggagcaaucggcccugggugucuuucaaccagaaucuggaauaucagauuggauacaucuguuccggcauuuuuggggauaacccucgccccaaugacaaaaccggaagcugcggcccggugucuuccaacggggccaauggagucaagggcuucagcuuuaaguauggcaacgggguguggaucggaagaacaaaauccuucucuagccggaagggcuuugagaugauuugggauccuaacggguggaccggaaccgacaauaacuucuccaucaaacaagacaucguuggcauuaaugaauggucuggguacagcggcuccuucgugcagcaucccgagcuuacaggacuggauuguauccgcccuugcuuuugggucgaacucauuagaggccggcccaaggagaacacgaucuggaccagcgggucuuccauuagcuucuguggaguuaauucugacacagugggcugguccuggcccgauggggcugagcugccuuuuaccaucgacaaauga

SEQ ID NO: 215371 - RNA, 1410 nt, Artificial Sequence; identical to SEQ ID NO: 212329
  derived and/or modified CDS sequence (opt5) from neuraminidase__InfluenzaA__AGB13463

SEQ ID NO: 215372 - RNA, 1410 nt, Artificial Sequence; identical to SEQ ID NO: 212781
  derived and/or modified CDS sequence (opt5) from neuraminidase__InfluenzaA__AGB13473

SEQ ID NO: 215373 - RNA, 1410 nt, Artificial Sequence
  derived and/or modified CDS sequence (opt5) from neuraminidase__InfluenzaA__AGB13483
augaaccccaaucagaagaucauuaccaucggcagcgugugcaugacaauugggauggccaaccugauccuccaaauuggaaauaucaucuccauuuggaucucucacagcauucagcugggcaaccagucccagaucgagacguguaaucaaucugucauuaccuacgaaaacaauacauggguuaaccagaccuaugugaauaucagcaacacaaauuucgcugccgggcaguccguggucucugugaaacuugcgggaaacagcucccugugcccuguuagcggcugggcuauuuacucuaaggacaauuccaucagaaucgggagcaaaggagauguguuugucauucgggagccguucaucucuuguagcccccucgaaugccgcaccuuuuuccugacacagggcgcccuucugaacgacaagcauuccaauggcaccauuaaagauagaucuccuuaucggacgcucauguccugucccaucggggaggugccuagccccuacaacucccgcuuugaaucuguugccuggagcgcuuccgccugccacgacggaauuaacuggcugaccaucggcaucagcgggccugauaauggagcuguggccguccugaaguauaacggcauuaucacagacaccauuaagucuuggagaaauaacauccuccggacacaagaguccgagugugcgugcgugaaugggagcuguuucaccauuaugacggauggaccgucugacggccaggccagcuacaaaaucuuucgcaucgaaaagggcaaaauugugaaguccgucgagaugaacgcucccaauuaucauuacgaagagugcucuuguuacccugauagcuccgagaucacaugcguuugcagagacaacuggcacgggagcaaucggcccugggugucuuucaaccagaaucuggaauaucagauuggauacaucuguuccggcauuuuuggggauaacccucgccccaaugacaaaaccggaagcugcggcccggugucuuccaacggggccaauggagucaagggcuucagcuuuaaguauggcaacgggguguggaucggaagaacaaaauccauuucuagccggaagggcuucgagaugaucugggauccuaacggguggaccggaaccgacaauaacuuuuccaucaaacaagacauuguuggcaucaaugaauggucuggguacagcggcuccuucgugcagcaucccgagcuuacaggacuggauuguauucgcccuugcuucugggucgaacucaucagaggccagcccaaggagaacacgauuuggaccagcgggucuuccaucagcuuuuguggaguuaauucugacacagugggcugguccuggcccgauggggcugagcugccuuucaccaucgacaaauga

SEQ ID NO: 215374 - RNA, 1410 nt, Artificial Sequence; identical to SEQ ID NO: 213066
  derived and/or modified CDS sequence (opt5) from neuraminidase__InfluenzaA__AGB13493

SEQ ID NO: 215375 - RNA, 1410 nt, Artificial Sequence; identical to SEQ ID NO: 212858
  derived and/or modified CDS sequence (opt5) from neuraminidase__InfluenzaA__AGB13503

SEQ ID NO: 215376 - RNA, 1410 nt, Artificial Sequence; identical to SEQ ID NO: 210272
  derived and/or modified CDS sequence (opt5) from neuraminidase__InfluenzaA__AGB13513

SEQ ID NO: 215377 - RNA, 1410 nt, Artificial Sequence; identical to SEQ ID NO: 213064
  derived and/or modified CDS sequence (opt5) from neuraminidase__InfluenzaA__AGB13523

SEQ ID NO: 215378 - RNA, 1410 nt, Artificial Sequence; identical to SEQ ID NO: 213064
  derived and/or modified CDS sequence (opt5) from neuraminidase__InfluenzaA__AGB13533

SEQ ID NO: 215379 - RNA, 1410 nt, Artificial Sequence; identical to SEQ ID NO: 212781
  derived and/or modified CDS sequence (opt5) from neuraminidase__InfluenzaA__AGB13543

SEQ ID NO: 215380 - RNA, 1410 nt, Artificial Sequence; identical to SEQ ID NO: 212781
  derived and/or modified CDS sequence (opt5) from neuraminidase__InfluenzaA__AGB13553

SEQ ID NO: 215381 - RNA, 1410 nt, Artificial Sequence
  derived and/or modified CDS sequence (opt5) from neuraminidase__InfluenzaA__AGB13563
augaaccccaaucagaagaucauuaccaucggcagcgugugcaugacaauuggggucgccaaccugauccuccaaauuggaaauaucaucuccauuuggaucucucacagcauucagcugggcaaccagaaucagaucgagacguguaaccaauccguuauuaccuacgaaaauaacacaugggugaaucagaccuaugugaacaucucuaauacaaacuucgcugccgggcagagcgucguguccguuaaucuugcgggaaacucuagccugugcccuguguccggcugggcuauuuacagcaaagacaauucuaucagaaucggguccaagggagaugucuuugugauucgggagccguucaucagcuguucuccccucgaaugccgcaccuuuuuccugacacagggcgcccuucugaacgacaaacauuccaacggcaccauuaaggauagaagcccuuaucggacgcucaugucuugucccaucggggagguuccuucccccuacaauagccgcuuugaauccguggccuggucugcuagcgccugccacgacggaauuaacuggcugaccaucggcaucuccgggccugauaauggagcugucgccgugcugaaauauaacggcauuaucacagacaccauuaagagcuggagaaauaacauccuccggacacaagagucugagugugcgugcgugaauggguccuguuucaccauuaugacggauggaccgagcgacggccaggccucuuacaagaucuuucgcaucgaaaaaggcaagauugucaaaagcguugagaugaacgcucccaauuaucauuacgaagagugcuccuguuacccugauucuagcgagaucacaugcgugugcagagacaacuggcacggguccaaucggcccugggugagcuucaaccagaaucuggaauaucagauuggauacaucuguucuggcauuuuuggggauaacccucgccccaaugacaagaccggauccugcggcccggucagcucuaacggggccaacggagugaaaggcuucuccuuuaaguauggcaaugggguuuggaucggaagaacaaagaacauuagcucccggaaaggcuucgagaugaucugggauccuaauggguggaccggaaccgacaacaauuuuucuaucaagcaagacauugugggcaucaacgaauggagcggguacuccggcucuuucguccagcaucccgagcuuacaggacuggauuguauucgcccuugcuucuggguggaacucaucagaggccggcccaaagagaauacgauuuggaccagcggguccagcaucucuuuuuguggaguuaacuccgacacagugggcuggagcuggcccgauggggcugagcugccuuucaccaucgacaaguga

SEQ ID NO: 215382 - RNA, 1410 nt, Artificial Sequence; identical to SEQ ID NO: 212781
  derived and/or modified CDS sequence (opt5) from neuraminidase__InfluenzaA__AGB13573

SEQ ID NO: 215383 - RNA, 1410 nt, Artificial Sequence
  derived and/or modified CDS sequence (opt5) from neuraminidase__InfluenzaA__AGB13583
augaaccccaaucagaagaucauuaccaucggcagcgugugcaugacaauugggauggccaaccugauccuccaaauuggaaauaucaucuccauuuggaucucucacagcauucagcugggcaaccagaaucagaucgagacguguaaccaauccgucauuaccuacgaaaauaacacauggguuaaucagaccuaugugaacaucucuaauacaaacuucgcugccgggcagagcgugggauccgucaaacuugcgggcaauucuagccugugcccuguguccgggugggcuauuuacagcaaggacaacucuaucagaaucggauccaaaggcgauguuuuugugauucgggagccguucaucagcuguucuccccucgaaugccgcaccuuuuuccugacacagggcgcccuucugaaugacaagcauuccaacgggaccauuaaagauagaagcccuuaucggacgcucaugucuugucccaucggagaggucccuucccccuacaacagccgcuuugaauccguggccuggucugcuagcgccugccacgacggcauuaauuggcugaccaucgggaucuccggaccugauaacggcgcuguugccgugcugaaguauaaugggauuaucacagacaccauuaagagcuggagaaacaauauccuccggacacaagagucugagugugcgugcgucaacggauccuguuucaccauuaugacggauggcccgagcgacggccaggccucuuacaaaaucuuucgcaucgaaaaggggaaaauugucaagagcguggagaugaaugcucccaacuaucauuacgaagagugcuccuguuacccugauucuagcgagaucacaugcgugugcagagacaauuggcacggauccaaccggcccuggguuagcuucaaucagaaccuggaauaucagauuggcuacaucuguucugggauuuuuggagauaauccucgccccaacgacaaaaccggcuccugcgggccggugagcucuaauggagccaacggcgugaagggcuucuccuuuaaguaugggaacggagucuggaucggcagaacaaaaagcauuuccucucggaagggguucgagaugaucugggauccuaauggauggaccggcaccgacaacaauuuuagcaucaaacaagacauuguggggaucaacgaaugguccggcuacucuggcagcuucguucagcaucccgagcuuacaggacuggauuguauucgcccuugcuucuggguggaacucaucagagggcggcccaaggagaauacgauuuggaccuccggaagcucuaucuccuuuuguggcgucaacagcgacacagugggguggucuuggcccgauggagcugagcugccuuucaccaucgacaaauga

SEQ ID NO: 215384 - RNA, 1410 nt, Artificial Sequence; identical to SEQ ID NO: 212781
  derived and/or modified CDS sequence (opt5) from neuraminidase__InfluenzaA__AGB13593

SEQ ID NO: 215385 - RNA, 1410 nt, Artificial Sequence; identical to SEQ ID NO: 212781
  derived and/or modified CDS sequence (opt5) from neuraminidase__InfluenzaA__AGB13603

SEQ ID NO: 215386 - RNA, 1410 nt, Artificial Sequence; identical to SEQ ID NO: 212781
  derived and/or modified CDS sequence (opt5) from neuraminidase__InfluenzaA__AGB13613

SEQ ID NO: 215387 - RNA, 1410 nt, Artificial Sequence; identical to SEQ ID NO: 212781
  derived and/or modified CDS sequence (opt5) from neuraminidase__InfluenzaA__AGB13623

SEQ ID NO: 215388 - RNA, 1410 nt, Artificial Sequence
  derived and/or modified CDS sequence (opt5) from neuraminidase__InfluenzaA__AGB13633
augaaccccaaucagaagaucauuaccaucggcagcgugugcaugacaauugggauggccaaccugauccuccaaauuggaaauaucaucuccauuuggaucucucacagcauucagcugggcaaccagucccagaucgagacguguaaucaaucugucauuaccuacgaaaacaauacauggguuaaccagaccuaugugaauaucagcaacacaaauuucgcugccgggcaguccguggucucugugaaacuugcgggaaacagcucccugugcccuguuagcggcugggcuauuuacucuaaggacaauuccaucagaaucgggagcaaaggagauguguuugucauucgggagccguucaucucuuguagcccccucgaaugccgcaccuuuuuccugacacagggcgcccuucugaacgacaagcauuccaauggcaccauuaaagauagaucuccuuaucggacgcucauguccugucccaucggggaggugccuagccccuacaacucccgcuuugaaucuguugccuggagcgcuuccgccugccacgacggaauuaacuggcugaccaucggcaucagcgggccugauaauggagcuguggccguccugaaguauaacggcauuaucacagacaccauuaagucuuggagaaauaacauccuccggacacaagaguccgagugugcgugcgugaaugggagcuguuucaccauuaugacggauggaccgucugacggccaggccagcuacaaaaucuuucgcaucgaaaagggcaaaauugugaaguccgucgagaugaacgcucccaauuaucauuacgaagagugcucuuguuacccugauagcuccgagaucacaugcguuugcagagacaacuggcacgggagcaaucggcccugggugucuuucaaccagaaucuggaauaucagauuggauacaucuguuccggcauuuuuggggauaacccucgccccaaugacaaaaccggaagcugcggcccggugucuuccaacggggccaauggagucaagggcuucagcuuuaaguauggcaacgggguguggaucggaagaacaaaauccauuucuagccggaagggcuucgagaugaucugggauccuaacggguggaccggaaccgacaauaacuuuuccaucaaacaagacauuguuggcaucaaugaauggucuggguacagcggcuccuucgugcagcaucccgagcuuacaggacuggauuguauucgcccuugcuucugggucgaacucaucagaggccggcccaaggagaacacgauuuggaccagcgggucuaucaucuccuuuuguggagugaauagcgacacaguuggcuggucuuggcccgauggggcugagcugccuuucaccauugacaaauga

SEQ ID NO: 215389 - RNA, 1410 nt, Artificial Sequence
  derived and/or modified CDS sequence (opt5) from neuraminidase__InfluenzaA__AGB13643
augaaccccaaucagaagaucauuaccaucggcagcgugugcaugacaauugggauggccaaccugauccuccaaauuggaaauaucaucuccauuuggaucucucacagcauucagcugggcaaccagaaucagaucgagacguguaaccaauccgucauuaccuacgaaaauaacacauggguuaaucagaccuaugugaacaucucuaauacaaacuucgcugccgggcagagcguggucuccgugaaacuugcgggaaauucuagccugugcccuguuuccggcugggcuauuuacagcaaggacaacgggaucagaaucggaucuaaaggcgauguguuugucauucgggagccguucaucuccuguagcccccucgaaugccgcaccuuuuuccugacacagggcgcccuucugaaugacaagcauucuaacgggaccauuaaagauagauccccuuaucggacgcucaugagcugucccaucggagaggugccuucucccuacaacucccgcuuugaaagcguugccugguccgcuucugccugccacgacggcauuaauuggcugaccaucgggaucagcggaccugauaacggcgcuguggccguccugaaguauaaugggauuaucacagacaccauuaaguccuggagaaacaauauccuccggacacaagagagcgagugugugugcgugaacggaucuuguuucaccgucaugacggauggcccguccgacggccaggcgagcuacaaaauuuuucgcaucgaaaaggggaaaaucguuaagucuguggagaugaaugcccccaacuaucauuacgaagagugcagcuguuacccugauuccucugagauuacaugcgugugcagagacaauuggcacggaagcaaccggcccugggucuccuucaaucagaaccuggaauaucagaucggcuacauuuguagcgggaucuuuggagauaauccucgccccaacgacaaaaccggcucuugcgggccgguguccagcaauggagcuaacggcguuaagggcuucucuuuuaaguaugggaacggaguguggauuggcagaacaaaauccaucagcucccggaauggguucgagaugauuugggauccuaacggauggaccggcaccgacaauaacuuuucugucaagcaagacaucaucgggauuaaugaauggagcggcuacuccggaucuuucgugcagcaucccgagcuuacaggccuggauuguauccgcccuugcuucuggguugaacucauuagagggcggcccaaagagaacacgaucuggaccagcggauccagcauuucuuuuuguggcgucaauuccgacacagugggguggagcuggcccgauggagccgagcugccuuucaccaucgacaaguga

SEQ ID NO: 215390 - RNA, 1410 nt, Artificial Sequence
  derived and/or modified CDS sequence (opt5) from neuraminidase__InfluenzaA__AGB13653
augaaccccaaucagaagaucauuaccaucggcagcgugugcaugacaauugggauggccaaccugauccuccaaauuggaaauaucaucuccauuuggaucucucacagcauucagcugggcaaccagaaucagaucgagacguguaaccaauccgucauuaccuacgaaaauaacacauggguuaaucagaccuaugugaacaucucuaauacaaacuucgcugccgggcagagcguggucuccgugaaacuugcgggaaauucuagccugugcccuguuuccggcugggcuauuuacagcaaggacaacucuaucagaaucggguccaaaggagauguguuugucauucgggagccguucaucagcuguucuccccucgaaugccgcaccuuuuuccugacacagggcgcccuucugaaugacaagcauuccaacggcaccauuaaagauagaagcccuuaucggacgcucaugucuugucccaucggggaggugccuucccccuacaacagccgcuuugaauccguugccuggucugcuagcgccugccacgacggaauuaauuggcugaccaucggcaucuccgggccugauaacggagcuguggccguccugaaguauaauggcauuaucacagacaccauuaagagcuggagaaacaauauccuccggacacaagagucugagugugugugcgugaacggguccuguuucaccgucaugacggauggaccgagcgacggccaggcgucuuacaaaauuuuucgcaucgaaaagggcaaaaucguuaagagcguggagaugaaugcccccaacuaucauuacgaagagugcuccuguuacccugauucuagcgagauuacaugcgugugcagagacaauuggcacggguccaaccggcccugggucagcuucaaucagaaccuggaauaucagaucggauacauuuguucuggcaucuuuggggauaauccucgccccaacgacaaaaccggauccugcggcccggugagcucuaauggggcuaacggaguuaagggcuucuccuuuaaguauggcaacgggguguggauuggaagaacaaaaagcaucuccucucggaauggcuucgagaugauuugggauccuaacggguggaccggaaccgacaauaacuuuagcgucaagcaagacaucaucggcauuaaugaaugguccggguacucuggcagcuucgugcagcaucccgagcuuacaggacuggauuguauccgcccuugcuucuggguugaacucauuagaggccggcccaaagagaacacgaucuggaccuccgggagcucuauuuccuuuuguggagugaauagcgacacagucggcuggucuuggcccgauggggccgagcugccuuucaccaucgacaaguga

SEQ ID NO: 215391 - RNA, 1410 nt, Artificial Sequence; identical to SEQ ID NO: 212329
  derived and/or modified CDS sequence (opt5) from neuraminidase__InfluenzaA__AGB13663

SEQ ID NO: 215392 - RNA, 1410 nt, Artificial Sequence; identical to SEQ ID NO: 212329
  derived and/or modified CDS sequence (opt5) from neuraminidase__InfluenzaA__AGB13724

SEQ ID NO: 215393 - RNA, 1410 nt, Artificial Sequence; identical to SEQ ID NO: 212781
  derived and/or modified CDS sequence (opt5) from neuraminidase__InfluenzaA__AGB13734

SEQ ID NO: 215394 - RNA, 1410 nt, Artificial Sequence; identical to SEQ ID NO: 209286
  derived and/or modified CDS sequence (opt5) from neuraminidase__InfluenzaA__AGB51359

SEQ ID NO: 215395 - RNA, 1410 nt, Artificial Sequence
  derived and/or modified CDS sequence (opt5) from neuraminidase__InfluenzaA__AGB97270
augaaccccaaucagaagaucauuaccaucggcagcgugugcaugacaauugggauggccaaccugauccuccaaauuggaaauaucaucuccauuuggaucucucacagcauucagcugagaaaccagaaucagaucgagacguguaaccaauccgucauuaccuacgaaaauaacacauggguuaaucagaccuaugugaacaucucuaauacaaacuucgcugccggccagagcguggucuccgugaaacuugcggggaauagcagccugugcccuguuuccggaugggcuauuuacagcaaggacaacucuauccggaucggcuccaaaggggauguguuugucauucgcgagccguucaucagcuguucuccccucgaaugcagaaccuuuuuccugacacagggagcccuucugaaugacaagcauuccaacggcaccauuaaagaucggagcccuuaucgcacgcucaugucuugucccaucggcgaggugccuucccccuacaacagcagauuugaauccguugccuggucugcuagcgccugccacgacgggauuaauuggcugaccaucggaaucuccggcccugauaacggggcuauggccgugcugaaguauaauggaauuaucacagacaccauuaagagcuggcggaacaauauccuccgcacacaagagucugagugugcgugcgucaacggcuccuguuucaccauuaugacggaugggccgagcgacggacaggccucuuacaaaaucuuuagaaucgaaaagggcaaaauugugaagucuguggagaugaaugcucccaacuaucauuacgaagagugcuccuguuacccugauucuagcgagaucacaugcgucugccgggacaauuggcacggcuccaaccgccccuggguuagcuucaaucagaaccuggaauaucagauuggguacaucuguucuggaauuuuuggcgauaauccuagacccaacgacaaaaccggguccugcggaccggugagcucuaauggcgccaacggggugaagggauucuccuuuaaguauggcaacggcgucuggaucgggcggacaaaaagcauuuccucucgcaagggauucgagaugaucugggauccuaauggcuggaccgggaccgacaacaauuuuagcaucaaacaagacauugugggaaucaacgaaugguccggcuacucugggagcuucguucagcaucccgagcuuacaggccuggauuguauuagaccuugcuucuggguggaacucauccggggacgccccaaggagaauacgauuuggaccuccggcagcucuaucuccuuuuguggggucaacagcgacacagugggauggucuuggcccgauggcgcugagcugccuuucaccaucgacaaauga

SEQ ID NO: 215396 - RNA, 1410 nt, Artificial Sequence
  derived and/or modified CDS sequence (opt5) from neuraminidase__InfluenzaA__AGB97274
augaaccccaaucagaagaucauuaccaucggcagcgugugcaugacaauugggauggccaaccugauccuccaaauuggaaauaucaucuccauuuggaucucucacagcauucagcugagaaaccagaaucagaucgagacguguaaccaauccgucauuaccuacgaaaauaacacauggguuaaucagaccuaugugaacaucucuaauacaaacuucgcugccggccagagcguggucuccgugaaacuugcggggaauagcagccugugcccuguuuccggaugggcuauuuacagcaaggacaacucuauccggaucggcuccaaaggggauguguuugucauucgcgagccguucaucagcuguucuccccucgaaugcagaaccuuuuuccugacacagggagcccuucugaaugacaagcauuccaacggcaccauuaaagaucggagcccuuaucgcacgcucaugucuugucccaucggcgaggugccuucccccuacaacagcagauuugaauccguugccuggucugcuagcgccugccacgacgggauuaauuggcugaccaucggaaucuccggcccugauaacggggcuguggccguccugaaguauaauggaauuaucacagacaccauuaagagcuggcggaacaauauccuccgcacacaagagucugagugugcgugcgugaacggcuccuguuucaccauuaugacggaugggccgagcgacggacaggccucuuacaaaaucuuuagaaucgaaaagggcaaaauugugaagucugucgagaugaaugcucccaacuaucauuacgaagagugcuccuguuacccugauucuagcgagaucacaugcguuugccgggacaauuggcacggcuccaaccgccccugggugagcuucaaucagaaccuggaauaucagauuggguacaucuguucuggaauuuuuggcgauaauccuagacccaacgacaaaaccggguccugcggaccggugagcucuaauggcgccaacggggucaagggauucuccuuuaaguauggcaacggcguguggaucgggcggacaaaaagcauuuccucucgcaagggauucgagaugaucugggauccuaauggcuggaccgggaccgacaacaauuuuagcaucaaacaagacauuguuggaaucaacgaaugguccggcuacucugggagcuucgugcagcaucccgagcuuacaggccuggauuguauuagaccuugcuucugggucgaacucauccggggacgccccaaggagaauacgauuuggaccuccggcagcucuaucuccuuuuguggggugaacagcgacacaguuggauggucuuggcccgauggcgcugagcugccuuucaccaucgacaaauga

SEQ ID NO: 215397 - RNA, 1410 nt, Artificial Sequence; identical to SEQ ID NO: 214218
  derived and/or modified CDS sequence (opt5) from neuraminidase__InfluenzaA__AGB97289

SEQ ID NO: 215398 - RNA, 1410 nt, Artificial Sequence
  derived and/or modified CDS sequence (opt5) from neuraminidase__InfluenzaA__AGE15475
augaaccccaaucagaagaucauuaccaucggcagcgugugcaugacaauugggauggccaaccugauccuccaaauuggaaauaucaucuccauuuggaucucucacagcauucagcugggcaaccagucccagaucgagacguguaaucaaucugucauuaccuacgaaaacaauacauggguuaaccagaccuaugugaauaucagcaacacaaauuucgcugccgggcaguccguggucucugugaaacuugcgggaaacagcucccugugcccuguuagcggcugggcuauuuacucuaaggacaauuccaucagaaucgggagcaaaggagauguguuugucauucgggagccguucaucucuuguagcccccucgaaugccgcaccuuuuuccugacacagggcucccuucugaacgacaagcauucuaauggcaccauuaaagauagauccccuuaucggacgcucaugagcugucccaucggggaggugccuucccccuacaacucucgcuuugaaagcguugccugguccgccagcgcuugccacgacggaauuaacuggcugaccaucggcaucucugggccugauaauggagccguggcuguccugaaguauaacggcauuaucacagacaccauuaaguccuggagaaauaacauccuccggacacaagagagcgagugugccugcgugaaugggucuuguuucaccauuaugacggauggaccgagcgacggccaggcguccuacaaaaucuuucgcaucgaaaagggcaaaauugugaagucugucgagaugaacgcccccaauuaucauuacgaagagugcagcuguuacccugauuccagcgagaucacaugcguuugcagagacaacuggcacgggucuaaucggcccuggguguccuucaaccagaaucuggaauaucagauuggauacaucuguagcggcauuuuuggggauaacccucgccccaaugacaaaaccggaucuugcggcccgguguccagcaacggggcuaauggagucaagggcuucuccuuuaaguauggcaacgggguguggaucggaagaacaaaaucuauuagcucccggaagggcuucgagaugaucugggauccuaacggguggaccggaaccgacaauuacuuuucuaucaaacaagacauuguuggcaucaacgaauggagcggguauuccggcagcuucgugcagcaucccgagcuuacaggacuggauuguauucgcccuugcuucugggucgaacucaucagaggccggcccaaggagaauacgauuuggaccucuggguccagcaucucuuuuuguggagugaacuccgacacaguuggcuggagcuggcccgauggggccgagcugccuuucucuaucgacaaauga

SEQ ID NO: 215399 - RNA, 1410 nt, Artificial Sequence
  derived and/or modified CDS sequence (opt5) from neuraminidase__InfluenzaA__AGE15476
augaaccccaaucagaagaucauuaccaucggcagcgugugcaugacaauugggauggccaaccugauccuccaaauuggaaauaucaucuccauuuggaucucucacagcauucagcugggcaaccagucccagaucgagacguguaaucaaucugucauuaccuacgaaaacaauacauggguuaaccagaccuaugugaauaucagcaacacaaauuucgcugccgggcaguccguggucucugugaaacuugcgggaaacagcucccugugcccuguuagcggcugggcuauuuacucuaaggacaauuccaucagaaucgggagcaaaggagauguguuugucauucgggagccguucaucucuuguagcccccucgaaugccgcaccuuuuuccugacacagggcucccuucugaacgacaagcauucuaauggcaccauuaaagauagauccccuuaucggacgcucaugagcugucccaucggggaggugccuucccccuacaacucucgcuuugaaagcguugccugguccgccagcgcuugccacgacggaauuaacuggcugaccaucggcaucucugggccugauaauggagccguggcuguccugaaguauaacggcauuaucacagacaccauuaaguccuggagaaauaacauccuccggacacaagagagcgagugugccugcgugaaugggucuuguuucaccauuaugacggauggaccgagcgacggccaggcguccuacaaaaucuuucgcaucgaaaagggcaaaauugugaagucugucgagaugaacgcccccaauuaucauuacgaagagugcagcuguuacccugauuccagcgagaucacaugcguuugcagagacaacuggcacgggucuaaucggcccuggguguccuucaaccagaaucuggaauaucagauuggauacaucuguagcggcauuuuuggggauaacccucgccccaaugacaaaaccggaucuugcggcccgguguccagcaacggggcuaauggagucaagggcuucuccuuuaaguauggcaacgggguguggaucggaagaacaaaaucuauuagcucccggaagggcuucgagaugaucugggauccuaacggguggaccggaaccgacaauuacuuuucuaucaaacaagacauuguuggcaucaacgaauggagcggguauuccggcagcuucgugcagcaucccgagcuuacaggacuggauuguauucgcccuugcuucugggucgaacucaucagaggccggcccaaggagaauacgauuuggaccucuggguccagcaucucuuuuuguggagugaacuccgacacaguuggcuggagcuggcccgauggggccgagcugccuuucaccaucgacaaauga

SEQ ID NO: 215400 - RNA, 1410 nt, Artificial Sequence; identical to SEQ ID NO: 215230
  derived and/or modified CDS sequence (opt5) from neuraminidase__InfluenzaA__AGE15477

SEQ ID NO: 215401 - RNA, 1410 nt, Artificial Sequence
  derived and/or modified CDS sequence (opt5) from neuraminidase__InfluenzaA__AGE15478
augaaccccaaucagaagaucauuaccaucggcagcgugugcaugacaauugggauggccaaccugauccuccaaauuggaaauaucaucuccauuuggaucucucacagcauucagcugggcaaccagucccagaucgagacguguaaucaaucugucauuaccuacgaaaacaauacauggguuaaccagaccuaugugaauaucagcaacacaaauuucgcugccgggcaguccguggucucugugaaacuugcgggaaacagcucccugugcccuguuagcggcugggcuauuuacucuaaggacaauuccaucagaaucgggagcaaaggagauguguuugucauucgggagccguucaucucuuguagcccccucgaaugccgcaccuuuuuccugacacagggcucccuucugaacgacaagcauucuaauggcaccauuaaagauagauccccuuaucggacgcucaugagcugucccaucggggaggugccuucccccuacaacucucgcuuugaaagcguugccugguccgccagcgcuugccacgacggaauuaacuggcugaccaucggcaucucugggccugauaauggagccguggcuguccugaaguauaacggcauuaucacagacaccauuaaguccuggagaaauaacauccuccggacacaagagagcgagugugccugcgugaaugggucuuguuucaccauuaugacggauggaccgagcgacggccaggcguccuacaaaaucuuucgcaucgaaaagggcaaaauugugaagucugucgagaugaacgcccccaauuaucauuacgaagagugcagcuguuacccugauuccagcgagaucacaugcguuugcagagacaacuggcacgggucuaaucggcccuggguguccuucaaccagaaucuggaauaucagauuggauacaucuguagcggcauuuuuggggauaacccucgccccaaugacaaaaccggaucuugcggcccgguguccagcaacggggcuaauggagucaagggcuucuccuuuaaguauggcaacgggguguggaucggaagaacaaaaucuauuagcucccggaagggcuucgagaugaucugggauccuaacggguggaccggaaccgacaauuacuuuucuaucaaacaagacauuguuggcaucaacgaauggagcggguauuccggcagcuucgugcagcaucccgagcuuacaggacuggauuguauucgcccuugcuucugggucgaacucaucagaggccggcccaaggagaauacgauuuggaccucuggguccagcaucucuuuuuguggagugaaauccgacacaguuggcuggagcuggcccgauggggccgagcugccuuucaccaucgacaaguga

SEQ ID NO: 215402 - RNA, 1410 nt, Artificial Sequence
  derived and/or modified CDS sequence (opt5) from neuraminidase__InfluenzaA__AGE15479
augaaccccaaucagaagaucauuaccaucggcagcgugugcaugacaauugggauggccaaccugauccuccaaauuggaaauaucaucuccauuuggaucucucacagcauucagcugggcaaccagucccagaucgagacguguaaucaaucugucauuaccuacgaaaacaauacauggguuaaccagaccuaugugaauaucagcaacacaaauuucgcugccgggcaguccguggucucugugaaacuugcgggaaacagcucccugugcccuguuagcggcugggcuauuuacucuaaggacaauuccaucagaaucgggagcaaaggagauguguuugucauucgggagccguucaucucuuguagcccccucgaaugccgcaccuuuuuccugacacagggcucccuucugaacgacaagcauucuaauggcaccauuaaagauagauccccuuaucggacgcucaugagcugucccaucggggaggugccuucccccuacaacucucgcuuugaaagcguugccugguccgccagcgcuugccacgacggaauuaacuggcugaccaucggcaucucugggccugauaauggagccguggcuguccugaaguauaacggcauuaucacagacaccauuaaguccuggagaaauaacauccuccggacacaagagagcgagugugccugcgugaaugggucuuguuucaccauuaugacggauggaccgaucgacggccaggcgagcuacaaaaucuuucgcauugaaaagggcaaaaucgugaaguccgucgagaugaacgcccccaauuaucauuacgaagagugcucuuguuacccugauagcuccgagauuacaugcguuugcagagacaacuggcacgggagcaaucggcccugggugucuuucaaccagaaucuggaauaucagaucggauacauuuguuccggcaucuuuggggauaacccucgccccaaugacaaaaccggaagcugcggcccggugucuuccaacggggcuaauggagucaagggcuucagcuuuaaguauggcaacgggguguggauuggaagaacaaaauccaucucuagccggaagggcuucgagaugaucugggauccuaacggguggaccggaaccgacaauuacuuuuccauuaaacaagacaucguuggcauuaacgaauggucuggguauagcggcuccuucgugcagcaucccgagcuuacaggacuggauuguauccgcccuugcuucugggucgaacucauuagaggccggcccaaggagaauacgaucuggaccagcgggucuuccaucagcuuuuguggagugaacucugacacaguuggcugguccuggcccgauggggccgagcugccuuucaccauugacaaauga

SEQ ID NO: 215403 - RNA, 1410 nt, Artificial Sequence; identical to SEQ ID NO: 215230
  derived and/or modified CDS sequence (opt5) from neuraminidase__InfluenzaA__AGE15480

SEQ ID NO: 215404 - RNA, 1410 nt, Artificial Sequence; identical to SEQ ID NO: 210272
  derived and/or modified CDS sequence (opt5) from neuraminidase__InfluenzaA__AGE89270

SEQ ID NO: 215405 - RNA, 1410 nt, Artificial Sequence; identical to SEQ ID NO: 210272
  derived and/or modified CDS sequence (opt5) from neuraminidase__InfluenzaA__AGE89280

SEQ ID NO: 215406 - RNA, 1410 nt, Artificial Sequence
  derived and/or modified CDS sequence (opt5) from neuraminidase__InfluenzaA__AGE89290
augaaccccaaucagaagaucauuaccaucggcagcgugucccugacaauuucuacgaucugcuucuuuaugcaaauugccauccucaucaccacagucacccugcacuucaaacaguacgaguuuaacagcccuccgaauaaccagguuaugcuuugugaacccacaauuaucgagagaaauauuaccgaaaucguguaucugacaaacaccacgauugagaaggaaaucugcccuaaacucgcugaguaccggaauugguccaagccccagugugacauuaccggguucgccccuuuuucuaaagauaacagcauccgccuguccgcgggaggcgacaucugggugacaagagagcccuaugucucuugcgauccugacaaguguuaccaauucgcucuugggcagggaaccacacugaauaacgugcauagcaauaacaccguucgggaucgcacgccguauagaacacuccugaugaaugaacugggcgugcccuuucaccucgggaccaagcaggucugcauugccugguccucuagcuccugucaugacggaaaagccuggcugcacgugugcaucacaggcgaugacaagaacgcuaccgccagcuucauuuacaauggcaaacuuguugauucuguggucuccuggagcaaggagauccugcggacccaggaaucugagugugugugcauuaacgggacauguaucguggucaugacggacggauccgcuagcggcaaagccgauaccaagauccucuuuguugaggaagggaagauugugcauacauccacccugucuggaagcgcgcaacacguggaggaaugcuccugcuauccucgcuaccccggcgucagaugugugugccgggacaacuggaaagggagcaaucgcccuaucguugauauuaacaucaaggaccacucuauuaucuccagcuacguguguucuggacuugucggcgacacacccagaaagaaugauagcuccucuagcucccauugccuggacccgaacaaugaggaaggcgggcacggagugaagggcugggccuucgaugacgggaacgauguuuggaugggacggaccaucaaugagacgagccgccucggcuaugagacauuuaaagugauugaaggguggucuaacccuaaguccaaacugcagaucaauagacaggucauuguggaccggggaaaccgcagcggcuacucuggcaucuucuccgucgaggggaaaagcuguauuaauagaugcuuuuauguggaacugauccggggaagaaaggaggaaaccgagguucucuggaccuccaacucuauuguggucuucuguggcacaagcgggaccuacggaacaggcuccuggcccgauggggcugaccugaaucuuaugccuaucuga

SEQ ID NO: 215407 - RNA, 1410 nt, Artificial Sequence; identical to SEQ ID NO: 212329
  derived and/or modified CDS sequence (opt5) from neuraminidase__InfluenzaA__AGE89301

SEQ ID NO: 215408 - RNA, 1410 nt, Artificial Sequence
  derived and/or modified CDS sequence (opt5) from neuraminidase__InfluenzaA__AGE89311
augaaccccaaucagaagaucauuaccaucggcagcgugugcaugacaauugggauggccaaccugauccuccaaauuggaaauaucaucuccauuuggaucucucacagcauucagcugggcaaccagaaucagaucgagacguguaaccaauccgucauuaccuacgaaaauaacacauggguuaaucagaccuaugugaacaucucuaauacaaacuucgcugccgggcagagcguggucuccgugaaacuugcgggaaauucuagccugugcccuguuuccggcugggcuauuuacagcaaggacaacucuaucagaaucggguccaaaggagauguguuugucauucgggagccguucaucagcuguucuccccucgaaugccgcaccuuuuuccugacacagggcgcccuucugaaugacaagcauuccaacggcaccauuaaagauagaagcccuuaucggacgcucaugucuugucccaucggggaggugccuucccccuacaacagccgcuuugaauccguugccuggucugcuagcgccugccacgacggaauuaauuggcugaccaucggcaucuccgggccugauaacggagcuguggccguccugaaguauaauggcauuaucacagacaccauuaagagcuggaaaaacaauauccucagaacacaagagucugagugugcgugcgugaacggguccuguuucaccgugaugacggauggaccgagcgacggccaggccucuuacaagauuuuucggaucgaaaaaggcaagaucgucaaaagcguugagaugaaugcucccaacuaucauuacgaagagugcuccuguuacccugauucuagcgagauuacaugcgugugccgcgacaauuggcacggguccaacagacccugggugagcuucaaucagaaccuggaauaucggaucggauacauuuguucuggcaucuuuggggauaauccucgccccaacgacaagaccggauccugcggcccggucagcucuaauggggccaacggagugaagggcuucuccuuuaaauauggcaacgggguuuggauuggaagaacaaagagcaucuccucucggaauggcuucgagaugauuugggauccuaacggguggaccggaaccgacaauaacuuuagcaaaaagcaggacaucaucggcauuaaugaaugguccggguacucuggcagcuucgugcaacaucccgagcuuacaggacuggauuguauccgcccuugcuucugggucgaacucauuagaggccggcccaaagagaacacgaucuggaccuccgggagcucuauguccuuuuguggagugaauagcgacacaguuggcuggucuuggcccgauggggcugagcugccuuucaccauugacaaguga

SEQ ID NO: 215409 - RNA, 1410 nt, Artificial Sequence; identical to SEQ ID NO: 213859
  derived and/or modified CDS sequence (opt5) from neuraminidase__InfluenzaA__AGE89321

SEQ ID NO: 215410 - RNA, 1410 nt, Artificial Sequence; identical to SEQ ID NO: 213215
  derived and/or modified CDS sequence (opt5) from neuraminidase__InfluenzaA__AGE89332

SEQ ID NO: 215411 - RNA, 1410 nt, Artificial Sequence; identical to SEQ ID NO: 212329
  derived and/or modified CDS sequence (opt5) from neuraminidase__InfluenzaA__AGE89343

SEQ ID NO: 215412 - RNA, 1410 nt, Artificial Sequence
  derived and/or modified CDS sequence (opt5) from neuraminidase__InfluenzaA__AGE89353
augaaccccaaucagaagaucauuaccaucggcagcgugucccugacaauuucuacgaucugcuucuuuaugcaaauugccauccucaucaccacagucacccugcacuucaaacaguacgaguuuaacagcccuccgaauaaccagguuaugcuuugugaacccacaauuaucgagagaaauauuaccgaaaucguguaucugacaaacauuaccaucgagaaggaaauuugcccuaaacucgcugaguaccggaauugguccaagccccagugugacaucacgggguucgccccuuuuucuaaagauaacagcauccgccuguccgcgggaggcgacauuugggugaccagagagcccuaugucucuugcgauccugacaaguguuaccaauucgcucuugggcagggaacaacccugaauaacgugcauagcaauaacacaguucgggaucgcaccccguauagaacgcuccugaugaaugaacugggcgugcccuuucaccucgggacaaagcaggucugcaucgccugguccagcagcuccugucaugacggaaaagccuggcugcacgugugcauuaccggcgaugacaagaacgcuacagccagcuucaucuacaauggccggcuuguugauucuguggucuccuggagcaaagagauucugcgcacccaggaaucugagugugugugcaucaacgggaccuguacaguggucaugacggacggauccgcuagcggcaaggccgauaccaaaauccucuuuauugaggaagggaagaucguucauacauccacccugucuggaagcgcgcaacacguggaggaaugcuccugcuauccuagauaccccggcgugcggugugucugccgcgacaacuggaaggggagcaauagaccuauuguggauaucaacauuaaagaccacucuaucguuuccagcuacguguguucuggacuugucggcgacacaccccggaagaaugauagcuccucuagcucccauugccuggacccgaacaaugaggaaggcgggcacggagugaaaggcugggccuucgaugacgggaacgauguuuggaugggacgcaccaucaaugagacgagcagacucggcuaugagacauuuaaggugauugaaggguggucuaacccuaaauccaagcugcagaucaaucggcaggucauuguggacaaaggaaaccgcagcggcuacucuggcaucuucuccgucgaggggaagucuuguauuaauagaugcuuuuauguggaacugauccggggaagaaaggaggaaaccgagguucucuggaccuccaacucuauuguggucuucuguggcacaagcgggaccuacggaacaggcuccuggcccgauggggcugaccugaaucuuaugccuaucuga

SEQ ID NO: 215413 - RNA, 1410 nt, Artificial Sequence; identical to SEQ ID NO: 213066
  derived and/or modified CDS sequence (opt5) from neuraminidase__InfluenzaA__AGE89364

SEQ ID NO: 215414 - RNA, 1410 nt, Artificial Sequence; identical to SEQ ID NO: 213859
  derived and/or modified CDS sequence (opt5) from neuraminidase__InfluenzaA__AGE89374

SEQ ID NO: 215415 - RNA, 1410 nt, Artificial Sequence
  derived and/or modified CDS sequence (opt5) from neuraminidase__InfluenzaA__AGE89385
augaaccccaaucagaagaucauuaccaucggcagcgugugcaugacaauugggauggccaaccugauccuccaaauuggaaauaucaucuccauuuggaucucucacagcauucagcugggcaaccagaaucagaucgagacguguaaccaauccgucauuaccuacgaaaauaacacauggguuaaucagaccuaugugaacaucucuaauacaaacuucgcugccgggcagagcguggcguccgucaaacuugcuggaaauucuagccugugcccuguguccggcugggccauuuacagcaaggacaacucuaucagaaucggguccaaaggagauguuuuugugauucgggagccguucaucagcuguucuccccucgaaugccgcaccuuuuuccugacacagggcgcccuucugaaugacaagcauuccaacggcaccauuaaagauagaagcccuuaucggacgcucaugucuugucccaucggggaggucccuucccccuacaacagccgcuuugaauccguggcuuggucugccagcgcuugccacgacggaauuaauuggcugaccaucggcaucuccgggccugauaacggagccguugcggugcugaaguauaauggcauuaucacagacaccauuaagagcuggagaaacaauauccuccggacacaagagucugagugugccugcgucaacggguccuguuucaccauuaugacggauggaccgagcgacggccaggcuucuuacaaaaucuuucgcaucgaaaagggcaaaauugucaagagcguggagaugaaugcccccaacuaucauuacgaagagugcuccuguuacccugauucuagcgagaucacaugcgugugcagagacaauuggcacggguccaaccggcccuggguuagcuucaaucagaaccuggaauaucagauuggauacaucuguucuggcauuuuuggggauaauccucgccccaacgacaaaaccggauccugcggcccggugagcucuaauggggcuaacggagugaagggcuucuccuuuaaguauggcaacggggucuggaucggaagaacaaaaagcauuuccucucggaagggcuucgagaugaucugggauccuaauggguggaccggaaccgacaacaauuuuagcaucaaacaagacauugugggcaucaacgaaugguccggguacucuggcagcuucguucagcaucccgagcuuacaggacuggauuguauucgcccuugcuucuggguggaacucaucagaggccggcccaaggagaauacgauuuggaccuccgggagcucuaucuccuuuuguggagucaacagcgacacagugggcuggucuuggcccgauggggccgagcugccuuucaccaucgacaaauga

SEQ ID NO: 215416 - RNA, 1410 nt, Artificial Sequence
  derived and/or modified CDS sequence (opt5) from neuraminidase__InfluenzaA__AGE89395
augaaccccaaucagaagaucauuaccaucggcagcgugucccugacaauuucuacgaucugcuucuuuaugcaaauugccauccucaucaccacagucacccugcacuucaaacaguacgaguuuaacagcccuccgaauaaccagguuaugcuuugugaacccacaauuaucgagagaaauauuaccgaaaucguguaucugacaaacaccacgauugagaaggaaaucugcccuaaacccgcugaguaccggaauugguccaagccucagugugacauuaccggguucgcccccuuuucuaaagauaacagcauccgccucuccgcgggaggcgacaucugggugacaagagagccuuaugucucuugcgauccggacaaguguuaccaauucgcucuggggcagggaaccacacuuaauaacgugcauagcaauaacaccguucgggaucgcacgcccuauagaacacugcucaugaaugaacugggcgugccuuuucaccuggggaccaagcaggucugcauugccugguccucuagcuccugucaugacggaaaagccuggcuccacgugugcaucacaggcgaugacaagaacgcuaccgccagcuucauuuacaauggccggcugguugauucuguggucuccuggagcaaagagauccuucgcacccaggaaucugagugugugugcauuaacgggacauguacgguggucaugaccgacggauccgcuagcggcaaggccgauacaaaaauccuguuuaucgaggaagggaagauuguucauaccuccacacucucuggaagcgcgcaacacguggaggaaugcuccugcuaucccagauacccuggcgugcggugugucugccgcgacaacuggaaggggagcaauagacccaucguggauauuaacaucaaagaccacucuauuguuuccagcuacguguguucuggacuggucggcgacaccccgcggaagaaugauagcuccucuagcucccauugccuugacccuaacaaugaggaaggcgggcacggagugaaaggcugggccuucgaugacgggaacgauguuuggaugggacgcacgaucaaugagacaagcagacugggcuaugagaccuuuaaggugaucgaaggguggucuaaccccaaauccaagcuccagauuaaucggcaggucaucguggaccgcggaaacagaagcggcuacucuggcauuuucuccgucgaggggaaaagcuguaucaaucggugcuuuuauguggaacugauuagaggacgcaaggaggaaaccgagguucuguggacauccaacucuaucguggucuucuguggcaccagcgggacauacggaacgggcuccuggccugauggggcugaccucaaucugaugcccauuuga

SEQ ID NO: 215417 - RNA, 1410 nt, Artificial Sequence; identical to SEQ ID NO: 210272
  derived and/or modified CDS sequence (opt5) from neuraminidase__InfluenzaA__AGE89425

SEQ ID NO: 215418 - RNA, 1410 nt, Artificial Sequence; identical to SEQ ID NO: 211590
  derived and/or modified CDS sequence (opt5) from neuraminidase__InfluenzaA__AGE89722

SEQ ID NO: 215419 - RNA, 1410 nt, Artificial Sequence
  derived and/or modified CDS sequence (opt5) from neuraminidase__InfluenzaA__AGE89733
augaaccccaaucagaagaucauuaccaucggcagcgugugcaugacaauugggauggccaaccugauccuccaaauuggaaauaucaucuccauuuggaucucucacagcauucagcugggcaaccagaaucagaucgagacguguaaccaauccgucauuaccuacgaaaauaacacauggguuaaucagaccuaugugaacaucucuaauacaaacuucgcugccgggcagagcguggucuccgugaaacuugcgggaaauucuagccugugcccuguuuccggcugggcuauuuacagcaaggacaacucuaucagaaucggguccaaaggagauguguuugucauucgggagccguucaucagcuguucuccccucgaaugccgcaccuuuuuccugacacagggcgcccuucugaaugacaagcauuccaacggcaccauuaaagauagaagcccuuaucggacgcucaugucuugucccaucggggaggugccuucccccuacaacagccgcuuugaauccguugccuggucugcuagcgccugccacgacggaauuaauuggcugaccaucggcaucuccgggccugauaacggagcuguggccguccugaaguauaauggcauuaucacagacaccauuaagagcuggagaaacaauauccuccggacacaagagucugagugugcgugcgugaacggguccuguuucaccauuaugacggauggaccgaaugacggccaggccagcuacaaaaucuuucgcaucgaaaagggcaaaauugugaagucugucgagaugaacgcucccaauuaucauuacgaagagugcagcuguuacccugauuccucugagaucacaugcguuugcagagacaacuggcacgggagcaaucggcccuggguguccuucaaccagaaucuggaauaucagauuggauacaucuguagcggcauuuuuggggauaacccucgccccaaugacaaaaccggaucuugcggcccgguguccagcaacggggccaacggagucaagggcuucucuuuuaaguauggcaaugggguguggaucggaagaacaaaauccauuagcucccggaagggcuucgagaugaucugggauccuaacggguggaccggaaccgacaauaacuuuucuaucaaacaagacauuguuggcaucaaugaauggagcggguacuccggcucuuucgugcagcaucccgagcuuacaggacuggauuguauucgcccuugcuucugggucgaacucaucagaggccggcccaaggagaacacgauuuggaccagcggguccagcaucucuuuuuguggaguuaauuccgacacagugggcuggagcuggcccgauggggcugagcugccuuucaccaucgacaaauga

SEQ ID NO: 215420 - RNA, 1410 nt, Artificial Sequence
  derived and/or modified CDS sequence (opt5) from neuraminidase__InfluenzaA__AGE89743
augaaccccaaucagaagaucauuaccaucggcagcgugucccugacaauuucuacgaucugcuucuuuaugcaaauugccauccucaucaccacagucacccugcacuucaaacaguacgaguuuaacagcccuccgaauaaccagguuaugcuuugugaacccacaauuaucgagagaaauauuaccgaaaucguguaucugacaaacaccacgauugagaaggaaaucugcccuaaacucgcugaguaccggaauugguccaagccccagugugacauuaccggguucgccccuuuuucuaaagauaacagcauccgccuguccgcgggaggcgacaucugggugacaagagagcccuaugucucuugcgauccugacaaguguuaccaauucgcucuugggcagggaaccacacugaauaacgugcauagcaauaacaccguucgggaucgcacgccguauagaacacuccugaugaaugaacugggcgugcccuuucaccucgggaccaagcaggucugcauugccugguccucuagcuccugucaugacggaaaagccuggcugcacgugugcaucacaggcgaugacaagaacgcuaccgccagcuucauuuacaauggccggcuuguugauucuguggucuccuggagcaaagagauccugcgcacccaggaaucugagugugugugcauuaacgggacauguacgguggucaugaccgacggauccgcuagcggcaaggccgauacaaaaauccucuuuaucgaggaagggaagauuguucauaccuccacacugucuggaagcgcgcaacacguggaggaaugcuccugcuauccuagauaccccggcgugcggugugucugccgcgacaacuggaaggggagcaauagaccuaucguggauauuaacaucaaagaccacucuauuguuuccagcuacguguguucuggacuugucggcgacacgccccggaagaaugauagcuccucuagcucccauugccuggacccgaacaaugaggaaggcgggcacggagugaaaggcugggccuucgaugacgggaacgauguuuggaugggacgcaccaucaaugagacaagcagacucggcuaugagaccuuuaaggugaucgaaggguggucuaacccuaaauccaagcugcagauuaaucggcaggucaucguggacaaagauaaccgcagcggauacucuggcauuuucuccgucgagggcaagagcuguaucaauagaugcuuuuauguggaacugauucgggggagaaaggaggaaaccgagguucucuggacauccaacucuaucguggucuucuguggaaccagcggcacauacgggacgggauccuggcccgacggcgcugaucugaaucuuaugccuauuuga

SEQ ID NO: 215421 - RNA, 1410 nt, Artificial Sequence; identical to SEQ ID NO: 213859
  derived and/or modified CDS sequence (opt5) from neuraminidase__InfluenzaA__AGE89754

SEQ ID NO: 215422 - RNA, 1410 nt, Artificial Sequence; identical to SEQ ID NO: 213859
  derived and/or modified CDS sequence (opt5) from neuraminidase__InfluenzaA__AGE89765

SEQ ID NO: 215423 - RNA, 1410 nt, Artificial Sequence
  derived and/or modified CDS sequence (opt5) from neuraminidase__InfluenzaA__AGG13414
augaaccccaaucagaagaucauuaccaucggcagcgugucccugacaauuucuacgaucugcuucuuuaugcaaauugccauccucaucaccacagucacccugcacuucaaacaguacgaguuuaacagcccuccgaauaaccagguuaugcuuugugaacccacaauuaucgagagaaauauuaccgaaaucguguaucugacaaacaccacgauugagaaggaaaucugcccuaaacccgcugaguaccggaauugguccaagccucagugugacauuaccggguucgcccccuuuucuaaagauaacagcauccgccucuccgcgggaggcgacaucugggugacaagagagccuuaugucucuugcgauccggacaaguguuaccaauucgcucuggggcagggaaccacacuuaauagcgugcauuccaacaauaccguucgggaucgcacgcccuauagaacacugcucaugaacgaacugggcgugccuuuucaccuggggaccaagcaggucugcauugccuggagcagcuccagcugucaugacggaaaagccuggcuccacgugugcaucacaggcgaugacaagaaugcuaccgccucuuucauuuacaacggccggcugguugauuccguggucagcuggucuaaagagauccuucgcacccaggaauccgagugugugugcauuaaugggacauguacgguggucaugaccgacggaagcgcuuccggcaaggccgauacaaaaauccuguuuaucgaggaagggaagauuguucauaccucuacacucagcggauccgcgcaacacguggaggaaugcagcugcuaucccagauacccuggcgugcggugugucugccgcgacaacuggaaggggucuaacagacccaucguggauauuaauaucaaagaccacuccauuguuagccgguacguguguucuggacuggucggcgacaccccgcgcaagaacgauagcuccucuagcucccauugccuugacccuaauaacgaggaaggcgggcacggagugaaaggcugggccuucgaugacgggaaugauguuuggaugggaagaacgaucaacgagacaagccggcugggcuaugagaccuuuaaggugaucgaaggguggucuaaucccaaauccaagcuccagauuaacaaacaggucaucguggaccgcggagauagaagcggcuacucuggcauuuucuccgucgaggggaagucuuguaucaaucggugcuuuuauguggaacugauuagaggacgcaaggaggaaaccgagguucuguggacauccaacucuaucguggucuucuguggcaccagcgggacauacggaacgggcuccuggccugacggggcugaucucaaucugaugcccauuuga

SEQ ID NO: 215424 - RNA, 1410 nt, Artificial Sequence; identical to SEQ ID NO: 214218
  derived and/or modified CDS sequence (opt5) from neuraminidase__InfluenzaA__AGG13426

SEQ ID NO: 215425 - RNA, 1410 nt, Artificial Sequence; identical to SEQ ID NO: 214218
  derived and/or modified CDS sequence (opt5) from neuraminidase__InfluenzaA__AGG13438

SEQ ID NO: 215426 - RNA, 1410 nt, Artificial Sequence
  derived and/or modified CDS sequence (opt5) from neuraminidase__InfluenzaA__AGG13498
augaaccccaaucagaagaucauuaccaucggcagcgugucccugacaauuucuacgaucugcuucuuuaugcaaauugccauccucaucaccacagucacccugcacuucaaacaguacgaguuuaacagcccuccgaauaaccagguuaugcuuugugaacccacaauuaucgagagaaauauuaccgaaaucguguaucugacaaacaccacgauugagaaggaaaucugcccuaaacucgcugaguaccggaauugguccaagccccagugugacauuaccggguucgccccuuuuucuaaagauaacagcauccgccuguccgcgggaggcgacaucugggugacaagagagcccuaugucucuugcgauccugacaaguguuaccaauucgcucuugggcagggaaccacacugaauaacgugcauagcaauaacaccguucgggaucgcacgccguauagaacacuccugaugaaugaacugggcgugcccuuucaccucgggaccaagcaggucugcauugccugguccucuagcuccugucaugacggaaaagccuggcugcacgugugcaucacaggcgaugacaagaacgcuaccgccagcuucauuuacaauggccggcuuguugauucuguggucuccuggagcaaagacauccugcgcacccaggagucugaaugugugugcauuaacgggacaugugcuguggucaugacggauggauccgccagcggcaaggcggacaccaaaauccucuuuaucgaggaggggaagauuguucauacauccacccugucuggaagcgcccaacacguggaagagugcuccugcuauccuagauaccccggcgugcggugugucugccgcgauaacuggaaggggagcaauagaccuaucguggacauuaacaucaaagaccacucuauuguuuccagcuacguguguucuggacuugucggcgauacaccccggaagaaugacagcuccucuagcggccauugccuggauccgaacaaugaagagggaggacacggcgugaaagggugggcuuucgacgauggaaacgacguuuggaugggccgcaccaucaaugaaacguccagacucggguaugagacauuuaaggugaucgagggauggagcaacccuaaaucuaagcugcagauuaaucggcaggucaucguggaucgcggcaacagauccggcuacagcgggauuuucucugucgaagggaaaaauuguaucaaccggugcuuuuauguggagcugauuagaggccgcaaggaagagaccgaaguucucuggaccuccaauagcaucguggucuucugugggacauccggaaccuacggcacagggucuuggcccgacggcgccgaucugaaccuuaugccuauuuga

SEQ ID NO: 215427 - RNA, 1410 nt, Artificial Sequence; identical to SEQ ID NO: 214218
  derived and/or modified CDS sequence (opt5) from neuraminidase__InfluenzaA__AGG13510

SEQ ID NO: 215428 - RNA, 1410 nt, Artificial Sequence; identical to SEQ ID NO: 215426
  derived and/or modified CDS sequence (opt5) from neuraminidase__InfluenzaA__AGG13522

SEQ ID NO: 215429 - RNA, 1410 nt, Artificial Sequence
  derived and/or modified CDS sequence (opt5) from neuraminidase__InfluenzaA__AGG13534
augaaccccaaucagaagaucauuaccaucggcagcgugucccugacaauuucuacggucugcuucuuuaugcaaaucgccauucucaucaccacaguuacccugcacuucaaacaguacgaguuuaacagcccuccgaauaaccaggugaugcuuugugaacccacaaucauugagagaaauaucaccgaaauuguguaucugacaaacaccacgaucgagaaggaaauuugcccuaaacccgcugaguaccggaauugguccaagccucagugugggaucaccggauucgcccccuuuucuaaagacaacagcauucgccucuccgcgggcggggauaucugggucacaagagagccuuaugugucuugcgacccggauaaguguuaccaauucgcucugggacagggcaccacacuuaauaacguucauagcaauaacaccgugcgggaccgcacgcccuauagaacacugcucaugaaugaacugggggucccuuuucaccugggaaccaaacaggugugcaucgccugguccucuagcuccugucaugauggcaaggccuggcuccacguuugcauuacaggcgacgauaagaacgcuaccgccagcuucaucuacaaugggcggcugguggacucugucguguccuggagcaaagagauucuucgcacccaggaaucugagugugugugcaucaacggaacauguacggucguuaugaccgauggcuccgcuagcgggaaggccgacacaaaaauucuguuuaucgaggaaggaaagaucgugcauaccuccacacucucuggcagcgcgcaacacguggaggaaugcuccugcuaucccagauacccugggguccggugugugugccgcgauaacuggaagggaagcaauagacccauuguugacaucaacauuaaagaucacucuaucguguccagcuacgucuguucuggccuggugggcgacaccccgcggaagaaugacagcuccucuagcucccauugccuugauccuaacaaugaggaagggggacacggcguuaaagggugggccuucgacgauggaaacgacguguggaugggccgcacgauuaaugagacaagcagacugggguaugagaccuuuaaggucaucgaaggauggucuaaccccaaauccaagcuccagaucaaucgccaggugauugucgaucggggcgacagaagcggcuacucugggaucuucuccguggagggaaaaagcuguauuaaccggugcuuuuauguugaacugaucagaggccgcaaggaggaaaccgaggugcuguggacauccaauucuauugucguguucugugggaccagcggaacauacggcacgggguccuggccugauggcgcugaccucaaccugaugcccaucuga

SEQ ID NO: 215430 - RNA, 1410 nt, Artificial Sequence
  derived and/or modified CDS sequence (opt5) from neuraminidase__InfluenzaA__AGG13546
augaaccccaaucagaagaucauuaccaucggcagcgugucccugacaauuucuacgaucugcuucuuuaugcaaauugccauccucaucaccacagucacccugcacuucaaacaguacgaguuuaacagcccuccgaauaaccagguuaugcuuugugaacccacaauuaucgagagaaauauuaccgaaaucguguaucugacaaacaccacgauugagaaggaaaucugcccuaaacccgcugaguaccggaauugguccaagccucagugugggauuaccggauucgcccccuuuucuaaagacaacagcauccgccucuccgcgggcggggauaucugggugacaagagagccuuaugucucuugcgacccggauaaguguuaccaauucgcucugggacagggcaccacacuuaauaacgugcauagcaauaacaccguucgggaccgcacgcccuauagaacacugcucaugaaugaacugggggugccuuuucaccugggaaccaagcaggucugcauugccugguccucuagcuccugucaugauggcaaagccuggcuccacgugugcaucacaggcgacgauaagaacgcuaccgccagcuucauuuacaaugggcggcugguugacucuguggucuccuggagcaaagagauccuucgcacccaggaaucugagugugugugcauuaacggaacauguacgguggucaugaccgauggcuccgcuagcgggaaggccgacacaaaaauccuguuuaucgaggaaggaaagauuguucauaccuccacacucucuggcagcgcgcaacacguggaggaaugcuccugcuaucccagauacccuggggugcggugugucugccgcgauaacuggagaggaagcaaucggcccaucguggacauuaacaucaaggaucacucuauuguuuccagcuacguguguucuggccuggucggcgacaccccgcgcaaaaaugacagcuccucuagcucccauugccuugauccuaacaaugaggaagggggacacggcgugaaggggugggccuucgacgauggaaacgacguuuggaugggcagaacgaucaaugagacaagccggcugggguaugagaccuuuaaagugaucgaaggauggucuaaccccaaguccaaacuccagauuaaucgccaggucaucguggauagaagcgaccggucuggcuacuccggcauuuucagcgucgaggggaaguccuguaucaacagaugcuuuuauguggaacugauucgcggacggaaagaggaaaccgagguucuguggacaucuaauagcaucguggucuucuguggcaccuccgggacauacggaacgggcucuuggccugauggggcugaccucaaccugaugcccauuuga

SEQ ID NO: 215431 - RNA, 1410 nt, Artificial Sequence; identical to SEQ ID NO: 214218
  derived and/or modified CDS sequence (opt5) from neuraminidase__InfluenzaA__AGG13558

SEQ ID NO: 215432 - RNA, 1410 nt, Artificial Sequence; identical to SEQ ID NO: 214218
  derived and/or modified CDS sequence (opt5) from neuraminidase__InfluenzaA__AGG13570

SEQ ID NO: 215433 - RNA, 1410 nt, Artificial Sequence
  derived and/or modified CDS sequence (opt5) from neuraminidase__InfluenzaA__AGG13582
augaaccccaaucagaagaucauuaccaucggcagcgugucccugacaauuucuacgaucugcuucuuuaugcaaauugccauccucaucaccacagucacccugcacuucaaacaguacgaguuuaacagcccuccgaauaaccagguuaugcuuugugaacccacaauuaucgagagaaauauuaccgaaaucguguaucugacaaacaccacgauugagaaggaaaucugcccuaaacccgcugaguaccggaauugguccaagccucagugugggauuaccggauucgcccccuuuucuaaagacaacagcauccgccucuccgcgggcggggauaucugggugacaagagagccuuaugucucuugcgacccggauaaguguuaccaauucgcucugggacagggcaccacacuuaauaacgugcauagcaauaacaccguucgggaccgcacgcccuauagaacacugcucaugaaugaacugggggugccuuuucaccugggaaccaagcaggucugcauugccugguccucuagcuccugucaugauggcaaagccuggcuccacgugugcaucacaggcgaggacaagaacgcuaccgccagcuucauuuacaaugggcggcugguugauucuguggucuccuggagcaaagaaacccuucgcacacaggagucugagugugugugcaucaacggaacguguaccguggucaugacagacggcuccgcuagcgggaaggccgauaccaaaauucuguuuaucgaagagggaaagaucguucauacauccacccucucuggcagcgcgcaacacguggaagagugcuccugcuaucccagauacccuggggugcggugugucugccgcgacaacuggaagggaagcaauagacccauuguggauaucaacauuaaagaccacucuaucguuuccagcuacguguguucuggccuggucggcgauacgccgcggaagaaugacagcuccucuagcucccauugccuugacccuaacaaugaagaagggggacacggcgugaaagggugggccuucgaugacggaaacgauguuuggaugggccgcacaauuaaugagaccagcagacugggguaugagaccuuuaaggugaucgagggauggucuaaccccaaauccaagcuccagaucaaucggcaggucauuguggaccgcggcgauagaagcggcuacucugggaucuucuccgucgaaggaaaaagcuguauuaaccggugcuuuuauguggagcugaucagaggccgcaaggaagagacagagguucuguggaccuccaauucuauuguggucuucugugggacaagcggaacguacggcaccggguccuggccugacggcgcugaucucaaccugaugcccaucuga

SEQ ID NO: 215434 - RNA, 1410 nt, Artificial Sequence; identical to SEQ ID NO: 214218
  derived and/or modified CDS sequence (opt5) from neuraminidase__InfluenzaA__AGG13606

SEQ ID NO: 215435 - RNA, 1410 nt, Artificial Sequence
  derived and/or modified CDS sequence (opt5) from neuraminidase__InfluenzaA__AGG13618
augaaccccaaucagaagaucauuaccaucggcagcgugucccugacaauuucuacgaucugcuucuuuaugcaaauugccauccucaucaccacagucacccugcacuucaaacaguacgaguuuaacagcccuccgaauaaccagguuaugcuuugugaacccacaauuaucgagagaaauauuaccgaaaucguguaucugacaaacaccacgauugagaaggaaaucugcccuaaacccgcugaguaccggaauugguccaagccucagugugggauuaccggauucgcccccuuuucuaaagacaacagcauccgccucuccgcgggcggggauaucugggugacaagagagccuuaugucucuugcgacccggauaaguguuaccaauucgcucugggacagggcaccacacuuaauaacgugcauagcaauaacaccguucgggaccgcacgcccuauagaacacugcucaugaaugaacugggggugccuuuucaccugggaaccaagcaggucugcauugccugguccucuagcuccugucaugauggcaaagccuggcuccacgugugcaucacaggcgacgauaagaacgcuaccgccagcuucauuuacaaugggcggcugguugacucuguggucuccuggagcaaagagauccuucgcacccaggaaucugagugugugugcauuaacggaacauguacgguggucaugaccgauggcuccgcuagcgggaaggccgacacaaaaauccuguuuaucgaggaaggaaagauuguucauaccuccacacucucuggcagcgcgcaacacguggaggaaugcuccugcuaucccagauacccuggggugcggugugucugccgcgauaacuggaagggaagcaauagacccaucguggacauuaacaucaaagaucacucuauuguuuccagcuaccuguguucuggccuugugggcgacaccccgcggaagaaugacgggagcuccucuagccauugccuggauccuaacaaugaggaaggaggccacggggucaaaggaugggccuucgacgauggcaacgacguguggauggggcgcacgaucaaugagacauccagacucggauaugagaccuuuaagguuaucgaaggcuggagcaaccccaaaucuaagcugcagauuaaucggcagaucauuguggaucgcggcgacagauccggguacagcggaaucuucucugucgagggcaaauccuguauuaaccggugcuuuuauguggaacugaucagagggcgcaaggaggaaaccgagguccucuggacaagcaauuccauugugguuuucuguggaaccucuggcacauacgggacgggcagcuggccugauggagcugaccugaaccuuaugcccaucuga

SEQ ID NO: 215436 - RNA, 1410 nt, Artificial Sequence
  derived and/or modified CDS sequence (opt5) from neuraminidase__InfluenzaA__AGG13630
augaaccccaaucagaagaucauuaccaucggcagcgugucccugacaauuucuacgaucugcuucuuuaugcaaauugccauccucaucaccacagucacccugcacuucaaacaguacgaguuuaacagcccuccgaauaaccagguuaugcuuugugaacccacaauuaucgagagaaauauuaccgaaaucguguaucugacaaacaccacgauugagaaggaaaucugcccuaaacccgcugaguaccggaauugguccaagccucagugugggauuaccggauucgcccccuuuucuaaagacaacagcauccgccucuccgcgggcggggauaucugggugacaagagagccuuaugucucuugcgacccggauaaguguuaccaauucgcucugggacagggcaccacacuuaauaacgugcauagcaauaacaccguucgggaccgcacgcccuauagaacacugcucaugaaugaacugggggugccuuuucaccugggaaccaagcaggucugcauugccugguccucuagcuccugucaugauggcaaagccuggcuccacgugugcaucacaggcgaggacaagaacgcuaccgccagcuucauuuacaaugggcggcugguugauucuguggucuccuggagcaaagaaauccuucgcacccaggagucugagugugugugcauuaacggaacauguacgguggucaugaccgacggcuccgcuagcgggaaggccgauacaaaaauccuguuuaucgaagagggaaagauuguucauaccuccacacucucuggcagcgcgcaacacguggaagagugcuccugcuaucccagauacccuggggugcggugugucugccgcgacaacuggaagggaagcaauagacccaucguggauauuaacaucaaagaccacucuauuguuuccagcuacguguguucuggccuggucggcgauaccccgcggaagaaugacagcuccucuagcucccauugccuugacccuaacaaugaagaagggggacacggcgugaaagggugggccuucgaugacggaaacgauguuuggaugggccgcacgaucaaugagacaagcagacugggguaugagaccuuuaaggugaucgagggauggucuaaccccaaauccaagcuccagauuaaucggcaggucaucguggaccgcggcgauagaagcggcuacucugggauuuucuccgucgaaggaaaaagcuguaucaaccggugcuuuuauguggagcugauuagaggccgcaaggaagagaccgagguucuguggacauccaauucuaucguggucuucugugggaccagcggaacauacggcacgggguccuggccugacggcgcugaucucaaccugaugcccauuuga

SEQ ID NO: 215437 - RNA, 1410 nt, Artificial Sequence; identical to SEQ ID NO: 214218
  derived and/or modified CDS sequence (opt5) from neuraminidase__InfluenzaA__AGG13642

SEQ ID NO: 215438 - RNA, 1410 nt, Artificial Sequence
  derived and/or modified CDS sequence (opt5) from neuraminidase__InfluenzaA__AGG13654
augaaccccaaucagaagaucauuaccaucggcagcgugucccugacaauuucuacgaucugcuucuuuaugcaaauugccauccucaucaccacagucacccugcacuucaaacaguacgaguuuaacagcccuccgaauaaccagguuaugcuuugugaacccacaauuaucgagagaaauauuaccgaaaucguguaucugacaaacaccacgauugagaaggaaaucugcccuaaacucgcugaguaccggaauugguccaagccccagugugacauuaccggguucgccccuuuuucuaaagauaacagcauccgccuguccgcgggaggcgacaucugggugacaagagagcccuaugucucuugcgauccugacaaguguuaccaauucgcucuugggcagggaaccacacugaauaacgugcauagcaauaacaccguucgggaucgcacgccguauagaacacuccugaugaaugaacugggcgugcccuuucaccucgggaccaagcaggucugcauugccugguccucuagcuccugucaugacggaaaagccuggcugcacgugugcaucacaggcgaugacaagaacgcuaccgccagcuucauuuacaauggccggcuuguugauucuguggucuccuggagcaaagacauccugcgcacccaggagucugaaugugugugcauuaacgggacaugugcuguggucaugacggauggauccgccagcggcaaggcggacaccaaaauccucuuuaucgaggaggggaagauuguucaaacauccacccugucuggaagcgcccagcauguggaagagugcuccugcuauccuagauaccccggcgugcggugugucugccgcgauaacuggaaggggagcaauagaccuaucguggacauuaacaucaaagaccacucuauuguuuccagcuacguguguucuggacuugucggcgauacaccccggaagaaugacagcuccucuagcggccacugccuggauccgaacaaugaagagggaggacauggcgugaaagggugggcuuucgacgauggaaacgacguuuggaugggccgcaccaucaaugaaacguccagacucggguaugagacauuuaaggugaucgagggauggagcaacccuaaaucuaagcugcagauuaaucggcaggucaucguggaucgcggcaacagauccggcuacagcgggauuuucucugucgaagggaaaaauuguaucaaccggugcuuuuauguggagcugauuagaggccgcaaggaagagaucgaaguucucuggaccuccaauagcauuguggucuucugugggaccuccggaacauacggcaccgggucuuggcccgacggcgccgaucugaaccuuaugccuaucuga

SEQ ID NO: 215439 - RNA, 1410 nt, Artificial Sequence; identical to SEQ ID NO: 215429
  derived and/or modified CDS sequence (opt5) from neuraminidase__InfluenzaA__AGG13666

SEQ ID NO: 215440 - RNA, 1410 nt, Artificial Sequence
  derived and/or modified CDS sequence (opt5) from neuraminidase__InfluenzaA__AGG13678
augaaccccaaucagaagaucauuaccaucggcagcgugucccugacaauuucuacgaucugcuucuuuaugcaaauugccauccucaucaccacagucacccugcacuucaaacaguacgaguuuaacagcccuccgaauaaccagguuaugcuuugugaacccacaauuaucgagagaaauauuaccgaaaucguguaucugacaaacaccacgauugagaaggaaaucugcccuaaacccgcugaguaccggaauugguccaagccucagugugggauuaccggauucgcgccccucucuaaagacaacagcauccgccuguccgccggcggggauaucugggugacaagagagccuuaugucucuugcgacccggauaaguguuaccaauuugcucuuggacagggcaccacacugaauaacgugcauagcaauaacaccguucgggaccgcacgcccuauagaacacuccugaugaaugaacugggggugccuuuccaccucggaaccaagcaggucugcauugccugguccuccucuuccugucaugauggcaaagccuggcugcacgugugcaucacaggcgacgauaagaacgcuaccgccagcuuuauuuacaaugggcggcuuguugacucuguggucuccuggagcaaagagauccugcgcacccaggaaucugagugugugugcauuaacggaacauguacgguggucaugaccgauggcuccgcuagcgggaaggccgacacaaaaauccucuucaucgaggaaggaaagauuguucauaccuccacacugucuggcagcgcgcaacacguggaggaaugcuccugcuaucccagauacccuggggugcggugugucugccgcgauaacuggaagggaagcaauagacccaucguggacauuaacaucaaagaucacucuauuguuuccagcuacguguguucuggccuugucggcgacaccccgcggaagaaugacagcuccucuagcucccauugccuggggccuaacaaugaggaaggaggccacggggugaaaggaugggccuuugaugacggcaacgauguuuggauggggcgcacgaucaaugagacaagcagacucggauaugagaccuucaaggugaucgaaggcuggucuaaccccaaauccaagcugcagauuaaucggcaggucaucguggaccgcggcgauagaagcggguacucuggaauuuuuagcgucgagggcaaaagcuguaucaaccggugcuucuauguggaacugauuagagggcgcaaggaggaaaccgagguucucuggacauccaauucuaucguggucuuuuguggaaccgcuggcacauacgggacgggcagcuggccugacggagccgaucugaaccuuaugcccauuuga

SEQ ID NO: 215441 - RNA, 1410 nt, Artificial Sequence; identical to SEQ ID NO: 214218
  derived and/or modified CDS sequence (opt5) from neuraminidase__InfluenzaA__AGG13690

SEQ ID NO: 215442 - RNA, 1410 nt, Artificial Sequence
  derived and/or modified CDS sequence (opt5) from neuraminidase__InfluenzaA__AGG13702
augaaccccaaucagaagaucauuaccaucggcagcgugucccugacaauuucuacgaucugcuucuuuaugcaaauugccauccucaucaccacagucacccugcacuucaaacaguacgaguuuaacagcccuccgaauaaccagguuaugcuuugugaacccacaauuaucgagagaaauauuaccgaaaucguguaucugacaaacaccacgauugagaaggaaaucugcccuaaacccgcugaguaccggaauugguccaagccucagugugacauuaccggguucgcccccuuuucuaaagauaacagcauccgccucuccgcgggaggcgacaucugggugacaagagagccuuaugucucuugcgauccggacaaguguuaccaauucgcucuggggcagggaaccacacuuaauaacgugcauagcaauaacaccguucgggaucgcacgcccuauagaacacugcucaugaaugaacugggcgugccuuuucaccuggggaccaagcaggucugcauugccugguccucuagcuccugucaugacggaaaagccuggcuccacgugugcaucacaggcgaugacaagaacgcuaccgccagcuucauuuacaauggccggcugguugauucuguggucuccuggagcaaagagauccuucgcacccaggaaucugagugugugugcauuaacgggacauguacgguggucaugaccgacggauccgcuagcggcaaggccgauacaaaaauccuguuuaucgaggaagggaagauuguucauaccuccacacucucuggaaacgcgcaacacguggaggaaugcagcugcuaucccagauacccuggcgugcggugugucugccgcgacaauuggaagggguccaacagacccaucguggauauuaauaucaaagaccacagcauuguuucucgguacguguguuccggacuggucggcgacaccccgcgcaagaacgauagcucuagcuccucucauugccuugacccuaauaacgaggaaggcgggcacggagugaaaggcugggccuucgaugacgggaaugauguuuggaugggaagaacgaucaacgagacaagccggcugggcuaugagaccuuuaaggugaucgaagggugguccaaucccaaaagcaagcuccagauuaaccgccaggucaucguggacagaggagaucggucuggcuacuccggcauuuucagcgucgaggggaaaucuuguaucaauagaugcuuuuauguggaacugauucgcggacggaaggaggaaaccgagguucuguggacauccaacagcaucguggucuucuguggcaccuccgggacauacggaacgggcucuuggccugacggggcugaucucaaucugaugcccauuuga

SEQ ID NO: 215443 - RNA, 1410 nt, Artificial Sequence; identical to SEQ ID NO: 215426
  derived and/or modified CDS sequence (opt5) from neuraminidase__InfluenzaA__AGG13714

SEQ ID NO: 215444 - RNA, 1410 nt, Artificial Sequence; identical to SEQ ID NO: 214218
  derived and/or modified CDS sequence (opt5) from neuraminidase__InfluenzaA__AGG13726

SEQ ID NO: 215445 - RNA, 1410 nt, Artificial Sequence; identical to SEQ ID NO: 214218
  derived and/or modified CDS sequence (opt5) from neuraminidase__InfluenzaA__AGG13738

SEQ ID NO: 215446 - RNA, 1410 nt, Artificial Sequence; identical to SEQ ID NO: 214218
  derived and/or modified CDS sequence (opt5) from neuraminidase__InfluenzaA__AGG13750

SEQ ID NO: 215447 - RNA, 1410 nt, Artificial Sequence
  derived and/or modified CDS sequence (opt5) from neuraminidase__InfluenzaA__AGG13762
augaaccccaaucagaagaucauuaccaucggcagcgugucccugacaauuucuacgaucugcuucuuuaugcaaauugccauccucaucaccacagucacccugcacuucaaacaguacgaguuuaacagcccuccgaauaaccagguuaugcuuugugaacccacaauuaucgagagaaauauuaccgaaaucguguaucugacaaacaccacgauugagaaggaaaucugcccuaaacccgcugaguaccggaauugguccaagccucagugugacauuaccggguucgcccccuuuucuaaagauaacagcauccgccucuccgcgggaggcgacaucugggugacaagagagccuuaugucucuugcgauccggacaaguguuaccaauucgcucuggggcagggaaccacacuuaauaacgugcauagcaauaacaccguucgggaucgcacgcccuauagaacacugcucaugaaugaacugggcgugccuuuucaccuggggaccaagcaggucugcauugccugguccucuagcuccugucaugacggaaaagccuggcuccacgugugcaucacaggcgaugacaagaacgcuaccgccagcuucauuuacaauggccggcugguugauucuguggucuccuggagcaaagagauccuucgcacccaggaaucugagugugugugcauuaacgggacauguacgguggucaugaccgacggauccgcuagcggcaaggccgauacaaaaauccuguuuaucgaggaagggaagauuguucauaccuccacacucucuggaagcgcgcaacacguggaggaaugcuccugcuaucccagauacccuggcgugcggugugucugccgcgacaacuggaaggggagcaauagacccaucguggauauuaacaucaaagaccacucuauuguuucccgguacguguguagcggacuggucggcgacaccccgcgcaagaaugauucuagcuccucuagccauugccuugacccuaacaaugaggaaggcgggcacggagugaaaggcugggccuucgaugacgggaacgauguuuggaugggaagaacgaucaaugagacaucccggcugggcuaugagaccuuuaaggugaucgaaggguggagcaaccccaaaucuaagcuccagauuaaucgccaggucaucguggacagaggagaucgguccggcuacagcggcauuuucucugucgaggggaaauccuguaucaacagaugcuuuuauguggaacugauucgcggacggaaggaggaaaccgagguucuguggacaagcaauuccaucguggucuucuguggcaccucugggacauacggaacgggcagcuggccugacggggcugaucucaaccugaugcccauuuga

SEQ ID NO: 215448 - RNA, 1410 nt, Artificial Sequence
  derived and/or modified CDS sequence (opt5) from neuraminidase__InfluenzaA__AGG13774
augaaccccaaucagaagaucauuaccaucggcagcgugucccugacaauuucuacgaucugcuucuuuaugcaaauugccauccucaucaccacagucacccugcacuucaaacaguacgaguuuaacagcccuccgaauaaccagguuaugcuuugugaacccacaaccauugagagaaauaucacagaaauuguguaucugaccaacacgaccaucgagaaggaaauuugcccuaaacucgcugaguaccggaauugguccaagccccagugugacaucacaggguucgccccuuuuucuaaagauaacagcauucgccuguccgcgggaggcgacaucugggugaccagagagcccuaugucucuugcgauccugacaaguguuaccaauucgcucuugggcagggaacaacccugaauaacgugcauagcaauaacacgguucgggaucgcacaccguauagaacccuccugaugaaugaacugggcgugcccuuucaccucgggacaaagcaggucugcaucgccugguccucuagcuccugucaugacggaaaagccuggcugcacgugugcauuaccggcgaugacaagaacgcuaccgccagcuucaucuacaauggccggcuuguugauucuguggucuccuggagcaaagacauucugcgcacacaggagucugaaugugugugcaucaacgggacgugugcuguggucaugaccgauggauccgccagcggcaaggcggacacaaaaauucucuuuaucgaggaggggaagaucguucauaccuccacacugucuggaagcgcccaacacguggaagagugcuccugcuauccuagauaccccggcgugcggugugucugccgcgauaacuggaaggggagcaauagaccuauuguggacaucaacauuaaagaccacucuaucguuuccagcuacguguguucuggacuugucggcgauacgccccggaagaaugacagcuccucuagcggccauugccuggauccgaacaaugaagagggaggacacggcgugaaagggugggcuuucgacgauggaaacgacguuuggaugggccgcaccauuaaugaaacauccagacucggguaugagaccuuuaaggugaucgagggauggagcaacccuaaaucuaagcugcagaucaaucggcaggucauuguggaucgcggcaacagauccggcuacagcgggaucuucucugucgaagggaaaaauuguauuaaccggugcuuuuauguggagcugaucagaggccgcaaggaagagaccgaaguucucuggacauccaauagcauuguggucuucugugggaccuccggaacauacggcacggggucuuggcccgacggcgccgaucugaaccuuaugccuaucuga

SEQ ID NO: 215449 - RNA, 1410 nt, Artificial Sequence
  derived and/or modified CDS sequence (opt5) from neuraminidase__InfluenzaA__AGG13786
augaaccccaaucagaagaucauuaccaucggcagcgugucccugacaauuucuacgaucugcuucuuuaugcaaauugccauccucaucaccacagucacccugcacuucaaacaguacgaguuuaacagcccuccgaauaaccagguuaugcuuugugaacccacaauuaucgagagaaauauuaccgaaaucguguaucugacaaacaccacgauugagaaggaaaucugcccuaaacccgcugaguaccggaauugguccaagccucagugugggauuaccggauucgcccccuuuucuaaagacaacagcauccgccucuccgcgggcggggauaucugggugacaagagagccuuaugucucuugcgacccggauaaguguuaccaauucgcucugggacagggcaccacacuuaauaaccugcauagcaauaacaccgugcgggaccgcacgcccuauagaacacuccugaugaaugaacuggggguuccuuuucaccucggaaccaaacaggugugcauugccugguccucuagcuccugucaugauggcaaggccuggcugcacgucugcaucacaggcgacgauaagaacgcuaccgccagcuucauuuacaaugggcggcuuguggacucuguuguguccuggagcaaagagauccugcgcacccaggaaucugagugugucugcauuaacggaacauguacgguggugaugaccgauggcuccgcuagcgggaaggccgacacaaaaauccucuuuaucgaggaaggaaagauuguccauaccuccacacugucuggcagcgcgcaacacguugaggaaugcuccugcuaucccagauacccuggggugcggugugugugccgcgauaacuggaagggaagcaauagacccaucgucgacauuaacaucaaagaucacucuauuguguccagcuacguuuguucuggccuugugggcgacaccccgcggaagaaugacagcuccucuagcucccauugccuggauccuaacaaugaggaagggggacacggcgucaaagggugggccuucgacgauggaaacgacguguggaugggccgcacgaucaaugagacaagcagacucggguaugagaccuuuaagguuaucgaaggauggucuaaccccaaauccaagcugcagauuaaucgccaggugaucgucgaucggggcgacagaagcggcuacucugggauuuucuccguggagggaaaaagcuguaucaaccggugcuuuuaugucgaacugauuagaggccgcaaggaggaaaccgaggugcucuggacauccaauucuaucguuguguucugugggaccagcggaacauacggcacgggguccuggccugauggcgcugaccugaaccuuaugcccauuuga

SEQ ID NO: 215450 - RNA, 1410 nt, Artificial Sequence; identical to SEQ ID NO: 215426
  derived and/or modified CDS sequence (opt5) from neuraminidase__InfluenzaA__AGG13798

SEQ ID NO: 215451 - RNA, 1410 nt, Artificial Sequence
  derived and/or modified CDS sequence (opt5) from neuraminidase__InfluenzaA__AGG13810
augaaccccaaucagaagaucauuaccaucggcagcgugucccugacaauuucuacgaucugcuucuuuaugcaaauugccauccucaucaccacagucacccugcacuucaaacaguacgaguuuaacagcccuccgaauaaccagguuaugcuuugugaacccacaauuaucgagagaaauauuaccgaaaucguguaucugacaaacaccacgauugagaaggaaaucugcccuaaacccgcugaguaccggaauugguccaagccucagugugacauuaccggguucgcccccuuuucuaaagauaacagcauccgccucuccgcgggaggcgacaucugggugacaagagagccuuaugucucuugcgauccggacaaguguuaccaauucgcucuggggcagggaaccacacuuaauaacgugcauagcaauaacaccguucgggaucgcacgcccuauagaacacugcucaugaaugaacugggcgugccuuuucaccuggggaccaagcaggucugcauugccugguccucuagcuccugucaugacggaaaagccuggcuccacgugugcaucacaggcgaugacaagaacgcuaccgccagcuucauuuacaauggccggcugguugauucuguggucuccuggagcaaagagauccuucgcacccaggaaucugagugugugugcauuaacgggacauguacgguggucaugaccgacggauccgcuagcggcaaggccgauacaaaaauccuguuuaucgaggaagggaagauuguucauaccuccacacucucuggaagcgcgcaacacguggaggaaugcuccugcuaucccagauacccuggcgugcggugugucugccgcgacaacuggaaggggagcaauagacccaucguggauauuaacaucaaagaccacucuauuguuucccgguacguguguagcggacuggucggcgacaccccgcgcaagaaugauucuagcuccucuagccauugccuuggcccuaacaaugaggaagggggacacggcgugaaagggugggccuucgacgauggaaacgacguuuggaugggcagaacgaucaaugagacaucccggcugggguaugagaccuuuaaggugaucgaaggauggagcaaccccaaaucuaagcuccagauuaaucgccaggucaucguggauagaggcgaccgguccggcuacagcgggauuuucucugucgagggaaaauccuguaucaacagaugcuuuuauguggaacugauucgcggccggaaggaggaaaccgagguucuguggacaagcaauuccaucguggucuucugugggaccucuggaacauacggcacggggagcuggccugauggcgcugaccucaaccugaugcccauuuga

SEQ ID NO: 215452 - RNA, 1410 nt, Artificial Sequence; identical to SEQ ID NO: 215426
  derived and/or modified CDS sequence (opt5) from neuraminidase__InfluenzaA__AGG13822

SEQ ID NO: 215453 - RNA, 1410 nt, Artificial Sequence; identical to SEQ ID NO: 215426
  derived and/or modified CDS sequence (opt5) from neuraminidase__InfluenzaA__AGG13834

SEQ ID NO: 215454 - RNA, 1410 nt, Artificial Sequence; identical to SEQ ID NO: 215447
  derived and/or modified CDS sequence (opt5) from neuraminidase__InfluenzaA__AGG13846

SEQ ID NO: 215455 - RNA, 1410 nt, Artificial Sequence; identical to SEQ ID NO: 214218
  derived and/or modified CDS sequence (opt5) from neuraminidase__InfluenzaA__AGG13858

SEQ ID NO: 215456 - RNA, 1410 nt, Artificial Sequence
  derived and/or modified CDS sequence (opt5) from neuraminidase__InfluenzaA__AGG13870
augaaccccaaucagaagaucauuaccaucggcagcgugucccugacaauuucuacgaucugcuucuuuaugcaaauugccauccucaucaccacagucacccugcacuucaaacaguacgaguuuaacagcccuccgaauaaccagguuaugcuuugugaacccacaauuaucgagagaaauauuaccgaaaucguguaucugacaaacaccacgauugagaaggaaaucugcccuaaacccgcugaguaccggaauugguccaagccucagugugggauuaccggauucgcccccuuuucuaaagacaacagcauccgccucuccgcgggcggggauaucugggugacaagagagccuuaugucucuugcgacccggaucgguguuaccaauucgcucugggacagggcaccacacuuaauaacaugcauagcaauaacaccgugcgcgacagaacgcccuaucggacacugcucaugaaugaacuggggguuccuuuucaccugggaaccaaacaggugugcauugccugguccucuagcuccugucaugauggcaaggccuggcuccacgucugcaucacaggcgacgauaagaacgcuaccgccagcuucauuuacaaugggcgccugguggacucuguuguguccuggagcaaggagauccuuagaacccaggaaucugagugugucugcauuaacggaacauguacgguggugaugaccgauggcuccgcuagcgggaaagccgacacaaagauccuguuuaucgaggaaggaaaaauuguccauaccuccacacucucuggcagcgcgcaacacguugaggaaugcuccugcuauccccgguacccuggggugcgcugugugugcagagauaacuggaagggaagcaaucggcccaucgucgacauuaacaucaaggaucacucuauuguguccagcuacguuuguucuggccuggugggcgacaccccgcgcaaaaaugacagcuccucuagcucccauugccuugauccuaacaaugaggaagggggacacggcgucaaggggugggccuucgacgauggaaacgacguguggaugggcagaacgaucaaugagacaagccggcugggguaugagaccuuuaaaguuaucgaaggauggucuaaccccaaguccaaacuccagauuaaucgccaggugaucgucgauagaggcgaccggagcggcuacucugggauuuucuccguggagggaaccagcuguaucaacagaugcuuuuaugucgaacugauucgcggccggaaggaggaaacagaggugcuguggaccuccaauucuaucguuguguucugugggacaagcggaacguacggcaccggguccuggccugauggcgcugaccucaaccugaugcccauuuga

SEQ ID NO: 215457 - RNA, 1410 nt, Artificial Sequence
  derived and/or modified CDS sequence (opt5) from neuraminidase__InfluenzaA__AGG13894
augaaccccaaucagaagaucauuaccaucggcagcgugucccugacaauuucuacggucugcuucuuuaugcaaaucgccauucucaucaccacaguuacccugcacuucaaacaguacgaguuuaacagcccuccgaauaaccaggugaugcuuugugaacccacaaucauugagagaaaugugaccgaaaucgucuaucugacaaacaccacgauugagaaggaaaucugcccuaaacccgcugaguaccggaauugguccaagccucagugugggauuaccggauucgcccccuuuucuaaagacaacagcauccgccucuccgcgggcggggauauuugggugacaagagagccuuauguuucuugcgacccggauaaguguuaccaauucgcucugggacagggcaccacacuuaauaacgugcauagcaauaacaccguccgggaccgcacgcccuauagaacacugcucaugaaugaacugggggugccuuuucaccugggaaccaagcagguuugcaucgccugguccucuagcuccugucaugauggcaaagccuggcuccacgugugcaucacaggcgacgauaagaacgcuaccgccagcuucauuuacaaugggcggcuggucgacucugugguguccuggagcaaagagauccuucgcacccaggaaucugagugugucugcauuaacggaacauguacgguugugaugaccgauggcuccgcuagcgggaaggccgacacaaaaauccuguuuauugaggaaggaaagaucgugcauaccuccacacucucuggcagcgcgcaacacgucgaggaaugcuccugcuaucccagauacccuggggugcgguguguuugccgcgauaacuggaagggaagcaauagacccaucguggacauuaacaucaaagaucacucuauugucuccagcuacguguguucuggccugguuggcgacaccccgcggaagaaugacagcuccucuagcucccauugccuugauccuaacaaugaggaagggggacacggcgugaaagggugggccuucgacgauggaaacgacgucuggaugggccgcacgaucaaugagacaagcagacugggguaugagaccuuuaaggugauugaaggauggucuaaccccaaauccaagcuccagaucaaucggcaggucaucguggaucgcggcgacagaagcggcuacucugggauuuucuccguugagggaaaaagcuguaucaaccggugcuuuuauguggaacugauuagaggccgcaaggaggaaaccgagguccuguggacauccaauucuaucgugguuuucugugggaccagcggaacauacggcacgggguccuggccugauggcgcugaccucaaccugaugcccauuuga

SEQ ID NO: 215458 - RNA, 1410 nt, Artificial Sequence; identical to SEQ ID NO: 215426
  derived and/or modified CDS sequence (opt5) from neuraminidase__InfluenzaA__AGG13906

SEQ ID NO: 215459 - RNA, 1410 nt, Artificial Sequence
  derived and/or modified CDS sequence (opt5) from neuraminidase__InfluenzaA__AGG13930
augaaccccaaucagaagaucauuaccaucggcagcgugucccugacaauuucuacgaucugcuucuuuaugcaaauugccauccucaucaccacagucacccugcacuucaaacaguacgaguuuaacagcccuccgaauaaccagguuaugcuuugugaacccacaauuaucgagagaaauauuaccgaaaucguguaucugacaaacaccacgauugagaaggaaaucugcccuaaacccgcugaguaccggaauugguccaagccucagugugggauuaccggauucgcccccuuuucuaaagacaacagcauccgccucuccgcgggcggggauaucugggugacaagagagccuuaugucucuugcgacccggauaaguguuaccaauucgcucugggacagggcaccacacuuaauaacgugcauagcaauaacaccguucgggaccgcacgcccuauagaacacugcucaugaaugaacugggggugccuuuucaccugggaaccaagcaggucugcauugccugguccucuagcuccugucaugauggcaaagccuggcuccacgugugcaucacaggcgacgauaagaacgcuaccgccagcuucauuuacaaugggcggcugguugacucuguggucuccuggagcaaagagauccuucgcacccaggaaucugagugugugugcauuaacggaacauguacgguggucaugaccgauggcuccgcuagcgggaaggccgacacaaaaauccuguuuaucgaggaaggaaagauuguucauaccuccacacucucuggcagcgcgcaacacguggaggaaugcuccugcuaucccagauacccuggggugcggugugucugccgcgauaacuggaagggaagcaauagacccaucguggacauuaacaucaaagaucacucuauuguuuccagcuacguguguucuggccuggucggcgacaccccgcggaagaaugaccgcagcuccucuagccauugccuugauccuaacaaugaggaagggggacacggcgugaaagggugggccuucgacgauggaaacgacguuuggaugggcagaacgaucaaugagacaucccggcugggguaugagaccuuuaaggugaucgaaggauggagcaaccccaaaucuaagcuccagauuaaucgccaggucaucguggauagaggcgaccgguccggcuacagcgggauuuucucugucgagggaaaauccuguaucaacagaugcuuuuauguggaacugauucgcggccggaaggaggaaaccgagguucuguggacaagcaauuccaucguggucuucugugggaccucuggaacauacggcacggggagcuggccugauggcgcugaccucaaccugaugcccauuuga

SEQ ID NO: 215460 - RNA, 1410 nt, Artificial Sequence; identical to SEQ ID NO: 215436
  derived and/or modified CDS sequence (opt5) from neuraminidase__InfluenzaA__AGG13942

SEQ ID NO: 215461 - RNA, 1410 nt, Artificial Sequence
  derived and/or modified CDS sequence (opt5) from neuraminidase__InfluenzaA__AGG13965
augaaccccaaucagaagaucauuaccaucggcagcgugugcaugacaauugggauggccaaccugauccuccaaauuggaaauaucaucuccauuuggaucucucacagcauucagcugggcaaccagucccagaucgagacguguaaucaaucugucauuaccuacgaaaacaauacauggguuaaccagaccuaugugaauaucagcaacacaaauuucgcugccgggcaguccguggucucugugaaacuugcgggaaacagcucccugugcccuguuagcggcugggcuauuuacucuaaggacaauuccgugagaaucgggagcaaaggagaugucuuugugauccgggagccguucauuucuuguagcccccucgaaugccgcaccuuuuuccugacacagggcgcccuucugaacgacaagcauuccaauggcaccaucaaagauagaucuccuuaucggacgcucauguccugucccauuggggagguuccuagccccuacaacucccgcuuugaaucuguggccuggagcgcuuccgccugccacgacggaaucaacuggcugaccauuggcaucagcgggccugauucuggagcugucgccgugcugaaguauaauggcaucauuacagacaccaucaaguccuggagaaacaauauucuccggacacaagagagcgagugugcgugcgugaacgggucuuguuucaccaucaugacggauggaccgagcgacggccaggccuccuacaaaauuuuucgcaucgaaaagggcaaaaucgucaagucuguugagaugaaugcucccaacuaucauuacgaagagugcagcuguuacccugauuccagcgagauuacaugcgugugcagagacaauuggcacgggucuaaccggcccuggguguccuucaaucagaaccuggaauaucagaucggauacauuuguagcggcaucuuuggggauaauccucgccccaacgacaaaaccggaucuugcggcccggucuccagcaauggggccaacggagugaagggcuucuccuuuaaguauggcaaugggguuuggauuggaagaacaaaaucuaucagcucccggaagggcuucgagaugauuugggauccuaacggguggaccggaaccgacaacaauuuuucuaucaaacaagacaucgugggcauuaacgaauggagcggguacuccggcagcuucguccagcaucccgagcuuacaggacuggauuguauccgcccuugcuucuggguggaacucauuagaggccggcccaaggagaauacgaucuggaccucuggguccagcauuucuuuuuguggaguuaacuccgacacagugggcuggagcuggcccgauggggcugagcugccuuucaccaucgacaaauga

SEQ ID NO: 215462 - RNA, 1410 nt, Artificial Sequence; identical to SEQ ID NO: 215429
  derived and/or modified CDS sequence (opt5) from neuraminidase__InfluenzaA__AGG13976

SEQ ID NO: 215463 - RNA, 1410 nt, Artificial Sequence; identical to SEQ ID NO: 215429
  derived and/or modified CDS sequence (opt5) from neuraminidase__InfluenzaA__AGG13988

SEQ ID NO: 215464 - RNA, 1410 nt, Artificial Sequence; identical to SEQ ID NO: 215429
  derived and/or modified CDS sequence (opt5) from neuraminidase__InfluenzaA__AGG14000

SEQ ID NO: 215465 - RNA, 1410 nt, Artificial Sequence; identical to SEQ ID NO: 215429
  derived and/or modified CDS sequence (opt5) from neuraminidase__InfluenzaA__AGG14012

SEQ ID NO: 215466 - RNA, 1410 nt, Artificial Sequence; identical to SEQ ID NO: 215447
  derived and/or modified CDS sequence (opt5) from neuraminidase__InfluenzaA__AGG14024

SEQ ID NO: 215467 - RNA, 1410 nt, Artificial Sequence
  derived and/or modified CDS sequence (opt5) from neuraminidase__InfluenzaA__AGG14036
augaaccccaaucagaagaucauuaccaucggcagcgugucccugacaauuucuacgaucugcuucuuuaugcaaauugccauccucaucaccacagucacccugcacuucaaacaguacgaguuuaacagcccuccgaauaaccagguuaugcuuugugaacccacaauuaucgagagaaauauuaccgaaaucguguaucugacaaacaccacgauugagaaggaaaucugcccuaaacucgcugaguaccggaauugguccaagccccagugugacauuaccggguucgccccuuuuucuaaagauaacagcauccgccuguccgcgggaggcgacaucugggugacaagagagcccuaugucucuugcgauccugacaaguguuaccaauucgcucuugggcagggaaccacacugaauaacgugcauagcaauaacaccguucgggaucgcacgccguauagaacacuccugaugaaugaacugggcgugcccuuucaccucgggaccaagcaggucugcauugccugguccucuagcuccugucaugacggaaaagccuggcugcacgugugcaucacaggcgaugacaagaacgcuaccgccagcuucauuuacaauggccggcuuguugauucuguggucuccuggagcaaagacauccugcgcacccaggagucugaaugugugugcauuaacgggacaugugcuguggucaugacggauggauccgccagcggcaaggcggacaccaaaauccucuuuaucgaggaggggaagauuguucauacauccacccugucuggaagcgcccaacacguggaagagugcuccugcuauccuagauaccccggcgugcggugugucugccgcgauaacuggaaggggagcaauagaccuaucguggacauuaacaucaaagaccacucuauuguuuccagcuacauguguucuggacuugugggcgauacaccccggaagaaugacagcuccucuagcggccauugccuggauccgaacaaugaagagggaggacacggcgucaaagggugggcuuucgacgauggaaacgacguguggaugggccgcaccaucaaugaaacguccagacucggguaugagacauuuaagguuaucgagggauggagcaacccuaaaucuaagcugcagauuaaucgccaggugaucgucgaucggggcaacagauccggcuacagcgggauuuucucuguggaagggaaaaauuguaucaaccggugcuuuuaugucgagcugauuagaggccgcaaggaagagaccgaagugcucuggaccuccaauagcaucguuguguucugugggacauccggaaccuacggcacagggucuuggcccgacggcgccgaucugaaccuuaugccuauuuga

SEQ ID NO: 215468 - RNA, 1410 nt, Artificial Sequence; identical to SEQ ID NO: 215447
  derived and/or modified CDS sequence (opt5) from neuraminidase__InfluenzaA__AGG14321

SEQ ID NO: 215469 - RNA, 1410 nt, Artificial Sequence; identical to SEQ ID NO: 214218
  derived and/or modified CDS sequence (opt5) from neuraminidase__InfluenzaA__AGG14333

SEQ ID NO: 215470 - RNA, 1410 nt, Artificial Sequence; identical to SEQ ID NO: 213859
  derived and/or modified CDS sequence (opt5) from neuraminidase__InfluenzaA__AGG84182

SEQ ID NO: 215471 - RNA, 1398 nt, Artificial Sequence
  derived and/or modified CDS sequence (opt5) from neuraminidase__InfluenzaA__AGJ51955
augaaccccaaucagaagauccugugcaccagcgccacagcuauuaucauuggcgccaucgcggugcucauugggaucgcuaaccugggacuuaauaucggccugcaccucaaaccuggguguaacugcucccauucucaaccggagacgaccaauacaagccagaccauuaucaacaauuacuauaacgaaacaaauauuaccaacauccagauggaggaaagaacaucccggaauuucaacaaucugaccaagggacuuuguacgauuaacucuuggcacaucuacggcaaagacaaugccguccgcauuggggagagcuccgauguucuggugaccagagaacccuaugugucuugcgacccugaugagugucgguuuuacgcccucagccagggaacaaccauccgcggcaagcauuccaacggcacaauccacgacagaagccaauaucgggcucugauuucuuggccccuguccagcccucccaccgucuacaacucucgcguggagugcaucgggugguccagcacgucuugucaugauggaaaauccagaaugagcauuugcaucuccggcccuaauaacaaugccucugcuguugugugguauaaccggcgcccggucgccgaaauuaauacaugggcgagaaacauccuccggacccaggagagcgaaugugugugccacaaugggguuugucccguggucuucacagacggauccgccaccggcccugcugauacccgcaucuacuacuuuaaggaggggaagauucugaaaugggagagccuuacaggaacggccaagcacaucgaagagugcucuugcuauggcgaaagaaccggcauuacauguaccugccgggacaacuggcagggguccaaucgccccgugauccagauugauccuguggcuaugacacauaccagccaauacaucuguucucccguccugacggacaacccgagaccuaaugaucccaacaucggaaaaugcaaugacccuuaucccggcaacaauaacaacgggguuaagggauucagcuaccucgauggcgccaauacauggcuggggcggaccauuuccaccgcgucuagaagcggauaugagaugcuuaaagugcccaacgcccugacagacgaccgcuccaagccuauccagggccagaccauugugcucaaugcugauuggagcggcuacucuggguccuuuauggacuauugggccgaaggagauuguuaccgggcuugcuucuacgucgagcugaucagaggccgcccgaaggaggacaaagugcuguggacaggggauagcauuguuucuauguguuccagcacggaauuucucggacaguggaacuggcccgacggcgccaagaucgaguauuuccuguga

SEQ ID NO: 215472 - RNA, 1398 nt, Artificial Sequence
  derived and/or modified CDS sequence (opt5) from neuraminidase__InfluenzaA__AGJ72863
augaaccccaaucagaagauccugugcaccagcgccacagcuauuaucauuggcgccaucgcggugcucauugggaucgcuaaccugggacuuaauaucggccugcaccucaaaccuggguguaacugcucccauucucaaccggagacgaccaauacaagccagaccauuaucaacaauuacuauaacgaaacaaauauuaccaacauccagauggaggaaagaacaucccggaauuucaacaaucugaccaagggacuuuguacgauuaacucuuggcacaucuacggcaaagacaaugccguccgcauuggggagagcuccgauguucuggugaccagagaacccuaugugucuugcgacccugaugagugucgguuuuacgcccucagccagggaacaaccauccgcggcaagcauuccaacggcacaauccacgacagaagccaauaucgggcucugauuucuuggccccuguccagcccucccaccgucuacaacucucgcguggagugcaucgggugguccagcacgucuugucaugauggaaaauccagaaugagcauuugcaucuccggcccuaauaacaaugccucugcuguugugugguauaaccggcgcccggucgccgaaauuaauacaugggcgagaaacauccuccggacccaggagagcgaaugugugugccacaaugggguuugucccguggucuucacagacggauccgccaccggcccugcugauacccgcaucuacuacuuuaaggaggggaagauucugaaaugggagagccuuacaggaacggccaagcacaucgaagagugcucuugcuauggcgaaagaaccggcauuacauguaccugccgggacaacuggcagggguccaaucgccccgugauccagauugauccuguggcuaugacacauaccagccaauacaucuguucucccguccugacggacaacccgagaccuaaugaucccaacaucggaaaaugcaaugacccuuaucccggcaacaauaacaacgggguuaagggauucagcuaccucgauggcgccaauacauggcuggggcggaccauuuccaccgcgucuagaagcggauaugagaugcuuaaagugcccaacgcccugacagacgaccgcuccaagccuauccagggccagaccauugugcucaaugcugauuggagcggcuacucuggguccuuuauggacuauugggccgaaggagauuguuaccgggcuugcuucuacgucgaggugaucagaggccgcccgaaggaggacaaaguuuggugggccgggaacagcauugugucuauguguuccagcacagaauuucugggacaguggaauuggcccgauggcgccaagaucgaguauuuccuguga

SEQ ID NO: 215473 - RNA, 1410 nt, Artificial Sequence
  derived and/or modified CDS sequence (opt5) from neuraminidase__InfluenzaA__AGJ73328
augaaccccaaucagaagaucauuaccaucggcagcgugugcaugacaauugggauggccaaccugauccuccaaauuggaaauaucaucuccauuuggaucucucacagcauucagcugggcaaccagucccagaucgagacguguaaucaaucugucauuaccuacgaaaacaauacauggguuaaccagaccuaugugaauaucagcaacacaaauuucgcugccgggcaguccguggucucugugaaacuugcgggaaacagcucccugugcccuguuagcggcugggcuauuuacucuaaggacaauuccgugagaaucgggagcaaaggagaugucuuugugauccgggagccguucauuucuuguagcccccucgaaugccgcaccuuuuuccugacacagggcgcccuucugaacgacaagcauuccaauggcaccaucaaagauagaucuccuuaucggacgcucauguccugucccauuggggagguuccuagccccuacaacucccgcuuugaaucuguggccuggagcgcuuccgccugccacgacggaaucaacuggcugaccauuggcaucagcgggccugauucuggagcugucgccgugcugaaguauaauggcaucauuacagacaccaucaaguccuggagaaacaauauucuccggacacaagagagcgagugugcgugcgugaacgggucuuguuucaccaucaugacggauggaccgagcgacggccaggccuccuacaaaauuuuucgcaucgaaaagggcaaaaucgucaagucuguugagaugaaugcucccaacuaucauuacgaagagugcagcuguuacccugauuccagcgagauuacaugcgugugcagagacaauuggcacgggucuaaccggcccuggguguccuucaaucagaaccuggaauaucagaucggauacauuuguagcggcaucuuuggggauaauccucgccccaacgacaaaaccggaucuugcggcccggucuccagcaauggggccaacggagugaagggcuucuccuuuaaguauggcaaugggguuuggauuggaagaacaaaaucuaucagcucccggaagggcuucgagaugauuugggauccuaacggguggaacggaaccgacaauaacuuuucuaucaaacaagacaucgugggcauuaaugaauggagcggguacuccggcagcuucguccagcaucccgagcuuaccggacuggauuguauccgcccuugcuucuggguggaacucauuagaggccggcccaaggagaacacaaucuggacgucuggguccagcauuucuuuuuguggaguuaauuccgacaccgugggcuggagcuggcccgauggggcugagcugccuuucacaaucgacaaauga

SEQ ID NO: 215474 - RNA, 1410 nt, Artificial Sequence; identical to SEQ ID NO: 212329
  derived and/or modified CDS sequence (opt5) from neuraminidase__InfluenzaA__AGJ73330

SEQ ID NO: 215475 - RNA, 1410 nt, Artificial Sequence
  derived and/or modified CDS sequence (opt5) from neuraminidase__InfluenzaA__AGJ73332
augaaccccaaucagaagaucauuaccaucggcagcgugugcaugacaauugggauggccaaccugauccuccaaauuggaaauaucaucuccauuuggaucucucacagcauucagcugggcaaccagaaucagaucgagacguguaaccaauccgucauuaccuacgaaaauaacacauggguuaaucagaccuaugugaacaucucuaauacaaacuucgcugccgggcagagcguggucuccgugaaacuugcgggaaauucuagccugugcccuguuuccggcugggcuauuuacagcaaggacaacucuaucagaaucggguccaaaggagauguguuugucauucgggagccguucaucagcuguucuccccucgaaugccgcaccuuuuuccugacacagggcgcccuucugaaugacaagcauuccaacggcaccauuaaagauagaagcccuuaucggacgcucaugucuugucccaucggggaggugccuucccccuacaacagccgcuuugaauccguugccuggucugcuagcgccugccacgacggaauuaauuggcugaccaucggcaucuccgggccugauaacggagcuguggccguccugaaguauaauggcauuaucacagacaccauuaagagcuggagaaacaauauccuccggacacaagagucugagugugcgugcgugaacggguccuguuucaccgugaugacggauggaccgagcgacggccaggccucuuacaaaauuuuucgcaucgaaaagggcaaaaucgucaagagcguugagaugaaugcucccaacuaucauuacgaagagugcuccuguuacccugauucuagcgagauuacaugcgugugcagagacaauuggcacggguccaaccggcccugggugagcuucaaucauaaccuggaauaucagaucggauacauuuguucuggcaucuuuggggauaauccucgccccaacgacaaaaccggauccugcggcccggucagcucuaauggggccaacggagugaagggcuucuccuuuaaguauggcaacgggguuuggauuggaagaacaaaaagcaucuccucucggaauggcuucgagaugauuugggauccuaacggguggaccggaaccgacaauaacuuuagcaucaagcaggacaucauuggcaucaaugaaugguccggguacucuggcagcuucgugcaacaccccgagcuuacaggacuggauuguauucgcccuugcuucugggucgaacucaucagaggccggcccaaagagaacacgauuuggaccuccgggagcucuaucuccuuuuguggagugaauagcgacacaguuggcuggucuuggcccgauggggcugagcugccuuucaccaucgacaaguga

SEQ ID NO: 215476 - RNA, 1410 nt, Artificial Sequence; identical to SEQ ID NO: 212329
  derived and/or modified CDS sequence (opt5) from neuraminidase__InfluenzaA__AGJ73334

SEQ ID NO: 215477 - RNA, 1410 nt, Artificial Sequence; identical to SEQ ID NO: 212329
  derived and/or modified CDS sequence (opt5) from neuraminidase__InfluenzaA__AGJ73336

SEQ ID NO: 215478 - RNA, 1410 nt, Artificial Sequence; identical to SEQ ID NO: 212329
  derived and/or modified CDS sequence (opt5) from neuraminidase__InfluenzaA__AGJ73338

SEQ ID NO: 215479 - RNA, 1410 nt, Artificial Sequence
  derived and/or modified CDS sequence (opt5) from neuraminidase__InfluenzaA__AGJ73340
augaaccccaaucagaagaucauuaccaucggcagcgugugcaugacaauugggauggccaaccugauccuccaaauuggaaauaucaucuccauuuggaucucucacagcauucagcugggcaaccagucccagaucgagacguguaaucaaucugucauuaccuacgaaaacaauacauggguuaaccagaccuaugugaauaucagcaacacaaauuucgcugccgggcaguccguggucucugugaaacuugcgggaaacagcucccugugcccugcuagcggcugggccauuuacucuaaggacaauuccaucagaaucgggagcaaaggagauguuuuugugauucgggagccguucaucucuuguagcccccucgaaugccgcaccuuuuuccugacacagggcgcccuucugaacgacaagcauuccaauggcaccauuaaagauagaucuccuuaucggacgcucauguccugucccaucggggaggucccuagccccuacaacucccgcuuugaaucuguggcuuggagcgccuccgcuugccacgacggaauuaacuggcugaccaucggcaucagcgggccugauaauggagccguugcggugcugaaguauaacggcauuaucacagacaccauuaagucuuggagaaauaacauccuccggacacaagaguccgagugugccugcgucaaugggagcuguuucaccauuaugacggauggaccgucugacggccaggcuagcuacaaaaucuuucgcaucgaaaagggcaaaauugugaaguccguggagaugaacgcccccaauuaucauuacgaagagugcucuuguuacccugauagcuccgagaucacaugcgucugcagagacaacuggcacgggagcaaucggcccuggguuucuuucaaccagaaucuggaauaucagauuggauacaucuguuccggcauuuuuggggauaacccucgccccaaugacaaaaccggaagcugcggcccggugucuuccaacggggcuaauggagugaagggcuucagcuuuaaguauggcaacggggucuggaucggaagaacaaaauccauuucuagccggaagggcuucgagaugaucugggauccuaacggguggaccggaaccgacaauaacuuuuccaucaaacaagacauugugggcaucaaugaauggucuggguacagcggcuccuucguucagcaucccgagcuuacaggacuggauuguauucgcccuugcuucuggguggaacucaucagaggccggcccaaggagaacacgauuuggaccagcgggucuuccaucagcuuuuguggagucaauucugacacagugggcugguccuggcccgauggggccgagcugccuuucaccaucgacaaauga

SEQ ID NO: 215480 - RNA, 1410 nt, Artificial Sequence
  derived and/or modified CDS sequence (opt5) from neuraminidase__InfluenzaA__AGJ73342
augaaccccaaucagaagaucauuaccaucggcagcgugugcaugacaauugggauggccaaccugauccuccaaauuggaaauaucaucuccauuuggaucucucacagcauucagcugggcaaccagucccagaucgagacguguaaucaaucugucauuaccuacgaaaacaauacauggguuaaccagaccuaugugaauaucagcaacacaaauuucgcugccgggcaguccguggucucugugaaacuugcgggaaacagcucccugugcccuguuagcggcugggcuauuuacucuaaggacaauuccaucagaaucgggagcaaaggagauguguuugucauucgggagccguucaucucuuguagcccccucgaaugccgcaccuuuuuccugacacagggcgcccuucugaacgacaagcauuccaauggcaccauuaaagauagaucuccuuaucggacgcucauguccugucccaucggggaggugccuagccccuacaacucccgcuuugaaucuguugccuggagcgcuuccgccugccacgacggaauuaacuggcugaccaucggcaucagcgggccugauaauggagcuguggccguccugaaguauaacggcauuaucacagacaccauuaagucuuggagaaauaacauccuccggacacaagaguccgagugugcgugcgugaaugggagcuguuucaccauuaugacggauggaccgucugacggccaggccagcuacaaaaucuuucgcaucgaaaagggcaaaauugugaaguccgucgagaugaacgcucccaauuaucauuacgaagagugcucuuguuacccugauagcuccgagaucacaugcguuugcagagacaacuggcacgggagcaaucggcccugggugucuuucaaccagaaucuggaauaucagauuggauacaucuguuccggcauuuuuggggauaacccucgccccaaugacaaaaccggaagcugcggcccggugucuuccaacggggccaauggagucaagggcuucagcuuuaaguauggcaacgggguguggaucggaagaacaaaauccauuucuagccggaagggcuucgagaugaucugggauccuaacggguggaccggaaccgacaauaacuuuuccaucaaacaagacauuguuggcaucaaugaauggucuggguacagcggcuccuucgugcagcaucccgagcuuacaggacuggauuguauucgcccuugcuucugggucgaacucaucagaggccggcccaaggagaacacgauuuggaccagcgggucuuccaucagcuuuuguggaguuaauucuggcacaguggggugguccuggcccgacggagcugagcugccuuucaccaucgauaaauga

SEQ ID NO: 215481 - RNA, 1410 nt, Artificial Sequence; identical to SEQ ID NO: 212781
  derived and/or modified CDS sequence (opt5) from neuraminidase__InfluenzaA__AGJ73344

SEQ ID NO: 215482 - RNA, 1410 nt, Artificial Sequence
  derived and/or modified CDS sequence (opt5) from neuraminidase__InfluenzaA__AGJ73346
augaaccccaaucagaagaucauuaccaucggcagcgugugcaugacaauugggauggccaaccugauccuccaaauuggaaauaucaucuccauuuggaucucucacagcauucagcugggcaaccagaaucagaucgagaaauguaaccaauccgucauuacguacgaaaauaacaccuggguuaaucagacauaugugaacaucucuaauaccaacuucgcugccgggcagagcguggucuccgugaaacuugcgggaaauucuagccugugcccuguuuccggcugggcuauuuacagcaaggacaacucuaucagaaucggguccaagggagauguguuugucauucgggagccguucaucagcuguucuccccucgaaugccgcacauuuuuccugacccagggcgcccuucugaaugacaaacauuccaacggcacaauuaaggauagaagcccuuaucggacccucaugucuugucccaucggggaggugccuucccccuacaacagccgcuuugaauccguugccuggucugcuagcgccugccacgacggaauuaauuggcugacgaucggcaucuccgggccugauaacggagcuguggccguccugaaguauaauggcauuaucaccgacacaauuaaaagcuggagaaacaauauccuccggacccaagagucugagugugcgugcgugaacggguccuguuucacaauuaugaccgauggaccgagcgacggccaggccucuuacaagaucuuucgcaucgaaaaaggcaagauugugaaaagcgucgagaugaaugcucccaacuaucauuacgaagagugcuccuguuacccugauucuagcgagaucacgugcguuugcagagacaauuggcacggguccaaccggcccugggugagcuucaaucagaaccuggaauaucagauuggauacaucuguucuggcauuuuuggggauaauccucgccccaacgacaagacaggauccugcggcccggugagcucuaauggggccaacggagucaagggcuucuccuuuaaauauggcaacgggguguggaucggaagaaccaagagcauuuccucucggaaaggcuucgagaugaucugggauccuaauggguggacaggaaccgacaacaauuuuagcaucaagcaagacauuguuggcaucaacgaaugguccggguacucuggcagcuucgugcagcaucccgagcuuaccggacuggauuguauucgcccuugcuucugggucgaacucaucagaggccggcccaaagaguccacaauuuggacgagcgggucuuccaucagcuuuuguggaguuaauucugacaccgugggcugguccuggcccgauggggcugagcugccuuucacaaucgacaaguga

SEQ ID NO: 215483 - RNA, 1410 nt, Artificial Sequence
  derived and/or modified CDS sequence (opt5) from neuraminidase__InfluenzaA__AGJ73348
augaaccccaaucagaagaucauuaccaucggcagcgugugcaugacaauugggauggccaaccugauccuccaaauuggaaauaucaucuccauuuggaucucucacagcauucagcugggcaaccagaaucagaucgagacguguaaccaauccgucauuaccuacgaaaauaacacauggguuaaucagaccuaugugaacaucucuaauacaaacuucgcugccgggcagagcgugauuuccgucaaacuugcgggaaauucuagccugugcccuguguccggcugggcuaucuacagcaaggacaacucuaucagaauuggguccaaaggagauguuuuugugauccgggagccguucauuagcuguucuccccucgaaugccgcaccuuuuuccugacacagggcgcccuucugaaugacaagcauuccaacggcaccaucaaagauagaagcccuuaucggacgcucaugucuugucccauuggggaggucccuucccccuacaacagccgcuuugaauccguggccuggucugcuagcgccugccacgacggaaucaauuggcugaccaucggcauuuccgggccugauaacggagcuguugccgugcugaaguauaauggcaucauuacagacaccaucaagagcuggagaaacaauauucuccggacacaagagucugagugugcgugcgucaacggguccuguuucaccaucaugacggauggaccgagcgacggccaggccucuuacaaaaucuuucgcauugaaaagggcaaaaucgucaagagcguggagaugaaugcucccaacuaucauuacgaagagugcuccuguuacccugauucuagcgagauuacaugcgugugcagagacaauuggcacggguccaaccggcccuggguuagcuucaaucagaaccuggaauaucagaucggauacauuuguucuggcaucuuuggggauaauccucgccccaacgacaaaaccggauccugcggcccggugagcucuaauggggccaacggagugaagggcuucuccuuuaaguauggcaacggggucuggauuggaagaacaaaaagcaucuccucucggaagggcuucgagaugaucugggauccuaauggguggaccggaaccgacaacaauuuuagcauuaaacaagacaucgugggcauuaacgaaugguccggguacucuggcagcuucguucagcaucccgagcuuacaggacuggauuguauccgcccuugcuucuggguggaacucauuagaggccggcccaaggagaauacgaucuggaccuccgggagcucuaucuccuuuuguggagucaacagcgacacagugggcuggucuuggcccgauggggcugagcugccuuucaccauugacaaauga

SEQ ID NO: 215484 - RNA, 1410 nt, Artificial Sequence
  derived and/or modified CDS sequence (opt5) from neuraminidase__InfluenzaA__AGJ73350
augaaccccaaucagaagaucauuaccaucggcagcgugugcaugacaauugggauggccaaccugauccuccaaauuggaaauaucaucuccauuuggaucucucacagcauucagcugggcaaccagaaucagaucgagacguguaaccaauccgucauuaccuacgaaaauaacacauggguuaaucagaccuaugugaacaucucuaauacaaacuucgcugccgggcagagcguggucuccgugaaacuugcgggaaauucuagccugugcccuguuuccggcugggcuauuuacagcaaggacaacucuaucagaaucggguccaaaggagauguguuugucauucgggagccguucaucagcuguucuccccucgaaugccgcaccuuuuuccugacacagggcgcccuucugaaugacgagcauuccaacggcaccauuaaggauagaagcccuuaucggacgcucaugucuugucccaucggggaagugccuucccccuacaacagccgcuuugaguccguugccuggucugcuagcgccugccacgacggaauuaauuggcugaccaucggcaucuccgggccugauaacggagcuguggccguccugaaauauaauggcauuaucacagacaccauuaagagcuggagaaacaauauccuccggacacaagagucugaaugugcgugcgugaacggguccuguuucaccauuaugacggauggaccgagcgacggccaggccucuuacaagaucuuucgcaucgagaaaggcaagauugugaaaagcgucguuaugaaugcucccaacuaucauuacgaagagugcuccuguuacccugauucuagcgagaucacaugcgugugcagagacaauuggcacggguccaaccggcccugggugagcuucaaucagaaccuggaauaucagauuggauacaucuguucuggcauuuuuggggauaauccucgccccaacgacaagaccggauccugcggcccggucagcucuaauggggccaacggagugaaaggcuucuccuuuaaguauggcaacgggguuuggaucggaagaacaaagagcauuuccucucggaaaggcuucgagaugaucugggauccuaauggguggaccggaaccgacaacaauuuuagcaucaagcaagacauugugggcaucaacgaaugguccggguacucuggcagcuucguccagcaucccgagcuuacaggacuggauuguauucgcccuugcuucuggguggaacucaucagaggccggcccaaagagaauacgauuuggaccuccgggagcucuaucuccuuuuguggaguuaacagcgacacagugggcuggucuuggcccgauggggcugagcugccuuucaccaucgacaaguga

SEQ ID NO: 215485 - RNA, 1410 nt, Artificial Sequence
  derived and/or modified CDS sequence (opt5) from neuraminidase__InfluenzaA__AGJ73352
augaaccccaaucagaagaucauuaccaucggcagcgugugcaugacaauugggauggccaaccugauccuccaaauuggaaauaucaucuccauuuggaucucucacagcauucagcugggcaaccagucccagaucgagacguguaaucaaucugucauuaccuacgaaaacaauacauggguuaaccagaccuaugugaauaucagcaacacaaauuucgcugccgggcaguccguggucucugugaaacuuguuggaaacagcucccugugcccugugagcggcugggcgauuuacucuaaggacaauuccaucagaaucgggagcaaaggagaugucuuugugauucgggagccguucaucucuuguagcccccucgaaugccgcaccuuuuuccugacacagggcgcccuucugaacgacaagcauuccaauggcaccauuaaagauagaucuccuuaucggacgcucauguccugucccaucggggagguuccuagccccuacaacucccgcuuugaaucuguggcuuggagcgccuccgcuugccacgacggaauuaacuggcugaccaucggcaucagcgggccugauaauggagccgucgcugugcugaaguauaacggcauuaucacagacaccauuaagucuuggagaaauaacauccuccggacacaagaguccgagugugccugcgugaaugggagcuguuucaccauuaugacggauggaccgucugacggccaggcgagcuacaaaaucuuucgcaucgaaaagggcaaaauugucaaguccguugagaugaacgcccccaauuaucauuacgaagagugcucuuguuacccugauagcuccgagaucacaugcgugugcagagacaacuggcacgggagcaaucggcccugggugucuuucaaccagaaucuggaauaucagauuggauacaucuguuccggcauuuuuggggauagcccucgccccaacgacaaaaccggaucuugcggcccggucuccagcaauggggcuaacggagugaagggcuucuccuuuaaguauggcaaugggguuuggaucggaagaacaaaaucuauuagcucccggaagggcuucgagaugaucugggauccuaacggguggaccggaaccgacaacaauuuuucuaucaaacaagacauugugggcaucaacgaauggagcggguacuccggcagcuucguccagcaucccgagcuuacaggacuggauuguauucgcccuugcuucuggguggaacucaucagaggccggcccaaggagaauacgauuuggaccucuggguccagcaucucuuuuuguggaguuaacuccgacacagugggcuggagcuggcccgauggggccgagcugccuuucaccaucgacaaauga

SEQ ID NO: 215486 - RNA, 1410 nt, Artificial Sequence; identical to SEQ ID NO: 212781
  derived and/or modified CDS sequence (opt5) from neuraminidase__InfluenzaA__AGJ73354

SEQ ID NO: 215487 - RNA, 1410 nt, Artificial Sequence
  derived and/or modified CDS sequence (opt5) from neuraminidase__InfluenzaA__AGJ73356
augaaccccaaucagaagaucauuaccaucggcagcgugugcaugacaauugggauggccaaccugauccuccaaauuggaaauaucaucuccauuuggaucucucacagcauucagcugggcaaccagucccagaucgagacguguaaucaaucugucauuaccuacgaaaacaauacauggguuaaccagaccuauuucaauaucagcaacacaaauuuugcugccgggcaguccguggugucugucaaacuugcgggaaacagcucccugugcccugugagcggcugggcuauuuacucuaaggacaauuccaucagaaucgggagcaaaggagauguuuucgugauucgggagccguuuaucucuuguagcccccucgaaugccgcaccuucuuucugacacagggcgcccuucugaacgacaagcauuccaauggcaccauuaaagauagaucuccuuaucggacgcucauguccugucccaucggggaggucccuagccccuacaacucccgcuucgaaucuguggccuggagcgcuuccgccugccacgacggaauuaacuggcugaccaucggcaucagcgggccugauaauggagcuguugccgugcugaaguauaacggcauuaucacagacaccauuaagucuuggagaaauaacauccuccggacacaagaguccgagugugcgugcgucaaugggagcuguuuuaccauuaugacggauggaccgucugacggccaggccagcuacaaaaucuuccgcaucgaaaagggcaaaauugugaaguccguggagaugaacgcucccaauuaucauuacgaagagugcucuuguuacccugauagcuccgagaucacaugcgucugcagagacaacuggcacgggagcaaucggcccuggguuucuuuuaaccagaaucuggaauaucagauuggauacaucuguuccggcauuuucggggauaacccucgccccaaugacaaaaccggaagcugcggcccggugucuuccaacggggccaauggagugaagggcuuuagcuucaaguauggcaacggggucuggaucggaagaacaaaauccauuucuagccggaagggcuuugagaugaucugggauccuaacggguggaccggaaccgacaauaacuucuccaucaaacaagacauugugggcaucaaugaauggucuggguacagcggcuccuucguucagcaucccgagcuuacaggacuggauuguauucgcccuugcuuuuggguggaacucaucagaggccggcccaaggagaacacgauuuggaccagcgggucuuccaucagcuucuguggagucaauucugacacagugggcugguccuggcccgauggggcugagcugccuuuuaccaucgacaaauga

SEQ ID NO: 215488 - RNA, 1410 nt, Artificial Sequence; identical to SEQ ID NO: 212781
  derived and/or modified CDS sequence (opt5) from neuraminidase__InfluenzaA__AGJ73358

SEQ ID NO: 215489 - RNA, 1410 nt, Artificial Sequence; identical to SEQ ID NO: 212781
  derived and/or modified CDS sequence (opt5) from neuraminidase__InfluenzaA__AGJ73360

SEQ ID NO: 215490 - RNA, 1410 nt, Artificial Sequence
  derived and/or modified CDS sequence (opt5) from neuraminidase__InfluenzaA__AGJ73362
augaaccccaaucagaagaucauuaccaucggcagcgugugcaugacaauugggauggccaaccugauccuccaaauuggaaauaucaucuccauuuggaucucucacagcauucagcugggcaaccagucccagaucgagacguguaaucaaucugucauuaccuacgaaaacaauacauggguuaaccagaccuaugugaauaucagcaacacaaauuucgcugacgggcaguccguggucucugugaaacuugccggaaacagcucccugugcccuguuagcggcugggcgauuuacucuaaggauaauuccaucagaaucgggagcaaaggagacguguuugucauucgggagccguucaucucuuguagcccccucgaaugccgcaccuuuuuccugacacagggcgcccuucugaacgauaagcauuccaauggcaccauuaaagacagaucuccuuaucggacgcucauguccugucccaucggggaggugccuagccccuacaacucccgcuuugaaucuguugcuuggagcgccuccgcuugccacgauggaauuaacuggcugaccaucggcaucagcgggccugacaauggagccguggcuguccugaaguauaacggcauuaucacagauaccauuaagucuuggagaaauaacauccuccggacacaagaguccgagugugccugcgugaaugggagcuguuucaccauuaugacggacggaccgucugauggccaggcgagcuacaaaaucuuucgcaucgaaaagggcaaaauugugaaguccgucgagaugaacgcccccaauuaucauuacgaagagugcucuuguuacccugacagcuccgagaucacaugcguuugcagagauaacuggcacgggagcaaucggcccugggugucuuucaaccagaaucuggaauaucagauuggauacaucuguuccggcauuuuuggggacaacccucgccccaaugauaaaaccggaagcugcggcccggugucuuccaacggggcuaauggagucaagggcuucagcuuuaaguauggcaacgggguguggaucggaagaacaaaauccauuucuagccggaagggcuucgagaugaucugggacccuaacggguggaccggaaccgacaauaacuuuuccaucaaacaagauauuguuggcaucaaugaauggucuggguacagcggcuccuucgugcagcaucccgagcuuacaggacuggacuguauucgcccuugcuucugggucgaacucaucagaggccggcccaaggagaacacgauuuggaccagcgggucuuccaucagcuuuuguggaguuaauucugauacagugggcugguccuggcccgacggggccgagcugccuuucaccaucgauaaauga

SEQ ID NO: 215491 - RNA, 1410 nt, Artificial Sequence; identical to SEQ ID NO: 213904
  derived and/or modified CDS sequence (opt5) from neuraminidase__InfluenzaA__AGJ73364

SEQ ID NO: 215492 - RNA, 1410 nt, Artificial Sequence; identical to SEQ ID NO: 212781
  derived and/or modified CDS sequence (opt5) from neuraminidase__InfluenzaA__AGJ73366

SEQ ID NO: 215493 - RNA, 1410 nt, Artificial Sequence; identical to SEQ ID NO: 212329
  derived and/or modified CDS sequence (opt5) from neuraminidase__InfluenzaA__AGJ73370

SEQ ID NO: 215494 - RNA, 1410 nt, Artificial Sequence
  derived and/or modified CDS sequence (opt5) from neuraminidase__InfluenzaA__AGJ73372
augaaccccaaucagaagaucauuaccaucggcagcgugugcaugacaauugggauggccaaccugauccuccaaauuggaaauaucaucuccauuuggaucucucacagcauucagcugggcaaccagaaucagaucgagacguguaaccaauccgucauuaccuacgaaaauaacacauggguuaaucagaccuaugugaacaucucuaauacaaacuucgcugccgggcagagcguggucuccgugaaacuugcgggaaauucuagccugugcccuguuuccggcugggcuauuuacagcaaggacaacucuaucagaaucggguccaaaggagauguguuugucauucgggagccguucaucagcuguucuccccucgaaugccgcaccuuuuuccugacacagggcgcccuucugaaugacaagcauuccaacggcaccauuaaagauagaagcccuuaucggacgcucaugucuugucccaucggggaggugccuucccccuacaacagccgcuuugaauccguugccuggucugcuagcgccugccacgacggaauuaauuggcugaccaucggcaucuccgggccugauaacggagcuguggccguccugaaguauaauggcauuaucacagacaccauuaagagcuggagaaacaauauccuccggacacaagagucugagugugcgugcgugaacggguccuguuucaccauuaugacggauggaccgagcgacggccaggccucuuacaaaaucuuucgcaucgaaaagggcaaaauugucaagagcguggagaugaaugcucccaacuaucauuacgaagagugcuccuguuacccugauucuagcgagaucacaugcguuugcagagacaauuggcacggguccaaccggcccugggugagcuucaaucauaaccuggaauaucagauuggauacaucuguucuggcauuuuuggggauaauccucgccccaacgacaaaaccggauccugcggcccggugagcucuaauggggccaacggagucaagggcuucuccuuuaaguauggcaacgggguguggaucggaagaacaaaaagcauuuccucucggaagggcuucgagaugaucugggauccuaauggguggaccggaaccgacaacaauuuuagcaucaaacaggacauuguuggcaucaacgaaugguccggguacucuggcagcuucgugcaacaccccgagcuuacaggacuggauuguauucgcccuugcuucugggucgaacucaucagaggccggcccaaggagaauacgauuuggaccuccgggagcucuaucuccuuuuguggagugaacagcgacacaguuggcuggucuuggcccgauggggcugagcugccuuucaccaucgacaaauga

SEQ ID NO: 215495 - RNA, 1410 nt, Artificial Sequence; identical to SEQ ID NO: 212329
  derived and/or modified CDS sequence (opt5) from neuraminidase__InfluenzaA__AGJ73374

SEQ ID NO: 215496 - RNA, 1410 nt, Artificial Sequence
  derived and/or modified CDS sequence (opt5) from neuraminidase__InfluenzaA__AGJ73376
augaaccccaaucagaagaucauuaccaucggcagcgugugcaugacaauugggauggccaaccugauccuccaaauuggaaauaucaucuccauuuggaucucucacagcauucagcugggcaaccagucccagaucgagacguguaaucaaucugucauuaccuacgaaaacaauacauggguuaaccagaccuaugugaauaucagcaacacaaauuucgcugccgggcaguccguggucucugugaaacuugcgggaaacagcucccugugcccuguuagcggcugggcuauuuacucuaaggacaauuccgugagaaucgggagcaaaggagaugucuuugugauccgggagccguucauuucuuguagcccccucgaaugccgcaccuuuuuccugacacagggcgcccuucugaacgacaagcauuccaauggcaccaucaaagauagaucuccuuaucggacgcucauguccugucccauuggggagguuccuagccccuacaacucccgcuuugaaucuguggccuggagcgcuuccgccugccacgacggaaucaacuggcugaccauuggcaucagcgggccugauucuggagcugucgccgugcugaaguauaauggcaucauuacagacaccaucaaguccuggagaaacaauauucuccggacacaagagagcgagugugcgugcgugaacgggucuuguuucaccaucaugacggauggaccgagcgacggccaggccuccuacaaaauucugcgcaucgaaaagggcaaaaucgucaagucuguugagaugaaugcucccaacuaucauuacgaagagugcagcuguuacccugauuccagcgagauuacaugcgugugcagagacaauuggcacgggucuaaccggcccuggguguccuuuaaucagaaccuugaauaucagaucggauacauuuguagcggcaucuucggggauaauccucgccccaacgacaaaaccggaucuugcggcccggucuccagcaauggggccaacggagugaagggcuuuuccuucaaguauggcaaugggguuuggauuggaagaacaaaaucuaucagcucccggaagggcuuugagaugauuugggauccuaacggguggaccggaaccgacaacaauuucucuacaaaacaagacaucgugggcaucaacgaauggagcggguacuccggcagcuuuguccagcaucccgagcugacgggacucgauuguauucgcccuugcuucuggguggaacugaucagaggccggcccaaggagaauaccauuuggacaucuggguccagcaucucuuucuguggaguuaacuccgacaccgugggcuggagcuggcccgauggggcugagcuuccuuuuacaauugacaaauga

SEQ ID NO: 215497 - RNA, 1410 nt, Artificial Sequence
  derived and/or modified CDS sequence (opt5) from neuraminidase__InfluenzaA__AGJ73379
augaaccccaaucagaagaucauuaccaucggcagcgugugcaugacaauugggauggccaaccugauccuccaaauuggaaauaucaucuccauuuggaucucucacagcauucagcugggcaaccagucccagaucgagacguguaaucaaucugucauuaccuacgaaaacaauacauggguuaaccagaccuaugugaauaucagcaacacaaauuucgcugccgggcaguccguggucucugugaaacuugcgggaaacagcucccugugcccuguuagcggcugggcuauuuacucuaaggacaauuccgugagaaucgggagcaaaggagaugucuuugugauccgggagccguucauuucuuguagcccccucgaaugccgcaccuuuuuccugacacagggcgcccuucugaacgacaagcauuccaauggcaccaucaaagauagaucuccuuaucggacgcucauguccugucccauuggggagguuccuagccccuacaacucccgcuuugaaucuguggccuggagcgcuuccgccugccacgacggaaucaacuggcugaccauuggcaucagcgggccugauucuggagcugucgccgugcugaaguauaauggcaucauuacagacaccaucaaguccuggagaaacaauauucuccggacacaagagagcgagugugcgugcgugaacgggucuuguuucaccaucaugacggauggaccgagcgacggccaggccuccuacaaaauuuuucgcaucgaaaagggcaaaaucgucaagucuguugagaugaaugcucccaacuaucauuacgaagagugcagcuguuacccugauuccagcgagauuacaugcgugugcagagacaauuggcacgggucuaaccggcccuggguguccuucaaucagaaccuggaauaucagaucggauacauuuguagcggcaucuuuggggauaauccucgccccaacgacaaaaccggaucuugcggcccggucuccagcaauggggccaacggagugaagggcuucuccuuuaaguauggcaaugggguuuggauuggaagaacaaaaucuaucagcucccggaagggcuucgagaugauuugggauccuaacggguggaccggaaccgacaacaauuuuucuaucaaacaagacaucauuggcaucaacgaauggagcggguacuccggcagcuucgugcagcaucccgagcuuacaggacuggauuguauucgcccuugcuucugggucgaacucaucagaggccggcccaaggagaauacgauuuggaccucuggguccagcaucucuuuuuguggagugaacuccgacacaguuggcuggagcuggcccgauggggcugagcugccuuucaccaucgacaaauga

SEQ ID NO: 215498 - RNA, 1410 nt, Artificial Sequence
  derived and/or modified CDS sequence (opt5) from neuraminidase__InfluenzaA__AGJ73381
augaaccccaaucagaagaucauuaccaucggcagcgugugcaugacaauugggauggccaaccugauccuccaaauuggaaauaucaucuccauuuggaucucucacagcauucagcugggcaaccagucccagaucgagacguguaaucaaucugucauuaccuacgaaaacaauacauggguuaaccagaccuaugugaauaucagcaacacaaauuucgcugccgggcaguccguggucucugugaaacuugcgggaaacagcucccugugcccuguuagcggcugggcuauuuacucuaaggacaauuccgugagaaucgggagcaaaggagaugucuuugugauccgggagccguucauuucuuguagcccccucgaaugccgcaccuuuuuccugacacagggcgcccuucugaacgacgagcauuccaauggcaccaucaaggauagaucuccuuaucggacgcucauguccugucccauuggggaaguuccuagccccuacaacucccgcuuugagucuguggccuggagcgcuuccgccugccacgacggaaucaacuggcugaccauuggcaucagcgggccugauucuggagcugucgccgugcugaaauauaauggcaucauuacagacaccaucaaguccuggagaaacaauauucuccggacacaagagagcgaaugugcgugcgugaacgggucuuguuucaccaucaugacggauggaccgagcgacggccaggccuccuacaagauuuuucgcaucgagaaaggcaagaucgucaaaucuguugaaaugaaugcucccaacuaucauuacgaggagugcagcuguuacccugauuccagcgaaauuacaugcgugugcagagacaauuggcacgggucuaaccggcccuggguguccuucaaucagaaccuggaguaucagaucggauacauuuguagcggcaucuuuggggauaauccucgccccaacgacaagaccggaucuugcggcccggucuccagcaauggggccaacggagugaaaggcuucuccuuuaaguauggcaaugggguuuggauuggaagaacaaagucuaucagcucccggaaaggcuucgaaaugauuugggauccuaacggguggaccggaaccgacaacaauuuuucuaucaagcaagacaucgugggcauuaacgaguggagcggguacuccggcagcuucguccagcaucccgaacuuacaggacuggauuguauccgcccuugcuucuggguggagcucauuagaggccggcccaaagagaauacgaucuggaccucuggguccagcauuucuuuuuguggaguuaacuccgacacagugggcuggagcuggcccgauggggcugaacugccuuucaccaucgacaaguga

SEQ ID NO: 215499 - RNA, 1410 nt, Artificial Sequence
  derived and/or modified CDS sequence (opt5) from neuraminidase__InfluenzaA__AGK62992
augaaccccaaucagaagaucauuaccaucggcagcgugucccugacaauuucuacgaucugcuucuuuaugcaaauugccauccucaucaccacagucacccugcacuucaaacaguacgaguuuaacagcccuccgaauaaccagguuaugcuuugugaacccacaauuaucgagagaaauauuaccgaaaucguguaucugacaaacaccacgauugagaaggaaaucugcccuaaacccgcugaguaccggaauugguccaagccucagugugacauuaccggguucgcccccuuuucuaaagauaacagcauccgccucuccgcgggaggcgacaucugggugacaagagagccuuaugucucuugcgauccggacaaguguuaccaauucgcucuggggcagggaaccacacuuaauaacgugcauagcaauaacaccguucgggaucgcacgcccuauagaacacugcucaugaaugaacugggcgugccuuuucaccuggggaccaagcaggucugcauugccugguccucuagcuccugucaugacggaaaagccuggcuccacgugugcaucacaggcgaugacaagaacgcuaccgccagcuucauuuacaauggccggcugguugauucuguggucuccuggagcaaagagauccuucgcacccaggaaucugagugugugugcauuaacgggacauguacgguggucaugaccgacggauccgcuagcggcaaggccgauacaaaaauccuguuuaucgaggaagggaagauuguucauaccuccacacucucuggaagcgcgcaacacguggaggaaugcuccugcuaucccagauacccuggcgugcggugugucugccgcgacaacuggaaggggagcaauagacccaucguggauauuaacaucaaagaccacucuauuguuuccagcuacguguguucuggacuggucggcgacaccccgcggaagaaugauagcuccucuagcucccauugccuugacccuaacaaugaggaaggcgggcacggagugaaaggcugggccuucgaugacgggaacgauguuuggaugggacgcacgaucaaugagacaagcagacugggcuaugagaccuuuaaggugaucgaaggguggucuaaccccaaauccaagcuccagauuaaucggcaggucaucguggaccgcggagauagaagcggcuacucuggcauuuucuccgucgaggugaaaagcuguaucaaccggugcuuuuauguugaacugauuagagggcgcaaggaggaaaccgaggugcuguggacauccaauucuaucgucguguucuguggaaccagcggcacauacgggacgggauccuggccugacggcgcugauauuaaccucaugcccaucuga

SEQ ID NO: 215500 - RNA, 1410 nt, Artificial Sequence
  derived and/or modified CDS sequence (opt5) from neuraminidase__InfluenzaA__AGK62996
augaaccccaaucagaagaucauuaccaucggcagcgugucccugauuaucucuacaauuugcuucuuuaugcaaaucgccauccucauuacgaccgucacacugcacuucaaacaguacgaguuuaacagcccuccgaauaaccagguuaugcuuugugaacccaccaucauugagagaaauaucacagaaauuguguaucugaccaacacaaccaucgagaaggaaauuugcccuaaacccgcugaguaccggaauugguccaagccucagugugacaucacgggguucgcccccuuuucuaaagauaacagcauccgccucuccgcgggaggcgacauuugggugaccagagagccuuaugucucuugcgauccggacaaguguuaccaauucgcucuggggcagggaacaacccuuaauaacgugcauagcaauaacacaguucgggaucgcacccccuauagaacgcugcucaugaaugaacugggcgugccuuuucaccuggggacaaagcaggucugcaucgccugguccucuagcuccugucaugacggaaaagccuggcuccacgugugcauuaccggcgaugacaagaacgcuacagccagcuucaucuacaauggccggcugguugauucuguggucuccuggagcaaagagauucuucgcacccaggaaucugagugugugugcaucaacgggaccuguacaguggucaugacggacggauccgcuagcggcaaggccgauaccaaaauccuguuuauugaggaagggaagaucguucauacauccacccucucuggaagcgcgcaacacguggaggaaugcuccugcuaucccagauacccuggcgugcggugugucugccgcgacaacuggaaggggagcaauagacccauuguggauaucaacauuaaagaccacucuaucguuuccagcuacguguguucuggacuggucggcgacacaccgcggaagaaugauagcuccucuagcucccauugccuugacccuaacaaugaggaaggcgggcacggagugaaaggcugggccuucgaugacgggaacgauguuuggaugggacgcaccaucaaugagacgagcagacugggcuaugagacauuuaaggugauugaaggguggucuaaccccaaauccaagcuccagaucaaucggcaggucauuguggaccgcggagauagaagcggcuacucuggcaucuucuccgucgagagcaaauccuguauuaaccggugcuuuuauguggaacugaucagagggcgcaaggaggaaaccgagguucuguggaccucuaauagcauuguggucuucuguggaacauccggcaccuacgggacaggaucuuggccugacggcgcugauaucaaccucaugcccaucuga

SEQ ID NO: 215501 - RNA, 1410 nt, Artificial Sequence
  derived and/or modified CDS sequence (opt5) from neuraminidase__InfluenzaA__AGK62998
augaaccccaaucagaagaucauuaccaucggcagcgugucccugacaauugccacgaucugcuucuuuaugcaaauugcuauccucaucaccacagucacccugcacuucaaacagugugaguuuaacucuccuccgaauaaccagguuaugcuuugcgaacccacaauuaucgagagaaauauuaccgaaaucguguaccugacaaacaccacgauugagaaggaaaucuguccuaaacucgccgaguaucggaauuggagcaagccccagugcgacauuaccggguucgcgccuuuuuccaaagauaacucuauccgccugagcgcuggaggcgacaucugggugacaagagagcccuacgucuccugugauccugacaagugcuaucaauucgcccuugggcagggaaccacacugaauaacgugcauucuaauaacaccguucgggaucgcacgccguacagaacacuccugaugaaugaacugggcgugcccuuucaccucgggaccaagcaggucuguauggccuggagcuccagcucuugccaugacggaaaggcuuggcugcacguguguauuacaggcgaugacaagaacgccaccgcuuccuucaucuauaauggccggcuuguugauagcguggucucuugguccaaagagauucugcgcacccaggaaagcgagugcguguguaucaacgggacaugcacgguggucaugaccgacggaucugccuccggcaaggcggauacaaaaauucucuuuaucgaggaagggaagaucguucauaccagcacacuguccggaucugcccaacacguggaggaaugcagcuguuacccuagauaucccggcgugcggugcgucugucgcgacaacuggaagggguccaauagaccuauuguggauaucaacauuaaagaccacagcaucguuucuuccuacgugugcagcggacuucugggcgacacgccccggaagaaugauucuagcuccucuagccauugucucgacccgaacaaugaggaaggcgggcacggagucaaaggcugggcuuucgaugacgggaacgauguguggaugggacgcaccauuuccgagaaaagcagacugggcuacgagacauuuaaaguuaucgaaggguggucuaauccuaaguccaaacugcagaucaaccgccaggugauugucgaccggggagauagaagcggcuauucuggcaucuucuccguggagagcaaguccugcauuaaucgguguuuuuacgucgaacucaucagagggcgcaaggaggaaaccgaggugcuguggaccucuaacagcauuguuguguucugcggaacauccggcaccuaugggacaggaucuuggcccgacggcgccgauaucaaucuuaugccuauuuga

SEQ ID NO: 215502 - RNA, 1410 nt, Artificial Sequence
  derived and/or modified CDS sequence (opt5) from neuraminidase__InfluenzaA__AGK63000
augaaccccaaucagaagaucauuaccaucggcagcgugucccugacaauugccacgaucugcuucuuuaugcaaauugcuauccucaucaccacagucacccugcacuucaaacagugugacuuuaacucuccuccgaauaaccagguuaugcuuugcgagcccacaauuaucgaaagaaauauuaccgagaucguguaccugacaaacaccacgauugaaaaggagaucuguccuaaacucgccgaauaucggaauuggagcaagccccagugcgauauuaccggguucgcgccuuuuuccaaagacaacucuauccgccugagcgcuggaggcgauaucugggugacaagagagcccuacgucuccugugacccugauaagugcuaucaauucgcccuugggcagggaaccacacugaauaacgugcauucuaauaacaccguucgggaccgcacgccguacagaacacuccugaugaaugagcugggcgugcccuuucaccucgggaccaagcaggucuguauggccuggagcuccagcucuugccaugauggaaaggcuuggcugcacguguguauuacaggcgacgauaaaaacgccaccgcuuccuucaucuauaauggcaaacuuguugacagcguggucucuugguccaaggaaauucugcggacccaggagagcgaaugcguguguaucaacgggacaugcacgguggucaugaccgauggaucugccuccggcaaagcggacacaaagauucucuuuaucgaggaggggaagaucguucauaccagcacacuguccggaucugcccaacacguggaagagugcagcuguuacccucgcuaucccggcgugagaugcgucugucgggauaacuggaaaggguccaaucgcccuauuguggacaucaacauuaaggaccacagcaucguuucuuccuacgugugcagcggacuugucggcgauacccccagaaagaaugacucuagcuccucuagccauugucuggauccgaacaaugaagagggcgggcacggagugaaaggcugggcuuucgacgaugggaacgacguuuggaugggacggacgauuaaugaaacaucccgccucggcuacgagaccuuuaaagugaucgagggguggagcaacccuaagucuaaacugcagaucaauagacaggucauuguggaucggggagaccgcuccggcuauagcggcaucuucucugucgaagggaaguccugcauuaacagauguuuuuacguggagcugauccggggaagaaaggaagagaccgaaguucucuggacaagcaauuccauuguggucuucugcggcaccucugggacauauggaacgggcagcuggcccgauggggccgacaucaaccugaugccuauuuga

SEQ ID NO: 215503 - RNA, 1410 nt, Artificial Sequence
  derived and/or modified CDS sequence (opt5) from neuraminidase__InfluenzaA__AGK63002
augaaccccaaucagaagaucauuaccaucggcagcgugucccugacaauuucuacgaucugcuucuuuaugcaaauugccauccucaugaccacagucacccugcacuucaaacagugugaguuuaacagcccuccgaauaaccagguuaugcuuugcgaacccacaaucauugagagaaauaucaccgaaauuguguaccugacaaacaccacgaucgagaaggaaauuuguccuaaacucgcugaguaucggaauugguccaagccccagugcgacaucaccggguucgccccuuuuucuaaagauaacagcauucgccuguccgcgggaggcgacaucugggugacaagagagcccuacgucucuugugauccugacaagugcuaucaauucgcucuugggcagggaaccacacugaauaacgugcauagcaauaacaccguucgggaucgcacgccguacagaacacuccugaugaaugaacugggcgugcccuuucaccucgggaccaagcaggucuguauggccugguccucuagcuccugccaugacggaaaagccuggcugcacguguguaucacaggcaacgauaagaaugcuaccgccagcuucauuuauaacggccggcuuguugacucuguggucuccuggagcaaagagauccugcgcacccaggaaucugagugcguguguauuaacgggacaugcacgguggucaugaccgauggauccgcuagcggcaaggccgacacaaaaauccucuuuauugaggaagggaagaucguucauaccuccacacugucuggaagcgcgcaacacguggaggaaugcuccuguuacccuagauaucccggcgugcggugcgucugucgcgauaauuggaaggggagcaacagaccuaucguggacauuaauaucaaagaucacucuauuguuuccagcuacgugugcucuggacuugucggcgacacgccccggaagaacgacagcuccucuagcucccauugucuggauccgaauaacgaggaaggcgggcacggagugaaaggcugggccuucgacgaugggaaugacguuuggaugggacgcaccaucacagagaccagcagacucggcuacgagaccuuuaaggugauugaaggguggucuaacccuaaauccaagcugcagaucaaucggcaggucaucguggaucgcggagacagaagcggcuauucuggcauuuucuccgucgaggggaaaagcugcaucaaccgguguuuuuacguggaacugauuagaggacgcaaggaggaaacagagguucucuggaccuccaauucuaucguggucuucugcggcacaagcgggacguauggaaccggcuccuggcccgauggggcugacauuaaccugaugccuaucuga

SEQ ID NO: 215504 - RNA, 1410 nt, Artificial Sequence
  derived and/or modified CDS sequence (opt5) from neuraminidase__InfluenzaA__AGK63004
augaaccccaaucagaagaucauuaccaucggcagcgugucccugacaauuucuacgaucugcuucuuuaugcaaauugccauccucaucaccacagucacccugcacuucaaacaguacgaguuuaacagcccuccgaauaaccagguuaugcuuugugaacccacaauuaucgagagaaauauuaccgaaaucguguaucugacaaacaccacgauugagaaggaaaucugcccuaaacccgcugaguaccggaauugguccaagccucagugugacauuaccggguucgcccccuuuucuaaagauaacagcauccgccucuccgcgggaggcgacaucugggugacaagagagccuuaugucucuugcgauccggacaaguguuaccaauucgcucuggggcagggaaccacacuuaauaacgugcauagcaauaacaccguucgggaucgcacgcccuauagaacacugcucaugaaugaacugggcgugccuuuucaccuggggaccaagcaggucugcauugccugguccucuagcuccugucaugacggaaaagccuggcuccacgugugcaucacaggcgaugacaagaacgcuaccgccagcuucauuuacaauggccggcugguugauucuguggucuccuggagcaaagagauccuucgcacccaggaaucugagugugugugcauuaacgggacauguacgguggucaugaccgacggauccgcuagcggcaaggccgauacaaaaauccuguuuaucgaggaagggaagauuguucauaccuccacacucucuggaagcucccaacacguggaggaaugcagcugcuaucccagauacccuggcgugcggugugucugccgcgacaacuggaaggggucuaauagacccaucguggauauuaacaucaaagaccacuccauuguuagcucuuacguguguagcggacuggucggcgacaccccgcggaagaaugauuccucuagcuccagccauugccuugacccuaacaaugaggaaggcgggcacggagugaaaggcugggcguucgaugacgggaacgauguuuggaugggacgcacgaucaaugagacaucuagacugggcuaugagaccuuuaaggugaucgaagggugguccaaccccaaaagcaagcuccagauuaaucggcaggucaucguggaccgcggagauagaucuggcuacuccggcauuuucagcgucgaggggaaauccuguaucaaccggugcuuuuauguggaacugauuagaggacgcaaggaggaaaccgagguucuguggacaucuaauagcaucguggucuucuguggcaccuccgggacauacggaacgggcucuuggccugacggggccgauauuaaccucaugcccaucuga

SEQ ID NO: 215505 - RNA, 1410 nt, Artificial Sequence
  derived and/or modified CDS sequence (opt5) from neuraminidase__InfluenzaA__AGK63006
augaaccccaaucagaagaucauuaccaucggcagcgugucccugacaauugccacgaucugcuucuuuaugcaaauugcuauccucaucaccacagucacccugcacuucaaacaguacgaguuuaacucuccuccgaauaaccagguuaugcuuugugaacccacaauuaucgagagaaauauuaccgaaaucguguaucugacaaacaccacgauugagaaggaaaucugcccuaaacccgccgaguaccggaauuggagcaagccucagugugacauuaccggguucgcgcccuuuuccaaagauaacucuauccgccucagcgcuggaggcgacaucugggugacaagagagccuuaugucuccugcgauccggacaaguguuaccaauucgcccuggggcagggaaccacacuuaauaacgugcauucuaauaacaccguucgggaucgcacgcccuauagaacacugcucaugaaugaacugggcgugccuuuucaccuggggaccaagcaggucugcauugccuggagcuccagcucuugucaugacggaaaggcuuggcuccacgugugcaucacaggcgaugacaaaaacgccaccgcuuccuucauuuacaauggccggcugguugauagcguggucucuugguccaaagagauccuucgcacccaggaaagcgagugugugugcauuaacgggacauguacgguggucaugaccgacggaucugccuccgcgaaggccgauacaaaaauccuguuuaucgaggaaggcaagauuguucauaccagcacacucuccgggucugcucaacacguggaggaaugcagcugcuaucccagauacuccggagugcggugugucugccgcgacaacuggaagggcagcaauagaccuaucguggauauuaacaucaaagaccacucuauuguuuccagcuacguguguucugggcuggucggagacacgccccggaagaaugauagcuccucuagcucccauugccuugacccgaacaaugaggaaggcggccacggggugaaaggaugggccuucgaugacggcaacgauguuuggauggggcgcaccaucaaugagacaagcagacugggauaugagaccuuuaaggugaucgaaggcuggucuaacccuaaaucccagcuccagauuaaucggcaggucaucguggaccgcggggauagaagcggauacucuggcauuuucuccgucgagagcaaguccuguaucaaccggugcuuuuauguggaacugauuagaggccgcaaagaggaaaccgagguucuguggacaucuaauagcaucguggucuucugugggaccuccggaacauacggcacggggucuuggcccgacggagcugauauuaaccucaugccuaucuga

SEQ ID NO: 215506 - RNA, 1410 nt, Artificial Sequence
  derived and/or modified CDS sequence (opt5) from neuraminidase__InfluenzaA__AGK63008
augaaccccaaucagaagaucauuaccaucggcagcgugucccugacaauugccacgaucugcuucuuuaugcaaauugcuauccucaucaccacagucacccugcacuucaaacagugugaguuuaacucuccuccgaauaaccagguuaugcuuugcgaacccacaauuaucgagagaaauauuaccgaaaucguguaccugacaaacaccacgauugagaaggaaaucuguccuaaacucgccgaguaucggaauuggagcaagccccagugcgacauuaccggguucgcgccuuuuuccaaagauaacucuauccgccugagcgcuggaggcgacaucugggugacaagagagcccuacgucuccugugauccugacaagugcuaucaauucgcccuugggcagggaaccacacugaauaacgugcauucuaauaacaccguucgggaucgcacgccguacagaacacuccugaugaaugaacugggcgugcccuuucaccucgggaccaagcaggucuguauggccuggagcuccagcucuugccaugacggaaaggcuuggcugcacguguguauuacaggcgaugacaaaaacgccaccgcuuccuucaucuauaauggcaaacuuguugauagcguggucucuugguccaaggagauucugcggacccaggaaagcgagugcguguguaucaacgggacaugcacgguggucaugaccgacggaucugccuccggcaaagcggauacaaagauucucuuuaucgaggaagggaagaucguucauaccagcacacuguccggaucugcccaacacguggaggaaugcagcuguuacccucgcuaucccggcgugagaugcgucugucgggacaacuggaaaggguccaaucgcccuauuguggauaucaacauuaaggaccacagcaucguuucuuccuacgugugcagcggacuugucggcgacacccccagaaagaaugauucuagcuccucuagccauugucuggacccgaacaaugaggaaggcgggcacggagugaaaggcugggcuuucgaugacgggaacgauguuuggaugggacggacgauuaaugagacaucccgccucggcuacgagaccuuuaaagugaucgaaggguggagcaacccuaagucuaaacugcagaugaauagacaggucaucguggaccggggagaucgcuccggcuauagcggcauuuucucugucgaggggaaguccugcaucaacagauguuuuuacguggaacugauucggggaagaaaggaggaaaccgagguucucuggacaagcaauuccaucguggucuucugcggcaccucugggacauauggaacgggcagcuggcccgacggggccgauauuaaccugaugccuaucuga

SEQ ID NO: 215507 - RNA, 1410 nt, Artificial Sequence
  derived and/or modified CDS sequence (opt5) from neuraminidase__InfluenzaA__AGK63010
augaaccccaaucagaagaucauuaccaucggcagcgugucccugacaauugccacgaucugcuucuuuaugcaaauugcuauccucaucaccacagucacccugcacuucaaacagugugaguuuaacucuccuccgaauaaccagguuaugcuuugcgaacccacaauuaucgagagaaauauuaccgaaaucguguaccugacaaacaccacgauugagaaggaaaucuguccuaaacucgccgaguaucggaauuggagcaagccccagugcgacauuaccggguucgcgccuuuuuccaaagauaacucuauccgccugagcgcuggaggcgacaucugggugacaagagagcccuacgucuccugugauccugacaagugcuaucaauucgcccuugggcagggaaccacacugaauaacgugcauucuaauaacaccguucgggaucgcacgccguacagaacacuccugaugaaugaacugggcgugcccuuucaccucgggaccaagcaggucuguauggccuggagcuccagcucuugccaugacggaaaggcuuggcugcacguguguauuacaggcgaugacaaaaacgccaccgcuuccuucaucuauaauggcaaacuuguugauagcguggucucuugguccaaggagauucugcggacccaggaaagcgagugcguguguaucaacgggacaugcacgguggucaugaccgacggaucugccuccggcaaagcggauacaaagauucucuuuaucgaggaagggaagaucguucauaccagcacacuguccggaucugcccaacacguggaggaaugcagcuguuacccucgcuaucccggcgugagaugcgucugucgggacaacuggaaaggguccaaucgcccuauuguggauaucaacauuaaggaccacagcaucguuucuuccuacgugugcagcggacuugucggcgacacccccagaaagaaugauucuagcuccucuagccauugucuggacccgaacaaugaggaaggcgggcacggagugaaaggcugggcuuucgaugacgggaacgauguuuggaugggacggacgauuaaugagacaucccgccucggcuacgagaccuuuaaagugaucgaaggguggagcgacccuaagucuaaacugcagaucaacagacaggucauuguggaucggggagaccgcuccggcuauagcggcaucuucucugucgaggggaaguccugcauuaauagauguuuuuacguggaacugauccggggaagaaaggaggaaaccgagguucucuggacaagcaacuccauuguggucuucugcggcaccucugggacauauggaacgggcagcuggcccgauggggccgacaucaaucugaugccuauuuga

SEQ ID NO: 215508 - RNA, 1410 nt, Artificial Sequence
  derived and/or modified CDS sequence (opt5) from neuraminidase__InfluenzaA__AGK63012
augaaccccaaucagaagaucauuaccaucggcagcgugucccugacaauuucuacgaucugcuucuuuaugcaaauugccauccucaucaccacagucacccugcacuucaaacaguacgaguuuaacagcccuccgaauaaccagguuaugcuuugugaacccacaauuaucgagagaaauauuaccgaaaucguguaucugacaaacaccacgauugagaaggaaaucugcccuaaacccgcugaguaccggaauugguccaagccucagugugacauuaccggguucgcccccuuuucuaaagauaacagcauccgccucuccgcgggaggcgacaucugggugacaagagagccuuaugucucuugcgauccggacaaguguuaccaauucgcucuggggcagggaaccacacuuaauaacgugcauagcaauaacaccguucgggaucgcacgcccuauagaacacugcucaugaaugaacugggcgugccuuuucaccuggggaccaagcaggucugcauugccugguccucuagcuccugucaugacggaaaagccuggcuccacgugugcaucacaggcgaugacaagaacgcuaccgccagcuucauuuacaauggccggcugguugauucuguggucuccuggagcaaagagauccuucgcacccaggaaucugagugugugugcauuaacgggacauguacgguggucaugaccgacggauccgcuagcggcaaggccgauacaaaaauccuguuuaucgaggaagggaagauuguucauaccuccacacucucuggaagcgcgcaacacguggaggaaugcuccugcuaucccagauacccuggcgugcggugugucugccgcgacaacuggaaggggagcaauagacccaucguggauauuaacaucaaagaccacucuauuguuuccagcuacguguguucuggacuggucggcgacaccccgcggaagaaugauagcuccucuagcucccauugccuugacccuaacaaugaggaaggcgggcacggagugaaaggcugggccuucgaugacgggaacgauguuuggaugggacgcacgaucaaugagacaagcagacugggcuaugagaccuuuaaggugaucgaaggguggucuaaccccaaauccaagcuccagauuaaucggcaggucaucguggaccgcggauacagaagcggcuauucuggcauuuucuccgucgaggggaaaagcuguaucaaccggugcuuuuacguggaucugauuagaggacgcaaggaagagaccgaaguucuguggacauccaauucuaucguggucuucuguggcaccagcgggacauauggaacgggcuccuggccugacggggcugauauuaaccucaugcccaucuga

SEQ ID NO: 215509 - RNA, 1410 nt, Artificial Sequence
  derived and/or modified CDS sequence (opt5) from neuraminidase__InfluenzaA__AGK63014
augaaccccaaucagaagaucauuaccaucggcagcgugucccugacaauuucuacgaucugcuucuuuaugcaaauugccauccucaucaccacagucacccugcacuucaaacaguacgaguuuaacagcccuccgaauaaccagguuaugcuuugugaacccacaauuaucgagagaaauauuaccgaaaucguguaucugacaaacaccacgauugagaaggaaaucugcccuaaacccgcugaguaccggaauugguccaagccucagugugacauuaccggguucgcccccuuuucuaaagauaacagcauccgccucuccgcgggaggcgacaucugggugacaagagagccuuaugucucuugcgauccggacaaguguuaccaauucgcucuggggcagggaaccacacuuaauaacgugcauagcaauaacaccguucgggaucgcacgcccuauagaacacugcucaugaaugaacugggcgugccuuuuccccuggggaccaagcaggucugcauugccugguccucuagcuccugucacgacggaaaagccuggcuccaugugugcaucacaggcgaugacaagaacgcuaccgccagcuucauuuacaauggccggcugguugauucuguggucuccuggagcaaagagauccaccgcacccaggaaucugagugugugugcauuaacgggacauguacgguggucaugaccgacggauccgcuagcggcaaggccgauacaaaaauccuuuuuaucgaggaagggaagauuguucauaccuccacacugucuggaagcgcgcaacacguggaggaaugcuccugcuauccuagauaccccggcgugcggugugucugccgcgacaacuggaaggggagcaauagaccgaucguggauauuaacaucaaagaccacucuauuguuuccagcuacguguguucuggacucgucggcgacaccccucggaagaaugauagcuccucuagcucccauugccuggaccccaacaaugaggaaggcgggcacggagugaaaggcugggccuucgaugacgggaacgauguuuggaugggacgcacgaucagcgagaagucuagacuuggcuaugagacauuuaaagugaucgaagggugguccaauccuaagagcaaacugcagauuaaccggcaggucaucguggaccgcggaaauagaucuggcuacuccggcauuuucagcgucgaggggaaguccuguaucaaccggugcuuuuauguggaacucauuagaggacgcaaggaggaaaccgagguucuguggaccucuaauagcaucguggucuucuguggcacauccgggaccuacggaacaggcucuuggcccgauggggcugacauuaaccugaugcccaucuga

SEQ ID NO: 215510 - RNA, 1410 nt, Artificial Sequence
  derived and/or modified CDS sequence (opt5) from neuraminidase__InfluenzaA__AGK63018
augaaccccaaucagaagaucauuaccaucggcagcgugucccugacaauuucuacgaucugcuucuuuaugcaaauugccauccucaucaccacagucacccugcacuucaaacagugugaguuuaacagcccuccgaauaaccagguuaugcuuugcgaacccacaauuaucgagagaaauauuaccgaaaucguguaccugacaaacaccacgauugagaaggaaaucuguccuaaacucgcugaguaucggaauugguccaagccccagugcgacauuaccggguucgccccuuuuucuaaagauaacagcauccgccuguccgcgggaggcgacaucugggugacaagagagcccuacgucucuugugauccugacaagugcuaucaauucgcucuugggcagggaaccacacugaauaacgugcauagcaauaacaccguucgggaucgcacgccguacagaacacuccugaugaaugaacugggcgugcccuuucaccucgggaccaagcaggucuguauggccugguccucuagcuccugccaugacggaaaagccuggcugcacguguguauuacaggcgaugacaagaacgcuaccgccagcuucaucuauaauggcaaacuuguugauucuguggucuccuggagcaaggagauucugcggacccaggaaucugagugcguguguaucaacgggacaugcacgguggucaugaccgacggauccgcuagcggcaaagccgauacaaagauucucuuuaucgaggaagggaagaucguucauaccuccacacugucuggaagcgcgcaacacguggaggaaugcuccuguuacccucgcuaucccggcgugagaugcgucugucgggacaacuggaaagggagcaaucgcccuauuguggauaucaacauuaaggaccacucuaucguuuccagcuacgugugcucuggacuugucggcgacacccccagaaagaaugauagcuccucuagcucccauugucuggacccgaacaaugaggaaggcgggcacggagugaagggcugggccuucgaugacgggaacgauguuuggaugggacggacgauuaaugagacaagccgccucggcuacgagaccuuuaaagugaucgaaggguggucuaacccuaaguccaaacugcagaucaauagacaggucauuguggaccggggagaucgcagcggcuauucuggcaucuucuccgucgaggggaaaagcugcauuaacagauguuuuuacguggaacugauccggggaagaaaggaggaaaccgagguucucuggacauccaauucuauuguggucuucugcggcaccagcgggacauauggaacgggcuccuggcccgacggggcugauaucaaccugaugccuauuuga

SEQ ID NO: 215511 - RNA, 1410 nt, Artificial Sequence
  derived and/or modified CDS sequence (opt5) from neuraminidase__InfluenzaA__AGK63020
augaaccccaaucagaagaucauuaccaucggcagcgugucccugacaauuucuacgaucugcuucuuuaugcaaauugccauccucaucaccacagucacccugcacuucaaacaguacgaguuuaacagcccuccgaauaaccagguuaugcuuugugaacccacaauuaucgagagaaauauuaccgaaaucguguaucugacaaacaccacgauugagaaggaaaucugcccuaaacccgcugaguaccggaauugguccaagccucagugugacauuaccggguucgcccccuuuucuaaagauaacagcauccgccucuccgcgggaggcgacaucugggugacaagagagccuuaugucucuugcgauccggacaaguguuaccaauucgcucuggggcagggaaccacacuuaauaacgugcauagcaauaacaccguucgggaucgcacgcccuauagaacacugcucaugaaugaacugggcgugccuuuucaccuggggaccaagcaggucugcauugccugguccucuagcuccugucaugacggaaaagccuggcuccacgugugcaucacaggcgaugacaagaacgcuaccgccagcuucauuuacaauggccggcugguugauucuguggucuccuggagcaaagagauccuucgcacccaggaaucugagugugugugcauuaacgggacauguacgguggucaugaccgacggauccgcuagcggcaaggccgauacaaaaauccuguuuaucgaggaagggaagauuguucauaccuccacacucucuggaagcgcgcaacacguggaggaaugcuccugcuaucccagauacccuggcgugcggugugucugccgcgacaacuggaaggggagcaauagacccaucguggauauuaacaucaaagaccacucuauuguuuccagcuacguguguucuggacuggucggcgacaccccgcggaagaaugauagcuccucuagcucccauugccuugacccuaacaaugaggaaggcgggcacggagugaaaggcugggccuucgaugacgggaacgauguuuggaugggacgcacgaucaaugagacaagcagacugggcuaugagaccuuuaaggugaucgaaggguggucuaaccccaaauccaagcuccagauuaaucggcaggucaucguggaccgcggagauagaagcggcuacucuggcauuuucuccgucgaggggaaaagcuguaucaaccggugcuuuuauguggaacugauuagaggacgcaaggaggaaaccgagguucuguggacauccaauucuaucguggucuucuguggcaccagcgggacauacggaacgggcuccuggccugacggggcugauauuaaccucaugcccaucuga

SEQ ID NO: 215512 - RNA, 1410 nt, Artificial Sequence
  derived and/or modified CDS sequence (opt5) from neuraminidase__InfluenzaA__AGK63022
augaaccccaaucagaagaucauuaccaucggcagcgugucccugacaauuucuacgaucugcuucuuuaugcaaauugccauccucaucaccacagucacccugcacuucaaacagugugaguuuaacagcccuccgaauaaccagguuaugcuuugcgaacccacaauuaucgagagaaauauuaccgaaaucguguaccugacaaacaccacgauugagaaggaaaucuguccuaaacucgcugaguaucggaauugguccaagccccagugcgacauuaccggguucgccccuuuuucuaaagauaacagcauccgccuguccgcgggaggcgacaucugggugacaagagagcccuacgucucuugugauccugacaagugcuaucaauucgcucuugggcagggaaccacacugaauaacgugcauagcaauaacaccguucgggaucgcacgccguacagaacacuccugaugaaugaacugggcgugcccuuucaccucgggaccaagcaggucuguauggccugguccucuagcuccugccaugacggaaaagccuggcugcacguguguauuacaggcgaugacaagaacgcuaccgccagcuucaucuauaauggcaaacuuguugauucuguggucuccuggagcaaggagauucugcggacccaggaaucugagugcguguguaucaacgggacaugcacgguggucaugaccgacggauccgcuagcggcaaagccgauacaaagauucucuuuaucgaggaagggaagaucguucauaccuccacacugucuggaagcgcgcaacacguggaggaaugcuccuguuacccucgcuaucccggcgugagaugcgucugucgggacaacuggaaagggagcaaucgcccuauuguggauaucaacauuaaggaccacucuaucguuuccagcuacgugugcucuggacuugucggcgacacccccagaaagaaugauagcuccucuagcucccauugucuggacccgaacaaugaggaaggcgggcacggagugaagggcugggccuucgaugacgggaacgauguuuggaugggacggacgauuaaugagacaagccgccucggcuacgagaccuuuaaagugaucgaaggguggucuaacccuaaguccaaacugcagaucaauagacaggucauuguggaccggggagaucgcagcggcuauucuggcaucuucuccgucgaggggaaaagcugcauuaacagauguuuuuacguggaccugauccggggaagaaaggaagagaccgaaguucucuggacauccaauucuauuguggucuucugcggcaccagcgggacauauggaacgggcuccuggcccgauggggcugacaucaaccugaugccuauuuga

SEQ ID NO: 215513 - RNA, 1410 nt, Artificial Sequence; identical to SEQ ID NO: 215511
  derived and/or modified CDS sequence (opt5) from neuraminidase__InfluenzaA__AGK63024

SEQ ID NO: 215514 - RNA, 1410 nt, Artificial Sequence; identical to SEQ ID NO: 215511
  derived and/or modified CDS sequence (opt5) from neuraminidase__InfluenzaA__AGK63026

SEQ ID NO: 215515 - RNA, 1410 nt, Artificial Sequence
  derived and/or modified CDS sequence (opt5) from neuraminidase__InfluenzaA__AGK63028
augaaccccaaucagaagaucauuaccaucggcagcgugucccugacaauuucuacgaucugcuucuuuaugcaaauugccauccucaucaccacagucacccugcacuucaaacaguacgaguuuaacagcccuccgaauaaccagguuaugcuuugugaacccacaauuaucgagagaaauaagaccgaaauuguguaucugacaaacaccacgaucgagaaagaaauuugcccuaagcccgcugaguaccggaauugguccaaaccucagugugacaucaccggguucgcccccuuuucuaaggauaacagcauucgccucuccgcgggaggcgacaucugggugacaagagagccuuaugucucuugcgauccggacaaguguuaccaauucgcucuggggcagggaaccacacuuaauaacgugcauagcaauaacaccguucgggaucgcacgcccuauagaacacugcucaugaaugaacugggcgugccuuuucaccuggggaccaaacaggucugcaucgccugguccucuagcuccugucaugacggaaaggccuggcuccacgugugcauuacaggcgaugacaaaaacgcuaccgccagcuucaucuacaauggccggcugguugauucuguggucuccuggagcaaggagauucuucgcacccaggaaucugagugugugugcaucaacgggacauguacgguggucaugaccgacggauccgcuagcggcaaagccgauacaaagauucuguuuaucgaggaagggaagguugugcauaccuccacacucucuggaagcgcgcaacacguggaggaaugcuccugcuaucccagauacccuggcguccggugugugugccgcgacaacuggaaagggagcaauagacccaucguugauauuaacaucaaggaccacucuauuguguccagcuacgucuguucuggacuggugggcgacaccccgcggaaaaaugauagcuccucuagcucccauugccuugacccuaacaaugaggaaggcgggcacggaguuaagggcugggccuucgaugacgggaacgauguguggaugggacgcacgaucaaugagacaagcagacugggcuaugagaccuuuaaagucauugaaggguggucuaaccccaaguccaaacuccagaucaaucgccaggugaucgucgaccggggagauagaagcggcuacucuggcauuuucuccguggaggcuaagagcuguaucauucggugcuuuuauguugaacugaucagagggcgcaaggaggaaaccgaggugcuguggacauccaacucuauugucguguucuguggaaccagcggcacauacgggacgggauccuggccugacggcgccgauaucaaucucaugcccauuuga

SEQ ID NO: 215516 - RNA, 1410 nt, Artificial Sequence; identical to SEQ ID NO: 215510
  derived and/or modified CDS sequence (opt5) from neuraminidase__InfluenzaA__AGK63030

SEQ ID NO: 215517 - RNA, 1410 nt, Artificial Sequence
  derived and/or modified CDS sequence (opt5) from neuraminidase__InfluenzaA__AGK63032
augaaccccaaucagaagaucauuaccaucggcagcgugucccugacaauuucuacgaucugcuucuuuaugcaaauugccauccucaucaccacagucacccugcacuucaaacaguacgaguuuaacagcccuccgaauaaccagguuaugcuuugugaacccacaauuaucgagagaaauauuaccgaaaucguguaucugacaaacaccacgauugagaaggaaaucugcccuaaacucgcugaguaccggaauugguccaagccccagugugacauuaccggguucgccccuuuuucuaaagauaacagcauccgccuguccgcgggaggcgacaucugggugacaagagagcccuaugucucuugcgauccugacaaguguuaccaauucgcucuugggcagggaaccacacugaauaacgugcauagcaauaacaccguucgggaucgcacgccguauagaacacuccugaugaaugaacugggcgugcccuuucaccucgggaccaagcaggucugcauggccugguccucuagcuccugucaugacggaaaagccuggcugcacgugugcauuacaggcgaugacaagaacgcuaccgccagcuucaucuacaauggcaaacuuguugauucuguggucuccuggagcaaggagauucugcggacccaggaaucugagugugugugcaucaacgggacauguacgguggucaugaccgacggauccgcuagcggcaaagccgauacaaagauucucuuuaucgaggaagggaagaucguucauaccuccacacugucuggaagcgcgcaacacguggaggaaugcuccugcuauccucgcuaccccggcgugagaugugucugccgggacaacuggaaagggagcaaucgcccuauuguggauaucaacauuaaggaccacucuaucguuuccagcuacguguguucuggacuugucggcgacacccccagaaagaaugauagcuccucuagcucccauugccuggacccgaacaaugaggaaggcgggcacggagugaagggcugggccuucgaugacgggaacgauguuuggaugggacggacgauuacagagaccagccgccucggcuaugagaccuuuaaagugaucgaaggguggucuaauccuaaguccaaacugcagaucaacagacaggucauuguggaccggggaaaucgcagcggcuacucuggcaucuucuccgucgaggggaaaagcuguauuaacagaugcuuuuauguggaacugauccggggaagaaaggaggaaacagagguucucuggaccuccaauucuauuguggucuucuguggcacaagcgggacguacggaaccggcuccuggcccgauggggcugacaucaaccugaugccuauuuga

SEQ ID NO: 215518 - RNA, 1410 nt, Artificial Sequence
  derived and/or modified CDS sequence (opt5) from neuraminidase__InfluenzaA__AGK63034
augaaccccaaucagaagaucauuaccaucggcagcgugucccugacaauuucuacgaucugcuucuuuaugcaaauugccauccucaucaccacagucacccugcacuucaaacagugugaguuuaacagcccuccgaauaaccagguuaugcuuugcgaacccacaauuaucgagagaaauauuaccgaaaucguguaccugacaaacaccacgauugagaaggaaaucuguccuaaacucgcugaguaucggaauugguccaagccccagugcgacauuaccggguucgccccuuuuucuaaagauaacagcauccgccuguccgcgggaggcgacaucugggugacaagagagcccuacgucucuugugauccugacaagugcuaucaauucgcucuugggcagggaaccacacugaauaacgugcauagcaauaacaccguucgggaucgcacgccguacagaacacuccugaugaaugaacugggcgugcccuuucaccucgggaccaagcaggucuguauggccugguccucuagcuccugccaugacggaaaagccuggcugcacguguguauuacaggcgaugacaagaacgcuaccgccagcuucaucuauaauggcaaacuuguugauucuguggucuccuggagcaaggagauucugcggacccaggaaucugagugcguguguaucaacgggacaugcacgguggucaugaccgacggauccgcuagcggcaaagccgauacaaagauucucuuuaucgaggaagggaagaucguucauaccuccacacugucuggaagcgcgcaacacguggaggaaugcuccuguuacccucgcuaucccggcgugagaugcgucugucgggacaacuggaaagggagcaaucgcccuauuguggauaucaacauuaagguucacucuaucguguccagcuacgucugcucuggacuugugggcgacacccccagaaagaaugacagcuccucuagcucccauugucuggauccgaacaaugaggaaggcgggcacggaguuaagggcugggccuucgacgaugggaacgacguguggaugggacggacgauuaaugagacaagccgccucggcuacgagaccuuuaaagucaucgaaggguggucuaacccuaaguccaaacugcagaucaauagacaggugauugucgaucggggagaccgcagcggcuauucuggcaucuucuccguggaggggaaaagcugcauuaacagauguuuuuacguugaacugauccggggaagaaagaaagagaccgaagugcucuggacauccaauucuauugucguguucugcggcaccagcgggacauauggaacgggcuccuggcccgauggggcugacaucaaccugaugccuauuuga

SEQ ID NO: 215519 - RNA, 1410 nt, Artificial Sequence
  derived and/or modified CDS sequence (opt5) from neuraminidase__InfluenzaA__AGK63036
augaaccccaaucagaagaucauuaccaucggcagcgugucccugacaauuucuacgaucugcuucuuuaugcaaauugccauccucaucaccacagucacccugcacuucaaacaguacgaguuuaacagcccuccgaauaaccagguuaugcuuugugaacccacaauuaucgagagaaauauuaccgaaaucguguaucugacaaacaccacgauugagaaggaaaucugcccuaaacccgcugaguaccggaauugguccaagccucagugugacauuaccggguucgcccccuuuucuaaagauaacagcauccgccucuccgcgggaggcgacaucugggugacaagagagccuuaugucucuugcgauccggacaaguguuaccaauucgcucuggggcagggaaccacacuuaauaacgugcauagcaauaacaccguucgggaucgcacgcccuauagaacacugcucaugaaugaacugggcgugccuuuucaccuggggaccaagcaggucugcauugccugguccagcagcuccugucaugacggaaaagccuggcuccacgugugcaucacaggcgaugacaagaacgcuaccgccagcuucauuuacaauggccggcugguugauucuguggucuccuggagcaaagagauccuucgcacccaggaaucugagugugugugcauuaacgggacauguacgguggucaugaccgacggauccgcuagcggcaaggccgauacaaaaauccuguuuaucgaggaagggaagauuguucauaccuccacacucucuggaagcgcgcaacacguggaggaaugcuccugcuaucccagauacccuggcgugcggugugucugccgcgacaacuggaaggggagcaauagacccaucguggauauuaacaucaaagaccacucuauuguuuccagcuacguguguucuggacuggucggcgacaccccgcggaagaaugauagcuccucuagcucccauugccuugacccuaacaaugaggaaggcgggcacggagugaaaggcugggccuucgaugacgggaacgauguuuggaugggacgcacgaucaaugagacaagcagauuuggcuaugagaccaucaaggugauugaaggguggucuaaccccaaauccaaucugcagaucaaccggcaggucauuguggaccgcggaaauagaagcggcuacucuggcaucuucuccgucgaggggaagucuuguauuaaccggugcuuuuauguggaacucaucagaggacgcaaagaggaaaccgagguucuguggacauccaauucuauuguggucuucuguggcaccagcgggacauacggaacgggcuccuggccugauggggcugacaucaaccugaugcccaucuga

SEQ ID NO: 215520 - RNA, 1410 nt, Artificial Sequence
  derived and/or modified CDS sequence (opt5) from neuraminidase__InfluenzaA__AGK63038
augaaccccaaucagaagaucauuaccaucggcagcgugucccugacaauuucuacgaucugcuucuuuaugcaaauugccauccucaucaccacagucacccugcacuucaaacaguacgaguuuaacagcccuccgaauaaccagguuaugcuuugugaacccacaauuaucgagagaaauauuaccgaaaucguguaucugacaaacaccacgauugagaaggaaaucugcccuaaacucgcugaguaccggaauugguccaagccccagugugacauuaccggguucgccccuuuuucuaaagauaacagcauccgccuguccgcgggaggcgacaucugggugacaagagagcccuaugucucuugcgauccugacaaguguuaccaauucgcucuugggcagggaaccacacugaauaacgugcauagcaauaacaccguucgggaucgcacgccguauagaacacuccugaugaaugaacugggcgugcccuuucaccucgggaccaagcaggucugcauggccugguccucuagcuccugucaugacggaaaagccuggcugcacgugugcauuacaggcgaugacaagaacgcuaccgccagcuucaucuacaauggcaaacuuguugauucuguggucuccuggagcaaggagauucugcggacccaggaaucugagugugugugcaucaacgggacauguacgguggucaugaccgacggauccgcuagcggcaaagccgauacaaagauucucuuuaucgaggaagggaagaucguucauaccuccacacugucuggaagcgcgcaacacguggaggaaugcuccugcuauccucgcuaccccggcgugagaugugucugccgggacaacuggaaagggagcaaucgcccuauuguggauaucaacauuaaggaccacucuaucguuuccagcuacguguguucuggacuugucggcgacacccccagaaagaaugauagcuccucuagcucccauugccuggacccgaacaaugaggaaggcgaucacggggugaaaggaugggccuucgacgauggcaacgacguuuggauggggcggacgauuaaugagacaagccgccucggauaugagaccuuuaaagugaucgaaggcuggucuaacccuaaguccaaacugcagaucaauagacaggucauuguggaucgggggaaccgcagcggauacucuggcaucuucuccgucgagagcaaguccuguauuaauagaugcuuuuauguggaacugauccggggcagaaaggaggaaaccgagguucucuggacaucuaacagcauuguggucuucugugggaccuccggaacauacggcacggggucuuggcccgacggagcugauaucaaucugaugccuauuuga

SEQ ID NO: 215521 - RNA, 1410 nt, Artificial Sequence
  derived and/or modified CDS sequence (opt5) from neuraminidase__InfluenzaA__AGK63040
augaaccccaaucagaagaucauuaccaucggcagcgugucccugacaauuucuacgaucugcuucuuuaugcaaauugccauccucaucaccacagucacccugcacuucaaacagugugaguuuaacagcccuccgaauaaccagguuaugcuuugcgaacccacaauuaucgagagaaauauuaccgaaaucguguaccugacaaacaccacgauugagaaggaaaucuguccuaaacucgcugaguaucggaauugguccaagccccagugcaacauuaccggguucgccccuuuuucuaaagacaauagcauccgccuguccgcgggaggcgauaucugggugacaagagagcccuacgucucuugugacccugauaagugcuaucaauucgcucuugggcagggaaccacacugaacaaugugcauagcaacaauaccguucgggaccgcacgccguacagaacacuccugaugaacgaacugggcgugcccuuucaccucgggaccaagcaggucuguauggccugguccucuagcuccugccaugauggaaaagccuggcugcacguguguauuacaggcgacgauaagaaugcuaccgccagcuucaucuauaacggcaaacuuguugacucuguggucuccuggagcaaggagauucugcggacccaggaaucugagugcguguguaucaacgggacaugcacgguggucaugaccgauggauccgcuagcggcaaagccgacacaaagauucucuuuaucgaggaagggaagaucguucauaccuccacacugucuggaagcgcgcaacacguggaggaaugcuccuguuacccucgcuaucccggcgugagaugcgucugucgggauaauuggaaagggagcaaccgcccuauuguggacaucaauauuaaggaucacucuaucguuuccagcuacgugugcucuggacuugucggcgacacccccagaaagaacgacagcuccucuagcucccauugucuggauccgaauaacgaggaaggcgggcacggagugaagggcugggccuucgacgaugggaaugacguuuggaugggacggacgauuaacgagacaagccgccucggcuacgagaccuuuaaagugaucgaaggguggucuaauccuaaguccaaacugcagaucaacagacaggucauuguggaucggggagaccgcagcggcuauucuggcaucuucuccgucgaggggaaaagcugcauuaauagauguuuuuacguggaacugauccggggaagaaaggaggaaaccgagguucucuggacauccaacucuauuguggucuucugcggcaccagcgggacauauggaacgggcuccuggcccgauggggcugacaucaaucugaugccuauuuga

SEQ ID NO: 215522 - RNA, 1410 nt, Artificial Sequence
  derived and/or modified CDS sequence (opt5) from neuraminidase__InfluenzaA__AGK63042
augaaccccaaucagaagaucauuaccaucggcagcgugucccugacaauuucuacgaucugcuucuuuaugcaaauugccauccucaucaccacagucacccugcacuucaaacagugugaguuuaacccuccgcccaauaaccagguuaugcuuugcgaaccuacaauuaucgagagaaauauuaccgaaaucguguaccugacaaacaccacgauugagaaggaaaucugucccaaacucgcugaguaucggaauuggagcaagccucagugcgacauuaccggguucgcccccuuuuccaaagauaacucuauccgccugagcgcgggaggcgacaucugggugacaagagagccuuacgucuccugugauccggacaagugcuaucaauucgcucuugggcagggaaccacacugaauaacgugcauucuaauaacaccguucgggaucgcacgcccuacagaacacuccugaugaaugaacugggcgugccuuuucaccucgggaccaagcaggucuguauggccuggagcuccagcucuugccaugacggaaaagccuggcugcacguguguauuacaggcgaugacaagaacgcuaccgccuccuucaucuauaauggcaaacuuguugauagcguggucucuugguccaaggagauucugcggacccaggaaagcgagugcguguguaucaacgggacaugcacgguggucaugaccgacggaucugcuuccggcaaagccgauacaaagauucucuuuaucgaggaagggaagaucguucauaccagcacacuguccggaucugcgcaacacguggaggaaugcagcuguuacccccgcuauccuggcgugagaugcgucugucgggacaacuggaaaggguccaaucgccccauuguggauaucaacauuaaggaccacagcaucguuucuuccuacgugugcagcggacuugucggcgacaccccgcggaaaaaugauucuagcuccucuagccauugucuggacccuaacaaugaggaaggcgggcacggagugaagggcugggccuucgaugacgggaacgauguuuggaugggaagaacgauuaaugagacaucccgccucggcuacgagaccuuuaaagugaucgaaggguggagcaaccccaagucuaaacugcagaucaauagacaggucauuguggaccggggagaucgcuccggcuauagcggcaucuucucugucgaggggaaguccugcauuaacagauguuuuuacguggaacugauccggggaagaaaggaggaaaccgagguucucuggacaagcaauuccauuguggucuucugcggcaccucugggacauauggaacgggcagcuggccugacggggcugauaucaaccugaugcccauuuga

SEQ ID NO: 215523 - RNA, 1410 nt, Artificial Sequence
  derived and/or modified CDS sequence (opt5) from neuraminidase__InfluenzaA__AGK63044
augaaccccaaucagaagaucauuaccaucggcagcgugucccugacaauuucuacgaucugcuucuuuaugcaaauugccauccucaucaccacagucacccugcacuucaaacagugugaguuuaacagcccuccgaauaaccagguuaugcuuugcgaacccacaauuaucgagagaaauauuaccgaaaucguguaccugacaaacaccacgauugagaaggaaaucuguccuaaacucgcugaguaucggaauugguccaagccccagugcgacauuaccggguucgccccuuuuucuaaagauaacagcauccgccuguccgcgggaggcgacaucugggugacaagagagcccuacgucucuugugauccugacaagugcuaucaauucgcucuugggcagggaaccacacugaauaacgugcauagcaauaacaccguucgggaucgcacgccguacagaacacuccugaugaaugaacugggcgugcccuuucaccucgggaccaagcaggucuguauggccugguccucuagcuccugccaugacggaaaagccuggcugcacguguguauuacaggcgaugacaagaacgcuaccgccagcuucaucuauaauggcaaacuuguugauucuguggucuccuggagcaaggagauucugcggacccaggaaucugagugcguguguaucaacgggacaugcacgguggucaugaccgacggauccgcuagcggcaaagccgauacaaagauucucuuuaucgaggaagggaagaucguucauaccuccacacugucuggaagcgcgcaacacguggaggaaugcuccuguuacccucgcuaucccggcgugagaugcgucugucgggacaacuggaaagggagcaaucgcccuauuguggauaucaacauuaaggaccacucuaucguuuccagcuacgugugcucuggacuugucggcgacacccccagaaagaaugauagcuccucuagcucccauugucuggacccgaacaaugaggaaggcgggcacggagugaaaggcugggccuucgaugacgggaacgauguuuggaugggacggacgauuaaugagacaagccgccucggcuacgagaccuuuaaagugaucgaaggguggucuaacccuaaguccaaacugcagaucaauagacaggucauuguggaccggggauaucgcagcggcuacucuggcaucuucuccgucgagagcaaguccugcauuaacagauguuuuuauguggaacugcuccgggggagaaaggaggaaaccgagguucuguggacaucuaauagcaucguggucuucugcggaaccuccggcacauacgggacgggaucuuggcccgauggcgcugacauuaaccuuaugccuaucuga

SEQ ID NO: 215524 - RNA, 1410 nt, Artificial Sequence
  derived and/or modified CDS sequence (opt5) from neuraminidase__InfluenzaA__AGK63046
augaaccccaaucagaagaucauuaccaucggcagcgugucccugacaauuucuacgaucugcuucuuuaugcaaauugccauccucaucaccacagucacccugcacuucaaacauuacgaguuuaacagcccuccgaauaaccagguuaugcuuugugaacccacaauuaucgagagaaauauuaccgaaaucguguaucugacaaacaccacgauugagaaggaaaucugcccuaaacccgcugaguaccggaauugguccaagccucagugugacauuaccggguucgcccccuuuucuaaagauaacagcauccgccucuccgcgggaggcgacaucugggugacaagagagccuuaugucucuugcgauccggacaaguguuaccaguucgcucuggggcaaggaaccacacuuaauaacgugcacagcaauaacaccguucgggaucgcacgcccuauagaacacugcucaugaaugaacugggcgugccuuuucaucuggggaccaagcaggucugcauugccugguccucuagcuccugucacgacggaaaagccuggcuccaugugugcaucacaggcgaugacaagaacgcuaccgccagcuucauuuacaauggccggcugguugauucuguggucuccuggagcaaagagauccuucgcacccaggaaucugagugugugugcauuaacgggacauguacgguggucaugaccgacggauccgcuagcggcaaggccgauacaaaaauccuguuuaucgaggaagggaagauuguucacaccuccacacucucuggaagcgcgcagcacguggaggaaugcuccugcuaucccagauacccuggcgugcggugugucugccgcgacaacuggaaggggagcaauagacccaucguggauauuaacaucaaagaccauucuauuguuuccagcuacguguguucuggacuggucggcgacaccccgcggaagaaugauagcuccucuagcucccacugccuugacccuaacaaugaggaaggcgggcauggagugaaaggcugggccuucgaugacgggaacgauguuuggaugggacgcacgaucaaugagacaagcagacugggcuaugagaccuuuaaggugaucgaaggguggucuaaccccaaauccaagcuccaaauuaaucggcaggucaucguggaccgcggagauagaagcggcuacucuggcauuuucuccgucgaggggaaaagcuguaucaaccggugcuuuuauguggaccugauuagaggacgcaaggaagagaccgaaguucuguggacauccaauucuaucguggucuucuguggcaccagcgggacauacggaacgggcuccuggccugauggggcugacauuaaccucaugcccaucuga

SEQ ID NO: 215525 - RNA, 1398 nt, Artificial Sequence
  derived and/or modified CDS sequence (opt5) from neuraminidase__InfluenzaA__AGK82159
augaaccccaaucagaagauccugugcaccagcgccacagcuauuaucauuggcgccaucgcggugcucauugggaucgcuaaccugggacuuaauaucggccugcaccucaaaccuggguguaacugcucccauucucaaccggagacgaccaauacaagccagaccauuaucaacaauuacuauaacgaaacaaauauuaccaacauccagauggaggaaagaacaucccggaauuucaacaaucugaccaagggacuuuguacgauuaacucuuggcacaucuacggcaaagacaaugccguccgcauuggggagagcuccgauguucuggugaccagagaacccuaugugucuugcgacccugaugagugucgguuuuacgcccucagccagggaacaaccauccgcggcaagcauuccaacgagacaauccacgacagaagccaauaucgggcucugauuucuuggccccuguccagcccucccaccgucuacaacucucgcguggaaugcaucggcugguccagcacgucuugucaugaugggaaauccagaaugagcauuugcaucuccggaccuaauaacaaugccucugcuguugugugguauaaccggcgcccggucgccgagauuaauacaugggcgagaaacauccuccggacccaggaaagcgagugugugugccacaauggcguuugucccguggucuucacagacggguccgccaccggaccugcugauacccgcaucuacuacuuuaaggagggcaagauucugaaaugggaaagccuuacagggacggccaagcacaucgaggaaugcucuugcuauggagagagaaccggcauuacauguaccugccgggacaacuggcagggcuccaaucgccccgugauccagauugauccuguggcuaugacacauaccagccaauacaucuguucucccguccugacggacaacccgagaccuaaugaucccaacaucgggaaaugcaaugacccuuaucccggaaacaauaacaacggcguuaagggguucagcuaccucgauggagccaauacauggcugggccggaccauuuccaccgcgucuagaagcggguaugaaaugcuuaaagugcccaacgcccugacagacgaccgcuccaagccuauccagggacagaccauugugcucaaugcugauuggagcggcuacucuggcuccuuuauggacuauugggccgagggggauuguuaccgggcuugcuucuacgucgagcugaucagaggacgcccgaaggaagacaaagugugguggacaagcaacucuauuguuuccauguguagcuccacggaguuucugggccaguggaauuggcccgauggggccaagaucgaauauuuccucuga

SEQ ID NO: 215526 - RNA, 1398 nt, Artificial Sequence
  derived and/or modified CDS sequence (opt5) from neuraminidase__InfluenzaA__AGK84858
augaaccccaaucagaagauccugugcaccagcgccacagcuauuaucauuggcgccaucgcggugcucauugggaucgcuaaccugggacuuaauaucggccugcaccucaaaccuggguguaacugcucccauucucaaccggagacgaccaauacaagccagaccauuaucaacaauuacuauaacgaaacaaauauuaccaacauccagauggaggaaagaacaucccggaauuucaacaaucugaccaagggacuuuguacgauuaacucuuggcacaucuacggcaaagacaaugccguccgcauuggggagagcuccgauguucuggugaccagagaacccuaugugucuugcgacccugaugagugucgguuuuacgcccucagccagggaacaaccauccgcggcaagcauuccaacggcacaauccacgacagaagccaauaucgggcucugauuucuuggccccuguccagcccucccaccgucuacaacucucgcguggagugcaucgggugguccagcacgucuugucaugauggaaaauccagaaugagcauuugcaucuccggcccuaauaacaaugccucugcuguugugugguauaaccggcgcccggucgccgaaauuaauacaugggcgagaaacauccuccggacccaggagagcgaaugugugugccacaaugggguuugucccguggucuucacagacggauccgccaccggcccugcugauacccgcaucuacuacuuuaaggaggggaagauucugaaaugggagagccuuacaggaacggccaagcacaucgaagagugcucuugcuauggcgaaagaaccggcauuacauguaccugccgggacaacuggcagggguccaaucgccccgugauccagauugauccuguggcuaugacacauaccagccaauacaucuguucucccguccugacggacaacccgagaccuaaugaucccaacaucggaaaaugcaaugacccuuaucccggcaacaauaacaacgggguuaagggauucagcuaccucgauggcgccaauacauggcuggggcggaccauuuccaccgcgucuagaagcggauaugagaugcuuaaagugcccaacgcccugacagacgaccgcuccaagccuauccagggccagaccauugugcucaaugcugauuggagcggcuacucuggguccuuuauggacuauugggccgaaggagauuguuaccgggcuugcuucuacgucgagcugaucagaggccgcccgaaggaggacaaagugugguggacaagcaacucuauuguuuccauguguagcuccacggaauuucuggggcaguggaauuggcccgauggagccaagaucgaguauuuccucuga

SEQ ID NO: 215527 - RNA, 1398 nt, Artificial Sequence
  derived and/or modified CDS sequence (opt5) from neuraminidase__InfluenzaA__AGK84861
augaaccccaaucagaagauccugugcaccagcgccacagcuauuaucauuggcgccaucgcggugcucauugggaucgcuaaccugggacuuaauaucggccugcaccucaaaccuuccuguaacugcucucauagccaaccggagacgaccaauacaucccagaccauuaucaacaauuacuauaacgaaacaaauauuaccaacauccagauggaggaaagaacaucucggaauuucaacaaucugaccaaggggcuuuguacgauuaacagcuggcacaucuacggaaaagacaaugccguccgcauuggcgaguccucugauguucuggugaccagagaacccuaugugagcugcgacccugaugagugucgguuuuacgcccucucccaggggacaaccauccgcggaaagcauagcaacggcacaauccacgacagaucucaauaucgggcucugauuuccuggccccugagcucuccucccaccgucuacaacucccgcguggagugcaucggcuggagcucuacguccugucaugaugggaaaagcagaauguccauuugcaucucuggaccuaauaacaaugccagcgcuguugugugguauaaccggcgcccggucgccgaaauuaauacaugggcgagaaacauccuccggacccaggaguccgaaugugugugccacaauggcguuugucccguggucuucacagacgggagcgccaccggaccugcugauacccgcaucuacuacuuuaaggagggcaagauucugaaaugggagucucuuacagggacggccaagcacaucgaagagugcuccugcuauggagaaagaaccggcauuacauguaccugccgggacaacuggcagggcagcaaucgccccguggugcagaucgauccugucgcuaugacacauaccucucaauacauuuguagccccguucugacggacaacccgagaccuaaugaucccaacaucgggaaaugcaaugacccuuaucccggaaucaacaauaacggcgugaagggguucuccuaccucgauggagccaacacauggcugggccggaccauuucuaccgcgagcagauccggguaugagaugcuuaaagugcccaaugcccugacagacgaccgcagcaagccuauccagggacagaccauuguccucaacgcugauuggucuggcuacuccggcagcuuuauggacuauugggccgaaggggauuguuaccgggcuugcuucuacguggagcugaucagaggacgcccgaaggaggacaaaguuugguggacaucuaauuccauugugagcauguguuccucuacggaauuucugggccaguggaacuggcccgauggggccaagaucgaguauuuccucuga

SEQ ID NO: 215528 - RNA, 1398 nt, Artificial Sequence; identical to SEQ ID NO: 215526
  derived and/or modified CDS sequence (opt5) from neuraminidase__InfluenzaA__AGK84864

SEQ ID NO: 215529 - RNA, 1398 nt, Artificial Sequence
  derived and/or modified CDS sequence (opt5) from neuraminidase__InfluenzaA__AGL95090
augaaccccaaucagaagauccugugcaccagcgccacagcuauuaucauuggcgccaucgcggugcucauugggaucgcuaaccugggacuuaauaucggccugcaccucaaaccuggguguaacugcucccauucucaaccggagacgaccaauacaagccagaccauuaucaacaauuacuauaacgaaacaaauauuaacaauauccagauggaggaaagaaccucccggaacuucaauaaccugacaaagggacuuuguaccauuaauucuuggcacaucuacggcaaagacaacgccguccgcauuggggagagcuccgauguucuggugacgagagaacccuaugugucuugcgacccugaugagugucgguuuuacgcccucagccagggaaccacaauccgcggcaagcauuccaacggcaccauccacgacagaagccaauaucgggcucugauuucuuggccccuguccagcccucccacagucuacaauucucgcguggagugcaucgggugguccagcaccucuugucaugauggaaaauccagaaugagcauuugcaucuccggcccuaacaauaacgccucugcuguugugugguauaaucggcgcccggucgccgaaauuaacacgugggcgagaaauauccuccggacacaggagagcgaaugugugugccacaacgggguuugucccguggucuucaccgacggauccgccacaggcccugcugauacccgcaucuacuacuuuaaggaggggaagauucugaaaugggagagccuuaccggaacagccaagcacaucgaagagugcucuugcuauggcgaaagaacgggcauuaccuguacaugcaaagacaauuggcagggguccaaccggcccgugauccagauugauccuguggcuaugacccauacaagccaauacaucuguucucccguccugaccgacaauccgcgcccuaacgaucccaauaucggaaagugcaacgacccuuaucccggcaauaacaacaaugggguuaaaggauucagcuaccucgauggcgccaacacguggcuggggagaacaauuuccaccgcgucucggagcggauaugagaugcuuaaggugcccaaugcccugaccgacgacagauccaagccuauccagggccagacaauugugcucaacgcugauuggagcggcuacucuggguccuuuauggacuauugggccgaaggagauuguuaccgcgcuugcuucuacgucgagcugauccggggcagaccgaaagaggacaaggugugguggaccagcaauucuauuguuuccauguguagcuccacagaauuucuggggcaguggaacuggcccgauggagccaaaaucgaguauuuccucuga

SEQ ID NO: 215530 - RNA, 1413 nt, Artificial Sequence; identical to SEQ ID NO: 208704
  derived and/or modified CDS sequence (opt5) from neuraminidase__InfluenzaA__AGL96802

SEQ ID NO: 215531 - RNA, 1413 nt, Artificial Sequence; identical to SEQ ID NO: 208704
  derived and/or modified CDS sequence (opt5) from neuraminidase__InfluenzaA__AGL96807

SEQ ID NO: 215532 - RNA, 1413 nt, Artificial Sequence
  derived and/or modified CDS sequence (opt5) from neuraminidase__InfluenzaA__AGL96808
augaaccccaaucagaagaucauuaccaucggcagcauuuccaucgccauugggaucaucucucugaugcuccaaauuggaaacaucauuagcaucugggcuucccacucuauucagacaggcagccagaauaacacggggaucugcaaucagagaauuaucaccuacgagaacuccacaugggugaaucauaccuaugugaacaucaauaacacaaauguuguggccggagaagacaaaaccucugugacacuggcgggcaacagcucccuuuguagcauuucugggugggcuaucuacaccaaggauaauuccauucggaucggaagcaaaggcgacgucuucgugauucgcgagccuuuuaucucuugcucccaccuggaauguagaacguucuuucucacccaaggcgcccugcuuaacgauaagcauagcaaugggacaguuaaagaccggucuccguaucgcgcccugauguccugcccccucggagaggcuccuagccccuacaacuccaaguucgaaucuguggccuggagcgcuuccgccugucacgauggcaugggguggcugaccaucggaauuagcggcccugacaacggggcggucgccgugcugaaguauaauggaaucauuacaggcaccaucaaaucuuggaagaaacagauucucagaacgcaggaguccgagugcguuuguaugaacggcagcugcuuuacaaucaugaccgaugggcccucuaauaaggcugccagcuacaaaaucuucaagauugaaaagggaaaagugacaaaguccaucgagcugaacgcuccuaauuuucauuaugaagaguguucuugcuacccggacaccggcauugucaugugugugugccgggauaacuggcacgggagcaaucgccccuggguguccuucaaccagaaucuugacuaccaaaucggauauauuugcagcggcgucuuuggggauaacccuagacccgaggacggagaaggcucuuguaauccuguuaccguggauggcgccaacggggugaaaggauucuccuacaaguaugacaauggcgucuggaucgggcggacaaaaagcaaccgccugagaaagggauuugagaugauuugggaccccaauggcuggacgaacaccgauucuuucuuuuccgugaaacaggacguuguggcgaucacagauuggagcggguacuccggcucuuucguccagcacccggaacucaccggacuggacugcauccggccuuguuucuggguggagcuuguucgcggccugcccagagaaaacacaaccauuuggacgagcggguccucuaucagcuuuugcggagucaauuccgauacagccaacuggagcuggccugacggcgcugagcuccccuucaccauugauaaguga

SEQ ID NO: 215533 - RNA, 1413 nt, Artificial Sequence
  derived and/or modified CDS sequence (opt5) from neuraminidase__InfluenzaA__AGL96809
augaaccccaaucagaagaucauuaccaucggcagcauuuccaucgccauugggaucaucucucugaugcuccaaauuggaaacaucauuagcaucugggcuucccacucuauucagacaggcagccagaauaacacggggaucugcaaucagagaauuaucaccuacgagaacuccacaugggugaaucauaccuaugugaacaucaauaacacaaauguuguggccggagaagacaaaaccucugugacacuggcgggcaacagcucccuuuguagcauuucugggugggcuaucuacaccaaggauaauuccauucggaucggaagcaaaggcgacgucuucgugauucgcgagccuuuuaucucuugcucccaccuggaauguagaacguucuuucucacccaaggcgcccugcuuaacgauaagcauagcaaugggacaguuaaagaccggucuccguaucgcgcccugauguccugcccccucggagaggcuccuagccccuacaacuccaaguucgaaucuguggccuggagcgcuuccgccugucacgauggcaugggguggcugaccaucggaauuagcggcccugacaacggggcggucgccgugcugaaguauaauggaaucauuacaggcaccaucaaaucuuggaagaaacagauucucagaacgcaggaguccgagugcguuuguaugaacggcagcugcuuuacaaucaugaccgaugggcccucuaauaagacagcuagcuacaaaaucuucaagauugaaaagggaaaagugaccaaguccaucgagcugaacgccccuaauuuucauuaugaagaguguucuugcuacccggacaccggcauugucaugugugugugccgggauaacuggcacgggagcaaucgccccuggguguccuucaaccagaaucuugacuaccaaaucggauauauuugcagcggcgucuuuggggauaacccuagacccgaggacggagaaggcucuuguaauccuguuacaguggauggcgcuaacggggugaaaggauucuccuacaaguaugacaauggcgucuggaucgggcggacgaaaagcaaccgccugagaaagggauuugagaugauuugggaccccaauggcuggaccaacacagauucugacuucuccgugaaacaggauguuguggccaucaccgacuggagcggguacuccggcucuuuuguccagcacccggaacucacaggacuggauugcauccggccuuguuucuggguggagcuuguucgcggccugcccagagaaaacaccacgauuuggacaagcggguccucuaucagcuucugcggagucaauuccgacaccgcgaacuggagcuggccugauggcgccgagcuccccuuuaccauugacaaguga

SEQ ID NO: 215534 - RNA, 1413 nt, Artificial Sequence; identical to SEQ ID NO: 208704
  derived and/or modified CDS sequence (opt5) from neuraminidase__InfluenzaA__AGL96818

SEQ ID NO: 215535 - RNA, 1413 nt, Artificial Sequence
  derived and/or modified CDS sequence (opt5) from neuraminidase__InfluenzaA__AGL96820
augaaccccaaucagaagaucauuaccacaggcagcaucuccauugccaucgggauuaucucucugaugcuccaaaucggaaacauuaucagcauuugggcuucccacucuauccagacgggcagccagaauaacaccgggauuugcaaucagagaaucauuacauacgagaacuccaccugggugaaucauacauaugugaacaucaauaacaccaauguuguggccggagaagacaaaacaucugugacccuggcgggcaacagcucccuuuguagcaucucugggugggcuauuuacacgaaggauaauuccauccggauuggaagcaaaggcgacgucuucgugauccgcgagccuuuuauuucuugcucccaccuggaauguagaaccuucuuucucacacaaggcgcccugcuuaacgauaagcauagcaaugggaccguuaaagaccggucuccguaucgcgcccugauguccugcccccucggagaggcuccuagccccuacaacuccaaguucgaaucuguggccuggagcgcuuccgccugucacgauggcaugggguggcugacaaucggaaucagcggcccugacaacggggcggucgccgugcugaaguauaauggaauuaucaccggcacgauuaaaucuuggaagaaacagauccucagaacacaggaguccgagugcguuuguaugaacggcagcugcuuuaccauuaugacagaugggcccucuaauaaggcugccagcuacaaaaucuucaagaucgaaaagggaaaagugaccaaguccauugagcugaacgcuccuaauuuucauuaugaagaguguucuugcuacccggacaccggcaucgucaugugugugugccgggauaacuggcacgggagcaaucgccccuggguguccuucaaccagaaucuugacuaccaaauuggauauaucugcagcggcgucuuuggggauaacccuagacccgaggacggagaaggcucuuguaauccuguuacaguggauggcgccaacggggugaaaggauucuccuacaaguaugacaauggcgucuggauugggcggacgaaaagcaaccgccugagaaagggauuugagaugaucugggaccccaauggcuggaccaacacagauucugacuucuccgugaaacaggauguuguggcgauuaccgacuggagcggguacuccggcucuuuuguccagcacccggaacucacaggacuggauugcauccggccuuguuucuggguggagcuuguucgcggccugcccagagaaaacaccacgaucuggacaagcggguccucuauuagcuucugcggagucaauuccgacaccgccaacuggagcuggccugauggcgcugagcuccccuuuaccaucgacaaguga

SEQ ID NO: 215536 - RNA, 1413 nt, Artificial Sequence
  derived and/or modified CDS sequence (opt5) from neuraminidase__InfluenzaA__AGL96821
augaaccccaaucagaagaucauuaccaucggcagcauuuccaucgccauugggaucaucucucugaugcuccaaauuggaaacaucauuagcaucugggcuucccacucuauucagacaggcagccagaauaacacggggaucugcaaucagagaauuaucaccuacgagaacuccacaugggugaaucauaccuaugucaacaucaauaacacaaauguuguggccggagaagacaaaaccucugugacacuggcgggcaacagcucccuuuguagcauuucugggugggcuaucuacaccaaggauaauuccauucggaucggaagcaaaggcgacgucuucgugauucgcgagccuuuuaucucuugcucccaccuggaauguagaacguucuuucucacccaaggcgcccugcuuaacgauaagcauagcaaugggacaguuaaagaccggucuccguaucgcgcccugauguccugcccccucggagaggcuccuagccccuacaacuccaaguucgaaucuguggccuggagcgcuuccgccugucacgauggcaugggguggcugaccaucggaauuagcggcccugacaacggggcggucgccgugcugaaguauaauggaaucauuacaggcaccaucaaaucuuggaagaaacagauucucagaacgcaggaguccgagugcguuuguaugaacggcagcugcuuuacaaucaugaccgaugggcccucuaauaaggcugccagcuacaaaaucuucaagauugaaaagggaaaagugacaaaguccaucgagcugaacgcuccuaauuuucauuaugaagaguguucuugcuacccggacaccggcauugucaugugugugugccgggauaacuggcacgggagcaaucgccccuggguguccuucaaccagaaucuugacuaccaaaucggauauauuugcagcggcgucuuuggggauaacccuagacccgaggacggagaaggcucuuguaauccuguuuccguggauggcgccaacggggugaaaggauucagcuacaaguaugacaauggcgucuggaucgggcggaccaaaucuaaccgccugagaaagggauuugagaugauuugggaccccaauggcuggacaaacacggauuccgacuucagcgugaaacaggauguuguggcgaucaccgacugguccggguacucuggcagcuuuguccagcacccggaacucacaggacuggauugcauccggccuuguuucuggguggagcuuguucgcggccugcccagagaaaacaccacaauuuggaccuccgggucuagcaucuccuucugcggagugaauagcgacacggccaacuggucuuggccugauggcgcugagcuccccuuuacaauugacaaguga

SEQ ID NO: 215537 - RNA, 1410 nt, Artificial Sequence
  derived and/or modified CDS sequence (opt5) from neuraminidase__InfluenzaA__AGN69269
augaucaccaaccagagaauuaucacaauuggcacggugugccugaucgucgggauuguuagccuccugcuucaaaucggaaauaucgugucccuguggauuucucacagcauccagaccggcgagaagaaccauuccgaaauuuguaaucagaacacaaucaccuacgagaauaacacaugggugaaucagaccuaugucaacauuucuaauacaaacaucgccgacgggcaaggagugaccagcauuauccucgcuggcaauuccucucugugccccaucagcgggugggccauuuacuccaaagauaacagcauccggauuggaucuaagggcgacaucuucguuauucgcgaaccuuuuaucuccuguagccaccuugagugcagaacguucuuucugacccagggcgcgcuccugaaugaucggcauucuaacgggacagugaaagaccgcuccccguauagaacccugaugagcugucccaucggagaagcuccuucucccuacaauucccgguucgagagcgucgccugguccgccucugcuugccacgauggcaugggguggauuacaaucggaauuagcggcccugacaacggggccguggcuguucucaaguauaacggaaucauuaccgauacgaucaaauccuggcgcaauaagauccugagaacacaggagagcgaaugugugugcauuaacggcucuuguuuuaccaucaugacagacggccccuccaaugggcaggccagcuacaagauuuucaaaauggagaagggaaaaaucauuaagucugucgaacuugaugcgccuaacuaucauuacgaggagugcagcuguuacccggacaccggcaaaguggugugcgucugccgggauaauuggcacgccuccaaccgccccuggguuucuuuugaccaaaaucuggauuaucagaucggguacauuuguagcggaguguucggcgacaacccuagauccaaugacgggaagggaaacugcggccccgcucucagcaauggcgccaacggggugaagggauuuucuuuccgguauggcaauggggucuggaucggacgcaccaaauccaucagcucuagauccggcuuugaaaugauuugggauccuaacggguggacagagacggacagcuccuucucuaugaagcaggauaucauugcucugaccgacuggagcggcuacuccggaucuuuugugcagcaccccgaacuuacaggcaugaauuguauccggccgugcuucuggguugagcugauucgcgggcaaccuaaagaaagcaccaucuggacauccggaagcucuaucuccuucuguggcguggauagcgagaccgccucuugguccuggcccgacggggcggaucucccuuuuacgauugacaaguga

SEQ ID NO: 215538 - RNA, 1410 nt, Artificial Sequence
  derived and/or modified CDS sequence (opt5) from neuraminidase__InfluenzaA__AGN69280
augaacaccaaucagagaaucauuacaaucggcacggugugccugauugucgggaucguuagccuccugcuucaaauuggaaacaucgugucccuguggaucucucacagcauucagaccggcgagaagaaucauuccgaaaucuguaaccagaauacaauuaccuacgagaacaauacaugggugaaccagaccuaugucaauaucucuaacacaaauauugccgacgggcaaggagugaccagcaucauucucgcuggcaacuccucucugugccccaucagcgggugggccaucuacuccaaagauaauagcauucggaucggaucuaagggcgacauuuucguuauccgcgaaccuuuuauuuccuguagccaccuugagugcagaacguucuuucugacccagggcgcgcuccugaacgaucggcauucuaaugggacagugaaagaccgcuccccguauagaacccugaugagcugucccaucggagaagcuccuucucccuacaacucccgguucgagagcgucgccugguccgccucugcuugccacgauggcaugggguggcucacaaucggaauuagcggcccugacaacggggccguggcuguucugaaguauaauggaaucauuaccgauacgaucaaauccuggcgcaacaagauucuuagaacacaggagagcgaaugugugugcaucaauggcucuuguuuuaccaucaugacagacggccccuccaacgggcaggccagcuacaagauuuucaaaauggagaagggaaaaaucauuaagucugucgaacuggaugcgccuaauuaucauuacgaggagugcagcuguuacccggacaccggcaaaguggugugcgucugccgggauaacuggcacgccuccaaucgccccuggguuucuuuugaccaaaaccucgauuaucagaucggguacauuuguagcggaguguucggcgacaauccuagauccaacgacgggaagggaaauugcggccccgugcugagcaacggcgcuaauggggucaagggauuuucuuuccgguauggcaacgggguguggaucggacgcaccaaauccauuagcucuagauccggcuuugaaaugaucugggauccuaauggguggacagagacggacagcuccuucucuaugaagcaggauaucauugcccuuaccgacuggagcggcuacuccggaucuuuuguucagcaccccgaacugacaggcaugaacuguauccggccgugcuucuggguggagcucauucgcgggcaaccuaaagaaagcaccaucuggacaggaggcuccagcauuucuuucuguggggucgauuccgagaccgcuagcuggucuuggcccgacggagccgaucugccuuuuacgaucgacaaguga

SEQ ID NO: 215539 - RNA, 1410 nt, Artificial Sequence
  derived and/or modified CDS sequence (opt5) from neuraminidase__InfluenzaA__AGN69292
augaaccccaaucagaagaucauuaccaucggcagcauuugcaugacaaucgggauugccucccugauccuccaaaucggaaacauuaucucuauuuggaucagccacuccauucagacggagaaucagaaccagccugaaaucuguaaucaaaacgugauuaccuacgagaauaacacaugggucaaucagaccuauguuaacaucucuaauacaaacuucguggcugaacaggccguggcgagcgucaaacuggcuggcaauuccucucuuugcccggugagcgggugggccaucuacuccaaggacaacagcguuagaauuggaucuaaaggcgauguguuugucauccgggagcccuucauuuccuguagccaucuggaaugccgcaccuuuuuccucacacagggggcccugcuuaaugacaagcacucuaacggaaccaucaaagauagauccccuuaucggacgcugaugagcugucccauuggcgaggugccuucucccuacaacucccgcuuugagagcguugcuugguccgccucugcuugccaugacggcaccagcuggcucacaaucgggaucuccggaccugauaauggcgccguggcgguccugaaguauaacgggauuaucaccgacacaauuaagagcuggagaaagaauauccugcggacccaagaaucugagugugccugcgugaacggauccuguuucacggugaugacagauggcccgagcaaugggcaggcuucuuacaaggucuuuaaaauugaaaagggaaaaguugugaaaagcguggagcucaacgcccccaauuaucacuacgaggaaugcuccuguuacccugagucuggcgaaauuaccugcgucugccgcgacaacuggcauggcagcaauagacccuggguguccuucaaccagaaucuggaguaucagaugggguacaucuguagcggaaucuuuggcgauaacccucggcccaaugacaagacagggucuugcggaccgguuuucuccaacggcgcuaauggggugaaaggauuuagcuucaaguauggcaacggcgucuggaucgggcgcaccaaaucuauuuccagcagaaugggauuugaaaugaucugggauccugacggcuggaccaagacagaugacaaauucuccgugaagcaagacauuaucgggauuaacgauuggucuggauacagcggcuccuucguucagcaccccgagcuuacggggcuggacuguaugcggccuugcuuuuggguggagcucauccgcggcagacccaaagaaaauaccaucuggacaucuggaagcuccauuagcuucuguggcgucaacucugauaccguggggugguccuggcccgacggagccgagcugccuuuuacaaucgauaaguga

SEQ ID NO: 215540 - RNA, 1410 nt, Artificial Sequence
  derived and/or modified CDS sequence (opt5) from neuraminidase__InfluenzaA__AGN69316
augaaccccaaucagaagaucauuaccaucggcagcauuugcaugacaaucgggauugccucccugauccuccaaaucggaaacauuaucucuauuuggaucagccacuccauucagacggagaaucagaaccagccugaaaucuguaaucaaaacgugauuaccuacgagaauaacacaugggucaaucagaccuauguuaacaucucuaauacaaacuucguggcugaacaggccguggcgagcgucaaacuggcuggcaauuccucucuuugcccggugagcgggugggccaucuacuccaaggacaacagcguuagaauuggaucuaaaggcgauguguuugucauccgggagcccuucauuuccuguagccaucuggaaugccgcaccuuuuuccucacacagggggcccugcuuaaugacaagcacucuaacggaaccaucaaagauagauccccuuaucggacgcugaugagcugucccauuggcgaggugccuucucccuacaacucccgcuuugagagcguugcuugguccgccucugcuugccaugacggcaccagcuggcucacaaucgggaucuccggaccugauaauggcgccguggcgguccugaaguauaacgggauuaucaccgacacaauuaagagcuggcggaaaaauauccugagaacccaagaaucugagugugccugcgugaacggauccuguuucacggugaugacagauggcccgagcaaugggcaggcuucuuacaaggucuuuaaaauugaaaagggaaaaguugugaagaccguggagcucaacgcccccaauuaucacuacgaggaaugcagcuguuacccugaguccggcgaaaucacaugcgucugccgcgacaacuggcauggcucuaauagacccugggugagcuucaaccagaaucuggaguaucagaugggguacaucuguuccggaauuuuuggcgauaacccucggcccaaugacaagaccgggagcugcggaccgguuuucucuaacggcgcuaauggggugaaaggauuuuccuucaaguauggcaacggcgucuggaucgggcgcaccaaaagcauuucuuccagaaugggauuugaaaugaucugggauccugacggcuggacaaagacggaugacaaauucagcgugaagcaagacauuaucgggauuaacgauugguccggauacucuggcagcuucguucagcaccccgagcuuaccgggcuggacuguaugcggccuugcuuuuggguggagcucauccgcggcagacccaaagaaaauacaaucuggaccuccggaucuagcauuuccuucuguggcgucaacagcgauacagugggguggucuuggcccgacggagccgagcugccuuuuaccaucgauaaguga

SEQ ID NO: 215541 - RNA, 1410 nt, Artificial Sequence; identical to SEQ ID NO: 215540
  derived and/or modified CDS sequence (opt5) from neuraminidase__InfluenzaA__AGN69328

SEQ ID NO: 215542 - RNA, 1410 nt, Artificial Sequence
  derived and/or modified CDS sequence (opt5) from neuraminidase__InfluenzaA__AGN69340
augaaccccaaucagaagaucauuaccaucggccugauuugcaugacaaucgggauugccagccucauccugcaaaucggaaacauuaucuccauuuggaucucucacagcauucagacggagaaucagaacaaaccugaaaucuguaaucagaacgugauuaccuacgagaauaacacaugggucaaucaaaccuauguuaacguguccaauacaaacuucguggcugaacaggccgucgcgucugugaaacuuguuggcaauagcucccugugcccggugucugggugggcuaucuacagcaaggacaacuccgucagaaucggaagcaagggcgauguguuuguuauucgggagcccuucaucucuuguucccaucucgaaugccgcaccuuuuuccugacacagggggcccuucugaaugacaaacacagcaacggaaccauuaaggauagaucuccuuaucggacgcucauguccugucccaucggcgaggugccuagccccuacaacucucgcuuugaguccgucgccuggagcgcuuccgccugccaugacggcaccucuuggcugacaauugggaucagcggaccugauaauggcgcuguggccgugcugaaguauaacgggaucauuaccgacacaaucaaauccuggagaaagaauauucuccggacccaggaaagcgagugugcgugcgucaacggaucuuguuucacgguuaugacagauggcccguccaaugggcaagccagcuacaaaguguuuaagaucgaacgcggaaaaguggucaagucuguggagcugaacgcucccaauuaucacuacgaggaaugcagcuguuacccugaguccucugaaauuaccugcguuugcagagacaacuggcauggcagcaaucggcccuggguguccuucaaccagaaucuugaguaucagaugggcuacaucuguagcggggucuuuggagauaacccucgccccaaugacaagacaggcucuugcgggccgguguucuccaacggagccaauggcguuaaaggguuuagcuucaaguauggaaacggcguguggaucggcagaaccaaaucuaccuccagccggaugggguuugaaaugauuugggauccugacggauggacaaagacggaugacaaauucuccgucaagcaggacaucauuggcaucaccgauuggucuggguacagcggauccuucgugcaacaccccgagcugacaggccucgacuguaugcgcccuugcuuuugggucgagcugauuagagggcggcccaaagaaaacaccaucuggacaucuggcagcuccauuagcuucuguggaguuaauucugauaccgugggcugguccuggcccgacggggcugagcuuccuuuuacgaucgauaaguga

SEQ ID NO: 215543 - RNA, 1410 nt, Artificial Sequence
  derived and/or modified CDS sequence (opt5) from neuraminidase__InfluenzaA__AGO00268
augaaccccaaucagaagaucauuaccaucggcagcauuugcaugguggucgggaucauuucccugauccuccaaaucggaaacauuaucucuauuuggaucagccacuccauucagacaggcucucagaaucauacggggaucuguaaccagagcauuaucaccuacaaaaauuccacauggguuaaccaaaccuaugugaauaucucuaacacaaauguggucgccggaaaggacaccacaagcaugauucuggcuggcaacuccagccuuugcccuaucagagggugggccauuuacucuaaagauaauggaauccggauuggcuccaagggcgacguguucguuauccgcgagccguuuaucagcuguucucaccuggaaugcagaaccuucuuucucacgcagggggcgcugcuuaacgauaaacauuccaauggaaccgugaaggaccggagccccuaucgcgcucugaugucuuguccugucggcgaggcccccuccccuuacaacagcagauucgaauccguggccuggucugcuagcgccugccacgaugggaugggauggcucacaauuggcaucuccgggcccgacgauggagcuguugccgugcugaaguauaauggcauuaucaccgagacaauuaaaagcuggaagaaaaagauccugcggacccaggaaucugagugugucugcgugaacggcuccuguuuuacgaucaugacagacgggccuagcgauggaccggcgucuuacaaaauuuucaagaucgagaagggcaaagugaccaagagcauugaacucgacgcccccaacucccauuaugaggaaugcucuuguuacccugauacagggaaagucaugugcguuugccgcgacaauuggcacggaagcaacagacccuggguguccuuugaucagaaucuggacuaccaaaucggcuauauuuguagcgggguguucggagacaacccucggcccaaggauggcaaaggcucuugcgggccggucuacguggacggagcuaauggcguuaagggguuuuccuaucgcuacggagauggcguguggaucgggagaaccaaaagcaacucuucccggcagggcuucgagaugauuugggacccuaauggauggaccgagacagauagcuccuuuuucgucaagcaggacgugguugccaugacggauuggucuggcuauagcggguccuuugugcagcaccccgaacuuaccggacugaacuguaugcgcccuugcuucugggucgagcucaucagaggccggcccaaggagaaaacaaucuggaccucugggagcuccauuagcuucuguggagucaauucugacacaguggauugguccuggcccgacggcgcugaacugccuuuuaccaucgauaaguga

SEQ ID NO: 215544 - RNA, 1410 nt, Artificial Sequence
  derived and/or modified CDS sequence (opt5) from neuraminidase__InfluenzaA__AGO00280
augaaccccaaucagaagaucauuaccaucggcagcauuugcaugguggucgggaucauuucccugauccuccaaaucggaaacauuguuucuaucuggauuagccacuccauccagacaggcaaucagaaccauacggggaccuguaaucagucuauuaucacauacaaaaacagcaccugggugaaucaaacauaugugaacauuuccaauaccaacgucguggccggaaaggacacaaccucuguuauccuggcuggcaauagcucccuuugcccuaucagagggugggccauuuacagcaaagauaacggagugcggaucggcucuaagggcgacgucuucgugauucgcgagccguuuaucuccuguagccaccuggaaugcagaacguucuuucucacccagggggcgcugcuuaaugauaaacauucuaacggaacaguuaaggaccggucccccuaucgcgcucugaugagcuguccugugggcgaggcccccucuccuuacaauuccagauucgaaagcgucgccugguccgcuucugccugccacgaugggaugggauggcucaccauuggcaucagcgggcccgacgauggagcuguggccgugcugaaguauaacggcaucauuacagagaccaucaaauccuggcggaaggaaauucugcgcacgcaggagagcgagugugucugcguuaacggcucuuguuuuacaaucaugaccgacgggccuuccggaggcccggcgagcuacaaaauuuucaagaucgaaaaagggaaggugacaaagucuaucgagcucgaugcccccaauagccauuaugaagagugcuccuguuacccugacaccucuaaagugaugugcgucugcagagauaacuggcacggaagcaaucggcccuggguguccuuugaccagaaccuggauuaccaaaugggcuauauuuguagcgggguuuucggagacaauccucgccccaaggacggcaaaggcucuugcgggccgguguacgucgauggagcuaacggcgugaagggguuuuccuauagauacggaaauggcguuuggaucgggcggaccaaaagcaacucuucccgccagggcuucgagaugauuugggacccuaauggauggacagaaacggauagcaacuuuuucaugaagcaggacguggucgccgugaccgauugguccggcuauucugggagcuuuguccagcaccccgagcuuacaggacuggacuguaugagaccuugcuucuggguggaacucauccggggccgccccaaagagaauaccauuuggacauccgggucuagcaucuccuucuguggaguuaacagcgauaccguggacuggucuuggcccgauggcgcugaacugccuuuuacgauugacaaguga

SEQ ID NO: 215545 - RNA, 1413 nt, Artificial Sequence
  derived and/or modified CDS sequence (opt5) from neuraminidase__InfluenzaA__AGO00292
augaaccccaaucagaagaucauuaccaucggcagcauuugcaugacaaucgggacgauuucccugauccuccaaaucggaaacauuaucucuauuuggaucagccacuccauucagaccggcucucagaaucauacagggaucuguaaccagagaauuaucaccuacgagaauaacacaugggugaaucaaaccuaugucaacaucagcaauacaaacguuguggccggaaaagacaccacguccaugauucuggcuggcaauucuagccuuugcccuauccgggggugggccauuuacuccaaggauaacagcauccgcauuggaucuaaaggcgacguguucgucaucagagaaccguuuaucuccuguagccaccuggagugccggaccuucuuucucacacagggcgcgcugcuuaaugauaagcauucuaacgggaccgugaaagaccgcucccccuauagagcucugaugagcuguccuauuggagaagcccccucuccuuacaauucccgguucgagagcguugccugguccgcuucugccugccacgauggcaugggguggcucacaaucggaauuagcggccccgacgauggggcuguggccguccugaaguauaacggaaucauuaccgaaaucaucaaguccuggcgcaaacagauucugagaacgcaggagagcgagugugugugcguuaacggcucuuguuuuacaaucaugaccgacggcccuuccgaugggccggcgagcuaccggauuuucaagaucgaaaaaggaaagauuacaaaaucuaucgagcucgacgcccccaauagccauuaugaagagugcuccuguuacccugauaccggcaaggugaugugcgucugccgcgacaacuggcacgggucuaauagacccugggugagcuuuaaccaaaaucuggauuaccagauuggauauaucuguuccggcguguucggggacaacccucggcccaaggacggaaaaggcagcugcgauccggucaauguugacggcgcugauggggugaagggauuuucuuaccgcuauggcgacgggguguggaucggaagaaccaaauccaacagcucucggaagggcuucgagaugauuugggauccuaauggguggacagacacggaugacaacuuucuugucaaacaggaugugguugccaugaccgacugguccggcuacagcggauccuucgugcagcaccccgaacugacaggccucgauuguauccgcccuugcuuuugggucgagcugauuagagggcggcccagagaaaagaccacaaucuggaccucuggaagcuccauuucuuucuguggcgugaauagcgacacgguuaacugguccuggcccgacggggcugagcuuccuuucacaaucgauauguga

SEQ ID NO: 215546 - RNA, 1413 nt, Artificial Sequence
  derived and/or modified CDS sequence (opt5) from neuraminidase__InfluenzaA__AGO00304
augaaccccaaucagaagaucauuaccaucggcagcauuugcauggccaucgggacaauuucccugauccuccaaaucggaaacauuaucucuauuuggaucagccacuccauucagacgggcucucagaaucauaccgggaucuguaaccagagaauuaucacauacgagaauaacaccugggugaaucaaacauaugucaacaucagcaauaccaacguuguggcuggaaaagacacaaccuccaugauucuggccggcaauacgucucuuugcccuauccgggggugggcgauuuacagcaaggauaacuccauccgcauuggaagcaaaggcgacguguucgucaucagagaaccguuuaucucuuguucccaccuggagugccggaccuucuuucucacacagggcgcucugcuuaaugauaagcauagcaacgggaccgugaaagaccgcucucccuauagagcccugauguccuguccuauuggagaagcccccagcccuuacaauucucgguucgaguccguugcuuggagcgccuccgcuugccacgauggcaugggguggcucacaaucggaauuucuggccccgacgauggggccguggcgguccugaaguauaacggaaucauuaccgaaaucaucaagagcuggcgcaaacagauucugagaacgcaggaguccgagugugugugcguuaacggcagcuguuuuacaaucaugaccgacggcccuucuaaugggccggccuccuaccggauuuucaagaucgaaaaaggaaagauuacaaaaagcaucgagcucgaugcucccaacucucauuaugaagagugcagcuguuacccugacaccggcaaggugaugugcgucugccgcgauaauuggcacggguccaacagacccugggugucuuuuaaucaaaaccuggacuaccagauuggauauaucuguagcggcguguucggggauaauccucggcccaaggacggaaaaggcuccugcgacccggucaacguugauggcgccgacggggugaagggauuuagcuaccgcuauggcaaugggguguggaucggaagaaccaaaucuaacuccagccggaagggcuucgagaugauuugggauccuaauggguggacaaacacggacggcaauuuuucugucaaacaggaugugguugcuaugaccgacugguccggauacagcggcuccuucgugcagcaccccgaacuuacagggcuggauuguaugcgcccuugcuuuugggucgagcucaucagaggacggcccagagaaaagaccacaauuuggaccucuggcagcuccaucucuuucuguggggugaacagcgacacgguuaauugguccuggcccgauggagccgagcugccuuucacaauugacaaauga

SEQ ID NO: 215547 - RNA, 1410 nt, Artificial Sequence; identical to SEQ ID NO: 214616
  derived and/or modified CDS sequence (opt5) from neuraminidase__InfluenzaA__AGO00316

SEQ ID NO: 215548 - RNA, 1410 nt, Artificial Sequence; identical to SEQ ID NO: 214060
  derived and/or modified CDS sequence (opt5) from neuraminidase__InfluenzaA__AGO00328

SEQ ID NO: 215549 - RNA, 1410 nt, Artificial Sequence; identical to SEQ ID NO: 206167
  derived and/or modified CDS sequence (opt5) from neuraminidase__InfluenzaA__AGO00340

SEQ ID NO: 215550 - RNA, 1365 nt, Artificial Sequence; identical to SEQ ID NO: 207791
  derived and/or modified CDS sequence (opt5) from neuraminidase__InfluenzaA__AGO00352

SEQ ID NO: 215551 - RNA, 1365 nt, Artificial Sequence; identical to SEQ ID NO: 207791
  derived and/or modified CDS sequence (opt5) from neuraminidase__InfluenzaA__AGO00376

SEQ ID NO: 215552 - RNA, 1365 nt, Artificial Sequence; identical to SEQ ID NO: 207791
  derived and/or modified CDS sequence (opt5) from neuraminidase__InfluenzaA__AGO00388

SEQ ID NO: 215553 - RNA, 1365 nt, Artificial Sequence; identical to SEQ ID NO: 207791
  derived and/or modified CDS sequence (opt5) from neuraminidase__InfluenzaA__AGO00400

SEQ ID NO: 215554 - RNA, 1365 nt, Artificial Sequence; identical to SEQ ID NO: 207791
  derived and/or modified CDS sequence (opt5) from neuraminidase__InfluenzaA__AGO00412

SEQ ID NO: 215555 - RNA, 1365 nt, Artificial Sequence; identical to SEQ ID NO: 207791
  derived and/or modified CDS sequence (opt5) from neuraminidase__InfluenzaA__AGO00424

SEQ ID NO: 215556 - RNA, 1365 nt, Artificial Sequence
  derived and/or modified CDS sequence (opt5) from neuraminidase__InfluenzaA__AGO00436
augaaccccaaucagaagaucauuaccaucggcagcauuugccugguggucgggcucaucucccugauucuucaaaucggaaacaucauuucuaucuggauuagccacuccauccagacaggcucucagaaucauacggggauuuguaaccagaauaucauuaccuacaaaaacagcacauggguuaaggacaccacauccgugauccugaccggaaauucuagccucugcccuaucagaggcugggccauuuauuccaaagauaacagcauccggauugggucuaagggagacguguucgucauccgcgagccguuuauuuccuguagccaccuggaaugcagaacauucuuucuuacccaaggcgcucugcucaaugauaaacauucuuccggcacggugaaggaccggagccccuaccgcgcccugaugucuuguccuguuggggaggcgcccuccccuuauaacagcagauucgaauccguggcuuggucugccagcgccugccacgauggaaugggcuggcugaccaucgggaucuccggacccgacaauggcgcugucgccgugcucaaguacaacgggauuaucacagagaccauuaaaagcuggcggaagaaaauccugcgcacacaggaaucugagugugcuugcguuaauggauccuguuuuaccauuaugacggauggcccuagcgacggccuugccucuuauaagaucuucaaaaucgagaaggggaaggugacaaaaagcauugaacugaacgcgcccaauuccaacuacgaggaaugcucuuguuauccggauaccggaaaggucaugugcgugugcagagacaacuggcauggcagcaaucggccuuggguguccuuugaucagaaccucgacuaccagaucggguacauuuguagcggagucuucggcgauaauccccgcccugaggacgggacaggaucuugcggccccguuuauguggacggcgccaacggggugaaaggauuuuccuacagauauggcaauggggucuggaucggacggaccaagagccacucuucccgccacggcuucgagaugauuugggauccgaacggguggaccgaaacagacagcaaauuuuccgugagacaagauguuguggcuaugacggacuggucuggcuacagcggauccuucguccagcauccugagcugaccggccuugauuguaugcggcccugcuuuuggguggaacugauccgcgggagaccuaaggagaaaacaauuuggaccucugccagcuccaucagcuucuguggaguuaauucugacacaguggauugguccuggcccgacggcgcugaacuccccuucagcaucgauaaguga

SEQ ID NO: 215557 - RNA, 1365 nt, Artificial Sequence
  derived and/or modified CDS sequence (opt5) from neuraminidase__InfluenzaA__AGO00448
augaaccccaaucagaagaucauuaccaucggcagcauuugccugguggucgggcucaucucccugauucuucaaaucggaaacaucauuucuaucuggauuagccacuccauccagacaggcucucagaaucauacggggauuuguaaccagaauaucauuaccuacaaaaacagcacauggguuaaggacaccacauccgugauccugaccggaaauucuagccucugcccuaucagaggcugggccauuuauuccaaagauaacagcauccggauugggucuaagggagacguguucgucauccgcgagccguuuauuuccuguagccaccuggaaugcagaacauucuuucuuacccaaggcgcucugcucaaugauaaacauucuuccggcacggugaaggaccggagccccuaccgcgcccugaugucuuguccuguuggggaggcgcccuccccuuauaacagcagauucgaauccguggcuuggucugccagcgccugccacgauggaaugggcuggcugaccaucgggaucuccggacccgacaauggcgcugucgccgugcucaaguacaacgggauuaucacagagaccauuaaaagcuggcggaagaaaauccugcgcacacaggaaucugagugugcuugcguuaauggauccuguuuuaccauuaugacggauggcccuagcgacggccuugccucuuauagaaucuucaagaucgagaaagggaaggugacaaagagcauugaacugaacgcgcccaauucccauuacgaggaaugcucuuguuauccggauaccggaaaagucaugugcgugugccgggacaacuggcacggcagcaaccgcccuuggguguccuuugaucagaaucucgacuaccagaucggguacauuuguagcggagucuucggcgauaaccccagaccugaggacgggacaggaucuugcggccccguuuauguggacggcgccaauggggugaagggauuuuccuaccgguauggcaacggggucuggaucggacgcaccaaaagccacucuuccagacauggcuucgagaugauuugggauccgaauggguggaccgaaacagacagcaaguuuuccgugcggcaagauguuguggcuaugacggacuggucuggcuacagcggauccuucguccagcacccugagcugaccggccuugauuguaugcgccccugcuuuuggguggaacugaucagagggcggccuaaagagaagacaauuuggaccucugccagcuccaucagcuucuguggaguuaacucugacacaguggauugguccuggcccgacggcgcugaacuccccuucagcaucgauaaauga

SEQ ID NO: 215558 - RNA, 1410 nt, Artificial Sequence
  derived and/or modified CDS sequence (opt5) from neuraminidase__InfluenzaA__AGQ47722
augaacaccaaucagagaaucauuacaaucggcacgauuugccugaucguggggauuaucagccuccugcuucaaaucggaaacauuaucucccuguggauuucucacagcauccagaccggcgagaagucccaucccgaaauuuguaaucagucugucaucacauacgagaacaauaccuggguuaaccagacauaugugaauauuagcaacaccaauaucgccgcugggcaaggagugacaccuaucauucucgccggcaacuccucucugugcccgaucagcgggugggcgauuuacuccaaagacaauagcauccggauuggaucuaagggcgauaucuucgucaugcgcgaacccuuuaucuccuguagccaccuugagugcagaaccuucuuucugacgcagggcgcucuccugaacgaccggcauucuaaugggaccgugaaagaucgcuccccuuauagaacacugaugagcugucccauuggagaagccccuucucccuacaacucccgguucgagagcguugccugguccgcuucugccugccacgacggcaugggguggcucaccaucggaauuagcggcccugauaauggggcuguggccguccugaaguauaacggaaucauuacagacaccaucaaauccuggcgcaacaagauccuuagaacgcaggagagcgaaugugugugcauuaauggcucuuguuuuacaaucaugaccgauggcccguccaacgggcaggcgagcuacaagauuuucaaaauggagaagggaaaaaucauuaagucuaucgaacuggacgcccccaauuaucauuacgaggagugcagcuguuacccugauacaggcaaaguuaugugcgugugccgggacaacuggcacgcuuccaaucgccccugggucucuuuugaucaaaaccucgacuaucagauuggguacaucuguagcggaguguucggcgauaauccuagauccaacgacgggaagggaaauugcggccccgugcugagcaacggcgccaauggggucaagggauuuucuuuccgguauggcaacgggguuuggaucggacgcaccaaauccauuagcucuagauccggcuuugaaauggugugggacccgaauggguggaccgagacagauagcuccuucucuaugaagcaggacaucauugcucuuacggauuggagcggcuacuccggaucuuuugugcagcacccugaacugaccggcaugaacuguauccggcccugcuucugggucgagcucauucgcgggcaaccuaaagaaagcacaaucuggaccuccggaagcucuaucuccuucuguggcgugaauagcgggacagccucuugguccuggcccgacggagcggaucugcccuuuaccauugacaaguga

SEQ ID NO: 215559 - RNA, 1413 nt, Artificial Sequence; identical to SEQ ID NO: 208525
  derived and/or modified CDS sequence (opt5) from neuraminidase__InfluenzaA__AGQ47731

SEQ ID NO: 215560 - RNA, 1377 nt, Artificial Sequence
  derived and/or modified CDS sequence (opt5) from neuraminidase__InfluenzaA__AGQ47743
augaaccccaaucagaagaucauuaccaucggcagcauuugcaugguggucgggaucauuucccugauccuccaaaucggaaacauuaucucuauuuggaucagccacuccauucagacaggcaaucagaaccauaaaaauucuacguggaugaaccagaccuacaucaauauuagcaacacaaauguuguggccgggcaagacuccaccucugugauccugacaggaaacagcucccuuuguccuaucagaggcugggcuauuaauagcaaggauaacgggauccggauuggaucuaaaggcgacgucuucgugauccgcgagccguuuauuuccugcagccaccuggaauguagaaccuucuuucucacacagggcgcccugcuuaaugauaagcauucuaacgggaccguuaaagaccggucccccuaucgcgcgcugaugagcugcccugugggagaggcucccucuccuuacaauuccagauucgaaagcgucgccugguccgccucugcuugucacgauggcaugggguggcucacgaucggaaucagcggccccgacaacggggccguggcuguucugaaguauaacggaauuaucaccgagacaauuaaguccuggcggaaaaagauccugcgcacccaggaaagcgagugcacaugugugaauggcucuugcuuuaccauuaugacggauggcccuuccaacgggcucgccagcuacaaaaucuucaagaucgagaaaggaaaggucacaaagucuauugaacugaaugcgccgaacagccauuaugaggaauguuccugcuaccccgacaccggcaaagugaugugugugugcagagauaauuggcacgggucuaaccggccuugggucagcuuugaccagaaucuugauuaucaaaucggauacauuugcuccggcguuuucggggacaacccccgcccuaaggauggaacaggcagcuguggccccgugucugccgacggggcuaauggagugaaaggcuuuuccuacagauaugggaacggagucuggaucggccggaccaagagcaauucuucccgccacggguucgagaugauuugggacccgaacggcuggaccgagacagauagcagauuuuccgugcggcaggacguuguggccaugacggaucgcucuggauacagcggcuccuucguccagcauccugaacugaccgggcucgacugcaugagacccuguuuuuggguggagcugauccggggaagaccugaagaggaaacaauuuggaccucuggcagcaucaucuccuucugcgggguuaauagcgauacaguggacuggucuuggcccgauggagcugagcuucccuucaccauugacaaauga

SEQ ID NO: 215561 - RNA, 1413 nt, Artificial Sequence
  derived and/or modified CDS sequence (opt5) from neuraminidase__InfluenzaA__AGQ47755
augaaccccaaucagaagaucauuaccaucggcagcauuugcauggccaucgggacaauuucccugauccuccaaaucggaaacauuaucucuauuuggaucagccacuccauucagacgggcucucagaaucauaccgggaucuguaacagacggauugugacauacgagaauaacaccugggucaaucagacauauguuaacaucagcaauaccaacgugguggcugaaaaagacacaaccuccaugauccuggccggaaauucuagccuuugcccuauucgcggcugggcgaucuacuccaaggauaacagcauuagaaucgggucuaaaggagacgucuucgugauucgggagccguuuaucuccuguagccaccuggaaugccgcacguucuuucucacccaaggcgcucugcuuaaugauaagcauucuaacggcacaguuaaagacagaucccccuaucgggcccugaugagcuguccuaucggggaggcccccucuccuuacaauucccgcuucgaaagcguggcuugguccgccucugcuugccacgauggaaugggcuggcucaccauugggaucagcggacccgacgauggcgccgucgcggugcugaaguauaacgggauuaucacagagauuaucaaguccuggagaaaacagauccugcggacccaggagagcgaauguguuugcgugaacggaucuuguuuuacgauuaugacagacggcccuuccaauggcccggccagcuaccgcaucuucaagauuaaaaaggggaaaaucaccaagucuauugagcucgaugcucccaacagccauuaugaagagugcuccuguuacccugacacaggaaaggucaugugcgugugcagagauaauuggcacggcucuaaccggcccugggugagcuuuaaucagaaccuggacuaccaaaucggguauauuuguuccggagucuucggcgauaauccucgccccaaagacgggaagggaagcugcgacccgguuaacguggauggcgccgacggcgugaaaggguuuucuuacagauauggaaauggcgucuggaucgggcggaccaaguccaccagcucucgcaaaggauucgagaugaucugggauccuaacggcuggacagacacggaugggaauuuucuugugaagcaggacguuguggcuaugaccgauugguccggcuacagcggauccuucguccagcaccccgaacugacaggccucgacuguaugagaccuugcuuuuggguggagcugauucgggggagaccccgcgagaaaaccacaaucuggaccucuggaagcuccauuucuuucuguggcguuaacagcgauacggugaauugguccuggcccgacggggccgaacuuccuuucacaaucgauaaguga

SEQ ID NO: 215562 - RNA, 1410 nt, Artificial Sequence
  derived and/or modified CDS sequence (opt5) from neuraminidase__InfluenzaA__AGQ47767
augaaccccaaucagaagaucauuaccaucggcagcauuugcaugguggucgggaucauuucccugauccuccaaaucggaaacauuguuucuaucuggauuagccacuccauccagacaggcaaucagaaccauacggggaccugugaccagucuauuaucacauacaaaaauagcaccugggugaaccaaacauaugugaauauuuccaacaccaaugucguggccggaaaggauacaaccucuguuauccuggcuggcaacagcucccuuugcccuaucagagggugggccauuuacagcaaagacaauggagugcggaucggcucuaagggcgaugucuucgugauucgcgagccguuuaucuccuguagccaccuggaaugcagaacguucuuucucacccagggggcgcugcuuaacgacaaacauucuaauggaacaguuaaggaucggucccccuaucgcgcucugaugagcuguccugugggcgaggcccccucuccuuacaacuccagauucgaaagcgucgccugguccgcuucugccugccacgacgggaugggauggcucaccauuggcaucagcgggcccgaugacggagcuguggccgugcugaaguauaauggcaucauuacagagaccaucaaauccuggcggaaggaaauucugcgcacgcaggagagcgagugugucugcguuaacggcucuuguuuuacaaucaugaccgaugggccuuccggaggcccggcgagcuacaaaauuuucaagaucgaaaaagggaaggugacaaagucuaucgagcucgacgcccccaacagccauuaugaagagugcuccuguuacccugauaccucuaaagugaugugcgucugcagagacaauuggcacggaagcaaccggcccuggguguccuuugaucagaaucuggacuaccaaaugggcuauauuuguagcgggguuuucggagacaacccucgccccaaggauggcaaaggcucuugcgggccgguguacgucgacggagcuaauggcgugaagggguuuuccuauaaauacggaaacggcguuuggaucgggagaaccaagagcaauucuucccggcagggcuucgagaugauuugggauccuaacggauggacagaaacggacagcaacuuuuucaccaaacaggauguggucgccgugacagacugguccggcuauucugggagcuuuguccagcaccccgagcuuaccggacuggauuguaugcgcccuugcuucuggguggaacucaucagaggccggcccaaggagaauacaauuuggaccuccgggucuagcaucuccuucuguggaguuaauagcgacacgguggauuggucuuggcccgacggcgcugaacugccuuuuacaauugauaaguga

SEQ ID NO: 215563 - RNA, 1410 nt, Artificial Sequence; identical to SEQ ID NO: 215544
  derived and/or modified CDS sequence (opt5) from neuraminidase__InfluenzaA__AGQ47779

SEQ ID NO: 215564 - RNA, 1413 nt, Artificial Sequence
  derived and/or modified CDS sequence (opt5) from neuraminidase__InfluenzaA__AGQ47791
augaaccccaaucagaagaucauuaccaucggcagcauuugcauggccaucgggauuaucucccugauccuccaaauuggaaacaucauuucuaucugggugagccacuccauucagacaggcucucagaaucauacggggaucuguaaccagagaauuaucaccuacgagaauaacacaugggucaaucaaacccacguuaacaucagcaauacaaacgugguggcuggaaaagacaccacauccaugauucuggccggcaauucuagccuuugcccuauccgggggugggcgauuuauuccaaggauaacagcauccgcauuggaucuaaaggcgacgucuucgugaucagagaaccguuuaucuccuguagccaucuggagugccggaccuucuuucucacgcagggcgcucugcuuaaugauaagcacucuaacgggaccguuaaagaccgcucccccuacagagcccugaugagcuguccuauuggagaagcccccucuccuuauaauucccgguucgagagcguggcuugguccgccucugcuugccaugauggcaugggguggcucacaaucggaauuagcggccccgacgauggggccgucgcggugcugaaguacaacggaaucauuaccgaaacaaucaaguccuggaaaaagcagauccugcgcacccaggagagcgaguguguuugcgugaacggcucuuguuuuacgauuaugacagacggcccuuccgaugggccggccagcuauagaaucuucaaaauugaaaagggaaaaaucaccaagucuauugagcucgacgcucccaauagccacuacgaagagugcuccuguuauccugauacaggcaccgucaugugcgugugccgggacaacuggcacgggucuaaucgccccugggugagcuuuaaccaaaaucuggauuaccagaucggauacauuuguuccggcgucuucggggacaacccuagacccaaggacggaaaaggcagcugcgauccgguuaauguggacggcgccgauggggugaagggauuuucuuaucgguacggcaacggggucuggaucggacgcaccaaauccaauagcucuagaaagggcuucgagaugaucugggacccuaacggguggacagauacggacggcaauuuucuugugaaacaggauguuguggcuaugaccgacugguccggauauagcggcuccuucguccagcaucccgaacugacagggcucgauuguaugcggccuugcuuuuggguggagcugauucgcggaagaccccgggaaaagaccacaaucuggaccucuggcagcuccauuucuuucugugggguuaacagcgacacggugaauugguccuggcccgauggagccgagcuuccuuucacaaucgacaaauga

SEQ ID NO: 215565 - RNA, 1410 nt, Artificial Sequence
  derived and/or modified CDS sequence (opt5) from neuraminidase__InfluenzaA__AGQ47803
augaaccccaaucagaagaucauuaccaucggcagcauuugcaugguggucgggaucauuucccugauccuccaaaucggaaacauuaucucuauuuggaucagccacuccauucagacaggcucucagaaucauacggggaucuguaaccagagcauuaucaccuacaaaaauuccacauggguuaaccaaaccuaugugaauaucucuaacacaaauguggucgccggaaagggcaccacaagcgugauucuggcugggaacuccagccuuugcccuaucagaggaugggccauuuacucuaaagacaauggcauccggauuggcuccaagggggauguuuucgugauccgcgagccguuuaucagcuguucucaccuggaaugcagaaccuucuuucucacgcagggagcgcugcuuaacgacaaacauuccaauggcaccgucaaggaucggagccccuaucgcgcucugaugucuuguccugugggggaggcccccuccccuuacaacagcagauucgaauccguugccuggucugcuugcgccugucacgacggaaugggcuggcucacaauugggaucagcggacccgaugacgaggcuguggccguccugaaguauaauggcauuaucaccgaaacaauuaaauccuggcggaagaaaauccugcgcacccaggagagcgagugcgugugugugaacggcucuugcuuuacgaucaugacagaugggccuuccgacggaccggcgagcuacaagauuuucaaaaucgaaaagggcaaggucaccaaaucuauugagcucgaugcccccaacagccauuaugaagaguguuccugcuacccugacacagggaagguuaugugcguguguagagauaauuggcacggaucuaaccggcccugggugagcuuugaccagaaucuggauuaccaaaucggcuauauuugcuccggggucuucggagacaacccucgccccaaagacggcaagggcagcugugggccgguguacguugauggagcuaauggcgugaaaggguuuucuuauagauacggaaacggcgucuggaucgggcggaccaaguccgacagcucucgccagggcuucgagaugauuugggauccuaauggauggaccgaaacagacuccaacuuuuucgugaaacaggauaucguugccaugacggacuggagcggcuauuccgggucuuuugugcagcaccccgagcuuaccggacuggauugcaugagaccuuguuucugggucgaacucauccggggccgccccaaggagaagacaauuuggaccagcggguccucuaucagcuucugcggagucaauuccgacacaguggauuggagcuggcccgacggcgcugaacugccuuuuaccauugauaaauga

SEQ ID NO: 215566 - RNA, 1368 nt, Artificial Sequence
  derived and/or modified CDS sequence (opt5) from neuraminidase__InfluenzaA__AGQ47814
augaaccccaaucagaagaucauuaccaucggcagcauuugcauggccaucgggauuaucucccugauccuccaaauuggaaacaucauuucuaucugggugagccacuccauucagacaggcucucagaaucauacggggaucuguaaccagagaauuaucaccuacgagaauaacacaugggucaaagacaccacaagcaugacccuggcuggaaauuccucucuuugcccuauccggggcugggccauuuauagcaaggauaacuccauccgcauugggagcaaaggagacguuuucgugaucagagaaccguuuauuucuuguucccaccuggagugccggacauucuuucucacccaaggcgcgcugcuuaaugauaagcauagcaacggcacggugaaagaccgcucucccuacagagcucugauguccuguccuaucggggaagcccccagcccuuauaauucucgguucgaguccgucgccuggagcgcuuccgccugccacgauggaaugggcuggcucaccaucgggauuucuggacccgacgauggcgcuguggccguucugaaguacaacgggaucauuacagaaaccaucaagagcuggaaaaagcagauucugcgcacacaggaguccgagugugugugcgucaauggaagcuguuuuaccaucaugacggacggcccuucugauggcccggcguccuauagaaucuucaaaauugaaaaggggaaaaucacaaagagcauugagcucgacgcccccaacucucauuacgaagagugcagcuguuauccugauaccggaacagugaugugcguuugccgggacaauuggcacggcuccaaccgccccugggugucuuuuaaccagaaucuggauuaccaaaucggguacauuuguagcggagucuucggcgacaacccuagacccaaggacgggaaaggauccugcgauccggugaauguggacggcgcugauggcgucaagggguuuagcuaucgguacggaaacggcguuuggaucgggcgcaccaaaucuaauuccagcagaaagggauucgagaugauuugggacccuaacggcuggaccgauacagacgggaauuuucuugugaaacaggauguggucgccaugacggacuggucuggcuauuccggcagcuucgugcagcaccccgaacugaccggacucgauuguaugcggccuugcuuuuggguugagcugauccgcgggagaccccgggaaaagacaaccaucuggacauccggaucuagcauuuccuucuguggcgugaacucugacaccgucaauuggagcuggcccgauggggcugagcuuccuuucacgaucgacaaauga

SEQ ID NO: 215567 - RNA, 1413 nt, Artificial Sequence; identical to SEQ ID NO: 208529
  derived and/or modified CDS sequence (opt5) from neuraminidase__InfluenzaA__AGQ47826

SEQ ID NO: 215568 - RNA, 1410 nt, Artificial Sequence
  derived and/or modified CDS sequence (opt5) from neuraminidase__InfluenzaA__AGQ47838
augaaccccaaucagaagaucauuaccaucggcagcgugucccugacaauugccacgaucugcuuccucaugcaaauugcuauccuggucaccacaguuacccuucacuuuaaacaguacgagugugacucuccugccaacaaucaggugaugccgugcgaacccaucauuaucgagagaaacauuacagaaaucguguaucugaccaauacaaccauugagaaggaaaucuguccuaaacucgucggguaccggaacuggagcaagccccagugcaaaauuacgggauucgcgccuuuuuccaaggauaauucuauccgccugagcgcuggcggggacaucugggugaccagagagcccuauguuuccugugauccuggaaagugcuaccaauucgcccuuggccaggggacaacccuggacaacaaacauucuaaugauacaauucacgaccggaccccgcaucgcacgcuccugaugaacgagcugggagugcccuuucaccucggcacaaagcaggucuguaucgccuggagcuccagcucuugccaugauggcaaggcuuggcugcacguguguguuaccggguaugacaaaaaugccacagcuuccuucauuuacgauggaagacuuguggacagcaucggcucuuggucccagaacauucugcggacccaagaaagcgagugcgucuguaucaaugggaccugcacaguggugaugacggauggaucugccuccggccgcgcggacaccaaaauccucuuuauugaagaggggaagaucguccacauuagcccucuguccggaucugcccagcauguugaggaaugcagcuguuaucccagauacccuggcgugcggugcaucugucgcgauaacuggaagggcuccaauagacccguggucgacauuaacgugaaagacuacagcaucgauucuuccuauguuugcagcgggcuugugggagacacaccgcggaacaaugaucgcucuagcuccucuuacuguagaaacccuaauaacgagaagggcaaucacggggucaaaggaugggcuuucgacgauggcaacgacguguggauggggcggaccaucagcgaagauucccgcagcggauaugagacauuuaagguuauuggcggcuggucuacccccaauuccaaacugcagaucaacagacaggugauugucgacagcgauaaucggucuggguacuccggaaucuucagcguggaaggcaaguccugcauuaacagauguuuuuaugucgagcucauccgcgggcgggagcaagaaacgagagugugguggacaucuaauagcauuguuguguucugcggaaccuccggcaccuacgggacaggcucuuggccugacggagccgauaucaaccugaugcccaucuga

SEQ ID NO: 215569 - RNA, 1362 nt, Artificial Sequence
  derived and/or modified CDS sequence (opt5) from neuraminidase__InfluenzaA__AGQ47850
augaaccccaaucagaagaucauuaccaucggcagcauuugcaugguggucgggaucauuucccugauccuccaaaucggaaacauuaucucuauuuggaucagccacuccauucaggccggcucuagcacauggguuaaucagacguacgugaacaucuccaauaccaacguggucgcugggccugacgccacaucugugauucugaccggaaauagcucccuuuguccgaucagaggcugggcgaucuauagcaaagauaacgggauucggaucggaucuaagggcgacauuuucguuauccgcgagcccuuuauuuccugcagccaucuggaauguagagcuuucuuucucacacagggcgcccugcuuaaugauaaacacucuaacgggaccgugaaggaccgguccccuuaccgcgcccugaugagcugccccgucggagaggcuccuucucccuauaauuccagauucgaaagcguggccugguccgcuucugccugucaugauggcaugggguggcucacaaucggaaucagcggcccugacaacggggcgguugccgugcugaaauacaauggaauuaucaccgagacgauuaaguccuggcggaagaaaauccugcgcacccaagaaagcgagugcgcuugugucaacggcucuugcuuuacaauuaugaccgauggcccguccgacgggcccgccagcuauaagaucuucaaaaucgagaagggaaaagugacaaagucuauugaacucgaugcuccuaauagccacuacgaggaauguuccugcuaucccgacaccggcaaggugaugugugucugcagagauaacuggcaugggucuaaccggccuuggguuagcuuugaccagaaucuggauuaccagaucggauacauuugcuccggcguguucggggacagcccccgcccgaaagacggaacgggcucuuguggcccuguguccgucgauggggccaacggagugaagggcuuuagcuauagauacgggaauggaguuuggaucggccggacaaaaucuaaguccagccgccacggguucgagaugauuugggaccccaacggcuggaccgagacagauuccagauuuucugugcggcaggacgucguggcgaugaccgauuggagcggauauuccggcucuuucguucaacacccugaacuuaccgggcuggacugcaugcgccccuguuuuuggguggagcucaucagaggacagcccaaagaaaagacaauuuggacgagcggcuccagcaucucuuucugcggggucaauuccgauaccguggacuggagcuggccugauggagccgagcugccguucacaaucgacaaauga

SEQ ID NO: 215570 - RNA, 1410 nt, Artificial Sequence
  derived and/or modified CDS sequence (opt5) from neuraminidase__InfluenzaA__AGQ47873
augaacaccaaucagagaacaaucacgauuggcaccaucugccugauuguggggaucauuagccuccugcuucaaaucggaaacaucauucugcucuggaugucccacucuauccagacaggcgaaaagagccaucccaaagucuguaaucaguccguuauuaccuacgagaacaauacaugggugaaccagaccuaugugaauaucucuaacacaaauauugccgcugggcaaggagucaccccuaucauucuggccggcaacagcucccuuugcccgaucucugggugggcgaucuacagcaaggacaauuccauucggaucggaagcaaaggcgauauuuucgugaugcgcgagcccuuuaucucuuguucccaccuggaaugcagaacguucuuucucacccagggcgcucugcugaacgaccggcauagcaaugggacaguuaaggaucgcucuccuuauagaacccucauguccugucccauuggagaggccccuagccccuacaacucucgguucgaauccguggccuggagcgcuuccgccugccacgacggcaugggguggcugacaaucggaaucucuggcccugauaauggggcugucgccgugcuuaaauauaacggaauuaucaccgacacgauuaagagcuggcgcaacaagauccugagaacacaggaguccgaguguguuugcauuaauggcagcuguuuuaccaucaugacagauggcccgucuaacgggcaggcguccuacaaacucuucaagauggaaaaaggaaagaucauuaaaagcaucgagcuggacgcccccaauuaucauuacgaagagugcucuuguuacccugauaccggcaagguggucugcgugugccgggacaacuggcacgcuagcaaucgccccuggguguccuuugaucaaaaccuugacuaucagauuggguacaucuguucuggagucuucggcgauaauccuagaagcaacgacgggaagggaaauugcggccccguucuguccaacggcgccaauggggugaaaggauuuagcuuccgguauggcaacgggguguggauuggacgcaccaagucuaucuccagcagaucuggcuuugagaugauuugggacccgaauggguggacagaaacggauuccagcuucuccaugaaacaggacaucaucgcucucaccgauuggucuggcuacagcggauccuuuguccagcacccugagcugacaggcaugaacuguauucggcccugcuucuggguggaacugauccgcgggcaaccuaaggagucuaccauuuggacaagcggauccagcaucucuuucuguggcguuaauuccgggaccgccagcuggucuuggcccgacggagcggaucuccccuuuacgauugacaaauga

SEQ ID NO: 215571 - RNA, 1410 nt, Artificial Sequence; identical to SEQ ID NO: 209286
  derived and/or modified CDS sequence (opt5) from neuraminidase__InfluenzaA__AGQ47885

SEQ ID NO: 215572 - RNA, 1410 nt, Artificial Sequence; identical to SEQ ID NO: 214052
  derived and/or modified CDS sequence (opt5) from neuraminidase__InfluenzaA__AGQ47897

SEQ ID NO: 215573 - RNA, 1410 nt, Artificial Sequence; identical to SEQ ID NO: 206167
  derived and/or modified CDS sequence (opt5) from neuraminidase__InfluenzaA__AGQ47909

SEQ ID NO: 215574 - RNA, 1410 nt, Artificial Sequence
  derived and/or modified CDS sequence (opt5) from neuraminidase__InfluenzaA__AGQ47921
augaaccccaaucagaagaucauuaccaucggcagcgugucccugacaauugccacggucugcuuccucaugcaaaccgcuauccugguuacaaccgugacacuucacuuuaaacaguacgagugugacucuccugccagcaaccaggugaugccgugcgaacccauuaucaucgagagaaauauuaccgaaaucgucuaucugaacaauacaaccauugagaaggaaaucuguccuaaagugguugaguaccggaacugguccaagccccagugccaaauuacgggguucgcgccuuuuucuaaagauaauagcauccgccucuccgcuggaggcgacauuugggugaccagagagcccuaugucucuugugaucaugggaagugcuaccaguucgcccugggacagggcacaacccuugacaacaagcacagcaaugauacaauccaugaccggaucccucaccgcacccugcucaugaacgaacugggggugccguuucaucugggaacgagacagguuuguauugccugguccuccucuuccugccacgauggcaaggcuuggcuccacguguguaucacaggcgacgauaaaaaugccaccgcuagcuucauuuaugacgggcggcuggucgauucuaucggauccuggagccaaaacauucuucgcacacaggagucugaaugcguguguaucaauggaaccugcaccguggucaugacagacggguccgccagcggcagagcggauacgcggauccuguuuauugaggagggcaaaaucguucauauuagcccccucucugggagcgcccagcacguggaagagugcuccuguuacccucgcuaucccggagugagaugcaucugucgggacaacuggaagggcagcaaucgcccugucguggacauuaacauggaagauuacucuaucgacuccagcuacguuugcucuggccuggugggggauacccccagaaacgacgaucggagcuccaauucuaacugucgcaauccgaacaaugagagaggaaaccagggcgucaaagggugggcuuucgacaauggagaugacguguggaugggccggacaaucagcaaggaucuuagauccggguaugaaaccuuuaagguuauuggaggcuggagcacaccuaacucuaaaucccaaaucaaucgccaggugauugucgacagcgauaaccggucuggcuacuccgggaucuucagcguggagggaaaguccugcauuaauagauguuuuuaugucgagcugauccgcggccggaaacaggaagccagagugugguggaccucuaacagcauuguuguguucugcgggacguccggaacauacggcaccgggucuuggcccgacggcgcuaauaucaacuuuaugccuaucuga

SEQ ID NO: 215575 - RNA, 1365 nt, Artificial Sequence
  derived and/or modified CDS sequence (opt5) from neuraminidase__InfluenzaA__AGQ47933
augaaccccaaucagaagaucauuaccaucggcagcauuugcaugguggucgggcugaucucccucauucugcaaaucggaaacaucauuucuaucuggauuagccacuccauccagacaggcucucagaaucauacggggauuuguaaccagaauaucauuaccuacaaaaacagcacauggguuaaggacaccacauccgugauccuuaccggaaauucuagccugugcccuaucagaggcugggccauuuauuccaaagauaacagcauccggauugggucuaagggagacguguucgucauccgcgagccguuuauuuccuguagccaccucgaaugcagaacauucuuucugacccaaggcgcccuucugaaugaucggcauucuaacggcacggugaaagaccgcucccccuacagagcucucaugagcuguccuguuggggaggcgcccucuccuuauaauucccgguucgaaagcguggcuugguccgccucugccugccacgauggaaugggcuggcugaccaucgggaucagcggacccgacaacggcgcugucgccgugcugaaguacaaugggauuaucacagagaccauuaaguccuggcgcaaaaagauccucagaacacaggaaagcgagugugcuugcguuaacggaucuuguuuuaccauuaugacggauggcccuuccgacggccuggccagcuauaaaaucuucaagaucgagaaagggaaggugacaaagucuauugaacuuaaugcgccgaacagccauuacgaggaaugcuccuguuaucccgauaccggaaaagucaugugcgugugccgggacaacuggcacggcucuaaucgcccuugggugagcuuugaucagaaccuggacuaccagaucggguacauuuguuccggagucuucggcgauaaucccagaccuaaggacgggacaggaagcugcggccccguuuauguggacggcgccaacggggugaaaggauuuucuuaccgguauggcaauggggucuggaucggacgcaccaagucccacagcucuagacauggcuucgagaugauuugggauccgaacggguggaccgagacagacuccaaauuuagcgugcggcaagauguuguggcuaugacggacugguccggcuacucuggcagcuucguccagcacccugaacucaccggacuggauuguauccgccccugcuuuuggguggagcuuauuagagggcggccuaaggagaaaacaaucuggaccuccgccucuagcaucuccuucuguggaguuaauagcgacacagugaacuggucuuggcccgauggcgcugaacugcccuucaccauugacaaguga

SEQ ID NO: 215576 - RNA, 1365 nt, Artificial Sequence; identical to SEQ ID NO: 207791
  derived and/or modified CDS sequence (opt5) from neuraminidase__InfluenzaA__AGQ47945

SEQ ID NO: 215577 - RNA, 1365 nt, Artificial Sequence; identical to SEQ ID NO: 207791
  derived and/or modified CDS sequence (opt5) from neuraminidase__InfluenzaA__AGQ47957

SEQ ID NO: 215578 - RNA, 1365 nt, Artificial Sequence; identical to SEQ ID NO: 207791
  derived and/or modified CDS sequence (opt5) from neuraminidase__InfluenzaA__AGQ47969

SEQ ID NO: 215579 - RNA, 1365 nt, Artificial Sequence; identical to SEQ ID NO: 207791
  derived and/or modified CDS sequence (opt5) from neuraminidase__InfluenzaA__AGQ47981

SEQ ID NO: 215580 - RNA, 1365 nt, Artificial Sequence
  derived and/or modified CDS sequence (opt5) from neuraminidase__InfluenzaA__AGQ48005
augaaccccaaucagaagaucauuaccaucggcagcauuugccugguggucgggcucaucucccugauucuucaaaucggaaacaucauuucuaucuggauuagccacuccauccagacaggcucucagaaucauacggggauuuguaaccagaauaucauuaccuacaaaaacagcacauggguuaaggacaccacauccgugauccugaccggaaauucuagccucugcccuaucagaggcugggccauuuauuccaaagauaacagcauccggauugggucuaagggagacguguucgucauccgcgagccguuuauuuccuguagccaccuggaaugcagaacauucuuucuuacccaaggcgcucugcucaaugauaaacauucuuccggcacggugaaggaccggagccccuaccgcgcccugaugucuuguccuguuggggaggcgcccuccccuuauaacagcagauucgaauccguggcuuggucugccagcgccugccacgauggaaugggcuggcugaccaucgggaucuccggacccgacaauggcgcugucgccgugcucaaguacaacgggauuaucacagagaccauuaaaagcuggcggaagaaaauccugcgcacacaggaaucugagugugcuugcguuaauggauccuguuuuaccauuaugacggauggcccuagcgacggccuugccucuuauaagaucuucaaaaucgagaaggggaaggugacaaaaagcauugaacugaacgcgcccaauucccauuacgaggaaugcucuuguuauccggauaccggaaaggucaugugcgugugcagagacaacuggcacggcagcaaccggccuuggguguccuuugaucagaaucucgacuaccagaucggguacauuuguagcggagucuucggcgauaacccccgcccugaggacgggacaggaucuugcggccccguuuauguggacggcgccaauggggugaaaggauuuuccuacagauauagcaacggcgucuggaucgggcggaccaagucucacuccagccgccauggauucgagaugauuugggauccgaauggcuggaccgaaacagacuccaaauuuucugugagacaagauguuguggcuaugacggacuggagcggguacuccggcucuuucguccagcacccugagcugaccggacuugauuguaugcggcccugcuuuuggguggaacugauccgcggcagaccuaaggagaaaacaauuuggaccagcgccuccagcaucucuuucugugggguuaacuccgacacaguggauuggagcuggcccgacggagcugaacuccccuucucuaucgauaaguga

SEQ ID NO: 215581 - RNA, 1365 nt, Artificial Sequence; identical to SEQ ID NO: 215580
  derived and/or modified CDS sequence (opt5) from neuraminidase__InfluenzaA__AGQ48017

SEQ ID NO: 215582 - RNA, 1365 nt, Artificial Sequence; identical to SEQ ID NO: 207791
  derived and/or modified CDS sequence (opt5) from neuraminidase__InfluenzaA__AGQ48029

SEQ ID NO: 215583 - RNA, 1365 nt, Artificial Sequence
  derived and/or modified CDS sequence (opt5) from neuraminidase__InfluenzaA__AGQ48041
augaaccccaaucagaagaucauuaccaucggcagcauuugccugguggucgggcucaucucccugauucuucaaaucggaaacaucauuucuaucuggauuagccacuccauccagacaggcucucagaaucauacggggauuuguaaccagaauaucauuaccuacaaaaacagcacauggaucaaggacaccacauccguuauccugaccggaaauucuagccucugcccuauuagaggcugggccaucuauuccaaagauaacagcauucggaucgggucuaagggagacguguucgugauucgcgagccguuuaucuccuguagccaccuggaaugcagaacauucuuucuuacccaaggcgcucugcucaaugauaaacauucuuccggcacggucaaggaccggagccccuaccgcgcccugaugucuuguccugugggggaggcgcccuccccuuauaacagcagauucgaauccguugcuuggucugccagcgccugccacgauggaaugggcuggcugaccaucgggauuuccggacccgacaauggcgcuguggccguccucaaguacaacgggaucauuacagagaccaucaaaagcuggcggaagaaaauucugcgcacacaggaaucugagugugcuugcgugaauggauccuguuuuaccaucaugacggauggcccuagcgacggccuugccucuuauaagaucuucaaaauugagaaggggaagguuacaaaaagcaucgaacugaacgcgcccaauucccauuacgaggaaugcucuuguuauccggauaccggaaaggugaugugcgucugcagagacaacuggcacggcagcaaccggccuuggguguccuuugaucagaaucucgacuaccagauuggguacaucuguagcggaguguucggcgauaacccccgcccugaggacgggacaggaucuugcggccccgucuauguugacggcgccaauggggugaaaggauuuuccuacagauauggcaacgggguguggauuggacggaccaagagccacucuucccgccauggcuucgagaugaucugggauccgaauggguggaccgaaacagacagcaaauuuuccgucagacaagaugugguugcuaugacggacuggucuggcuacagcggauccuucgugcagcacccugagcugaccggccuugauuguaugcggcccugcuuuugggucgaacugauucgcgggagaccuaaggagaaaacaaucuggaccucugccagcuccaucagcuucuguggagugaacucugacacaguugauugguccuggcccgacggcgcugaacuccccuucagcauugauaaguga

SEQ ID NO: 215584 - RNA, 1365 nt, Artificial Sequence
  derived and/or modified CDS sequence (opt5) from neuraminidase__InfluenzaA__AGQ48053
augaaccccaaucagaagaucauuaccaucggcagcauuugccugguggucgggcucaucucccugauucuucaaaucggaaacaucauuucuaucuggauuagccacuccauccagacaggcucucagaaucauacggggauuuguaaccagaauaucauuaccuacaaaaacagcacauggaucaaggacaccacauccguuauccugaccggaaauucuagccucugcccuauuagaggcugggccaucuauuccaaagauaacagcauucggaucgggucuaagggagacguguucgugauucgcgagccguuuaucuccuguagccaccuggaaugcagaacauucuuucuuacccaaggcgcucugcucaaugauaaacauucuuccggcacggucaaggaccggagccccuaccgcgcccugaugucuuguccugugggggaggcgcccuccccuuauaacagcagauucgaauccguugcuuggucugccagcgccugccacgauggaaugggcuggcugaccaucgggauuuccggacccgacaauggcgcuguggccguccucaaguacaacgggaucauuacagagaccaucaaaagcuggcggaagaaaauucugcgcacacaggaaucugagugugcuugcgugaauggauccuguuuuaccaucaugacggauggcccuagcgacggccuugccucuuauaagaucuucaaaauugagaaggggaagguuacaaaaagcaucgaacugaacgcgcccaauucccauuacgaggaaugcucuuguuauccggauaccggaaaggugaugugcgucugcagagacaacuggcacggcagcaaccggccuuggguguccuuugaucagaaucucgacuaccagauuggguacaucuguagcggaguguucggcgauaacccccgcccugaggacgggacaggaucuugcggccccgucuauguugacggcgccaauggggugaaaggauuuuccuacagauauggcaacgggguguggauuggacggaccaagagccacucuucccgccauggcuucgagaugaucugggauccgaauggguggaccgaaacagacagcaaauuuuccgucagacaagaugugguugcuauggccgacuggucuggcuacagcggauccuucgugcagcacccugagcugacgggccuugauuguaugcggcccugcuuuugggucgaacugauucgcgggagaccuaaggagaaaaccaucuggacaucugcuagcuccaucagcuucuguggagugaacucugacaccguugauugguccuggcccgacggcgccgaacuccccuucagcauugauaaguga

SEQ ID NO: 215585 - RNA, 1410 nt, Artificial Sequence
  derived and/or modified CDS sequence (opt5) from neuraminidase__InfluenzaA__AGQ81707
augaaccccaaucagaagaucauuaccaucggcagcauuugcauggugaucgggauugccucccugaugcuccaaaucggaaacaugaucucuauuugggucagccacuccauccagacaggcaaucaguaccagccugagccguguaaccaaucuauuaucacguaugaaaauaacaccuggguuaaucagacauacgugaacauuagcaauaccaacuuccugacagagcaggcugugaccuccgucgcccuugcgggaaauucuagccugugccccaucuccgggugggcuauuuauagcaaagacaacggcaucagaaucgggucuaagggagauguguuuguuauucgggaaccuuucaucuccuguagccaucucgagugccgcacauuuuuccugacccagggcgcccuucugaaugacaaacacucuaacggcacggugaaggauagaucccccuaccggacccucaugagcuguccugucggggaagcccccucuccuuauaauucccgcuuugagagcguggcuugguccgccucugcuugccaugacggaauuagcuggcugacaaucggcauuuccgggccggauaacggagccguugcggugcugaaauacaacggcaucaucaccgacacaauuaagagcuggagaaauaacauccuccggacccaagagucugaaugugccugcgucaauggguccuguuucacggugaugacagauggacccagcaacggccaggcuucuuauaagauuuuuaaaaucgagaagggcaaaguggucaagagcguugaacugaaugccccuaacuaccacuacgaggagugcuccuguuaucccgacgcugggaaaauuaugugcgugugccgcgauaauuggcauggaucuaacagaccuugggugagcuucaaucagaaccuugaauaccagaucggcuauaucuguuccggggucuuuggagacaauccccggccgaacgauggcaccgggagcugcggaccugugucuuccaauggcgccuacggcguuaagggguucagcuuuaaguauggaaacggcguguggauugggcgcacaaaaucuaccuccagcagauccggauucgagaugaucugggaccccaauggcuggaccgaaacagauucuagcuuuuccgucaagcaagacauuguggcgaucacggacuggucuggguacagcggcuccuucguucagcacccugagcugaccggacucgauuguaugcggcccugcuucuggguggaacugauucgcggcagacccaaagagaacacaaucuggaccagcgggucuuccauuagcuuuuguggagucgacucugauacagugggcugguccuggccugacggggccgagcuuccguucaccaucgauaaguga

SEQ ID NO: 215586 - RNA, 1410 nt, Artificial Sequence
  derived and/or modified CDS sequence (opt5) from neuraminidase__InfluenzaA__AGQ81715
augaaccccaaucagaagaucauugccaucggcagcgugucccugaccauugcuacaaucugccuccugaugcaaauugccauccuugucacgaccaugacacugcacuucaaacauaacgaguguaccaauucuagcaacaaucaggcgguuccuugcgggccgaucauuaucgaaagaaacgugacagagauugugcaccucaauuccaccacacuggaaaaggagaucugucccaaagcugccggauaccgggacuggucuaagccucagugccagauuaccggcuuugcccccuucagcaaagauaacuccauccgccuuucugcuagcggggacauuugggucacgagagaaccuuauguguccuguggacugggcaagugcuaccaauuugcccucgggcagggaaccacacuggauaaucggcauagcaacggcaccucucacgaccgcacacccuauagaacccugcucaugaaugagcugggcguuccuuuccaucuugcuacgaaacagguguguaucgccugguccucuagcuccugccacgaugggaaggcguggcugcacgucugugugacaggagacgaucggaacgccaccgcuagcaucauuuacgacggcauccucguugauucuauuggguccuggagcaagaauauccugcgcacacaggaguccgaaugcguguguauuaacggaaccugcaccgucgugaugacagacggcucugccagcgggaaagcugauacgagaauccuuuuuauccgggagggaaagauugugcauaucuccccgcugagcggcucugcccaacacgucgaagagugcuccuguuauccccaguacccugagguucgcugcguguguagagacaauuggcggggcagcaaccgccccgugcucuauauuaacauggcggauuacucuaucgacagcggguacgucugcuccggacuggugggcgacaccccuagaaaugaugacauuucuagcuccagcaacuguaaagaucccaauaacgaacgcggggccccgggaguuaagggcugggcuuucgacucugggaaugauaucuggaugggacggacaaucgagaaggacuccagaagcggcuaugaaaccuuucgggugauuggcggguggaacacagccaauucuaaaucccagaccagcagacaggucaucguggauuccggaaacucuagcggcuacuccgggauuuucucuaucgagggaaagagcugcauuaaucgcuguuuuuauguugaacugauccggggcagaccuaaagagacgcgcgugugguggacauccaacagcauuaucgucuucugcgggaccucuggcaccuacggaacaggcuccuggcccgacggggcuaauaucaacuuuauggccauuuga

SEQ ID NO: 215587 - RNA, 1410 nt, Artificial Sequence
  derived and/or modified CDS sequence (opt5) from neuraminidase__InfluenzaA__AGQ81717
augaaccccaaucagaagaucauugccaucggcagcgugucccugaccauugcuacaaucugccuccugaugcaaauugccauccuugucacgaccaugacaccucacuucaaacaugacgaguguaccaacucuagcaauaaccaggcgguuccgugcgggcccaucauuaucgaaagaaaugugacagagauugugcacaucaacuccaccauucuggaaaaggagaucuguccuaaagcugccggauaccggaauuggucuaagccccagugccagauuaucggcuuugccccuuucagcaaagauaacuccauccgccucucugcuagcggggacauuugggucacaagagaacccuauguguccuguggacugggcaagugcuaccaauuugcccuugggcagggaaccacgcuggauaaucggcauagcaacggcaccucucacgaccgcacaccucauagaacccuccugaugaaugagcugggcguuccguuccaccucgcuacaaaacagguguguaucgccugguccuccucuuccugccacgaugggaaggcguggcugcaugucugugugaccggagacgaucggaacgccacggcuagcauuaucuaugacggcaugcuuguugauucuauuggguccuggagcaagaauauccugcgcacacaggaguccgaaugcguguguaucaacggaaccugcacagucgugaugaccgacggcucugccagcgggaaagcugauacccggauucucuuuauccgggagggaaagauugugcacaucagcccccugagcggcucugcccaacaugucgaagagugcuccuguuacccucaguaucccgagguucgcugcguguguagagacaauuggcggggcagcaaccgcccugugcuuuacauuaacauggcggauuauucuaucgacagcggguacgucugcuccggacuggugggcgacacacccagaaaugaugacaucucuagcuccagcaacuguaaagauccgaauaacgaaagaggggccccuggaguuaagggcugggcuuucgacucugggaaugauauuuggaugggacgcacgaucgagaaggacuccagaagcggcuacgaaaccuuucgggugauuggcggguggaacacagccaauucuaaaucccagaccagcagacaggucaucguggauuccgacaacucuagcggauauuccggcauuuucucuguugagggaaagagcugcaucaaucgcuguuuuuacguggaacucauucgggggagacccaaagagacacgcgucugguggaccuccaacagcaucaucguguucugcggcacgucugggacauauggcaccggauccuggccugauggcgcuaauauuaacuuuauggccaucuga

SEQ ID NO: 215588 - RNA, 1410 nt, Artificial Sequence
  derived and/or modified CDS sequence (opt5) from neuraminidase__InfluenzaA__AGQ81718
augaaccccaaucagaagaucauugccaucggcagcgugucccugaccauugcuacaaucugccuccugaugcaaauugccauccuugucacgaccaugacacugcacuucaaacauaacgaguguaccaauucuagcaacaaucaggcgguuccuugcgggccgaucauuaucgaaagaaaccucacagagauugugcaccugaauagcaccauccuugaaaaggagauuugucccaaagcugccggauaccggaacuggucuaagccucagugccagaucacaggcuuugcccccuucagcaaagacaauuccauucgccugucugcuagcggggauaucugggugaccagagaaccuuaugucuccuguggacucggcaagugcuaccaauuugcccuggggcagggaacgacccuggacaaccggcauagcaauggcacaucucacgaucgcacaccccauagaacccuccugaugaacgagcuuggcgugccuuuccaccuguccaccaagcagguuuguaucgcuugguccucuuccagcugccacgacgggaaagccuggcuccaugugugugucacgggagaugaccggaaugcgacagccucuauuaucuaugauggcauucugguggacuccaucguuagcugguccaagaacauucuucgcacccaggagucugaaugcguguguaucaaugggacaugcaccgucgugaugaccgauggaagcgcuuccggcaaagccgacacaagaauccuguuuauucgggaggggaagaucgugcacauuagcccgcucucuggauccgcucaacaugucgaagagugcagcuguuacccccgcuauccugagguuagaugcgugugucgggauaacuggcgcggcucuaacagacccgugcuguacaucaauauggccgacuauagcauugauuccggcuacgucugcucugggcuggugggagacacgccucggaacgacgauaccagcuccagcucuaauugucgcgaccccaacaaugaaagaggcgcgccggggguuaaaggaugggccuucgauuccggcaacgacaucuggauggggcggacaaucgagaaggauagcagaucuggauacgaaaccuuucgcgugauuggcggcuggaauacagcuaacuccaagagccagaccucccggcaggucaucguggacucugauaauagcuccggguauucuggaguuuucagcguggagggcaaauccugcauuaacagauguuuuuacgucgaacucauccgcgggcggccuaaggagacgagagugugguggacaagcaauucuauuaucgucuucugcggaaccuccggcaccuaugggacaggcagcuggcccgacggagccaacauuaauuuuauggcuaucuga

SEQ ID NO: 215589 - RNA, 1410 nt, Artificial Sequence
  derived and/or modified CDS sequence (opt5) from neuraminidase__InfluenzaA__AGQ81719
augaaccccaaucagaagaucauugccaucggcagcgugucccugaccauugcuacaaucugccuccugaugcaaauugccauccuugucacgaccaugacacugcacuucaaacauaacgaguguaccaauucuagcaacaaucaggcgguuccuugcgggccgaucauuaucgaaagaaacgugacagagauugugcaccucaauuccaccacacuggaaaaggagaucuguaccaaagcugccggauaccgggacuggucuaagccccagugccagauuacgggcuuugccccuuucagcaaagauaacuccauccgccuuucugcuagcggggacauuugggucaccagagaacccuauguguccuguggacugggcaagugcuaccaauuugcccucgggcagggaacaacccuggauaaucggcauagcaacggcacaacccacgaccgcacgccucauagaacacugcucaugaaugagcugggcguucccuuccaccuugcuaccaaacagguguguaucgccuggucuuccagcucuugccacgaugggaaggcguggcugcaugucugugugacaggagacgaucggaacgccaccgcuuccaucauuuaugacggcauccucguugauagcauugggucuugguccaagaauauccugcgcacccaggagagcgaaugcguguguauuaacggaacaugcacggucgugaugaccgacggcuccgccucugggaaagcugauacaagaauccuuuuuauccgggagggaaagauugugcacaucagcccucuguccggcagcgcccaacaugucgaagagugcucuuguuacccgcaguaucccgagguucgcugcguguguagagacaauuggcggggcuccaaccgcccugugcucuacauuaacauggcggauuauagcaucgacucuggguacgucugcagcggacuggugggcgacacccccagaaaugaugacauuuccucuaacagcaauuguaaagauccuaacaaugaauccggggcccccggaguuaagggcugggcuuucgacagcgggaacgauaucuggaugggacggacaaucgagaaggacucucgcuccggcuacgaaaccuuuagagugauuggcggguggaauacggccaacagcaaaucucagacaucccggcaggucaucguggauagcgacaauuccucuggauauagcggcauuuucuccaucgaggggaagucuugcauuaacagauguuuuuacguugaacugauccgcggacggccgaaagagaccagagugugguggaccagcaauuccauuaucgucuucugcggcacaagcgggaccuauggcacaggaucuuggccugauggcgcuaacaucaauuuuauggccauuuga

SEQ ID NO: 215590 - RNA, 1410 nt, Artificial Sequence
  derived and/or modified CDS sequence (opt5) from neuraminidase__InfluenzaA__AGQ81722
augaaccccaaucagaagaucauugccaucggcagcgugucccugaccauugcuacaaucugccuccugaugcaaauugccauccuugucacgaccaugacaccucacuucaaacaugacgaguguaccaacucuagcaauaaccaggcgguuccgugcgggcccaucauuaucgaaagaaaugugacagagauugugcacaucaacuccaccauucuggaaaagggaaucuguccuaaagcugccggcuaccggaauuggucuaagccccagugccagauuaucggguuugccccuuucagcaaagauaacuccauccgccucucugcuagcggagacauuugggucacaagagagcccuauguguccuguggccuggggaagugcuaccaauuugcccuuggacagggcaccacgcuggauaaucggcauagcaacggcaccucucacgaccgcacaccucauagaacccuccugaugaaugaacuggggguuccguuccaccucgcuacaaaacagguguguaucgccugguccuccucuuccugccacgauggaaaggcguggcugcaugucugugugaccggcgacgaucggaacgccacggcuagcauuaucuaugacgggaugcuuguugauucuauuggauccuggagcaagaauauccugcgcacacaggaguccgagugcguguguaucaacgggaccugcacagucgugaugaccgacggcucugccagcggaaaagcugauacccggauucucuuuaucagagaaggcaagauugugcacaucagcccccugagcggcucugcccaacaugucgaggaaugcuccuguuacccucaguaucccgagguucgcugcguguguagagacaauuggcgggggagcaaccgcccugugcuuuacauuaacauggcggauuauucuaucgacagcggauacgucugcuccggccuggugggggacacacccagaaaugaugacacgucuagcuccagcaacuguaaagauccgaauaacgagcggggagccccuggcguuaaggggugggcuuucgacucuggaaaugauaucuggaugggccgcaccauugaaaaggacuccagaagcggcuacgagacauuucgggugaucgggggauggaacaccgccaauucuaaaucccagacaagcagacaggucauuguggauuccgacaacucuagcggcuauuccgggaucuucucuguugaaggaaagagcugcauuaaucgcuguuuuuacguggagcucauccggggcagacccaaagaaacccgcgucugguggacguccaacagcauuaucguguucugcgggacaucuggcaccuauggaaccggcuccuggccugauggggcuaauaucaacuuuauggccauuuga

SEQ ID NO: 215591 - RNA, 1410 nt, Artificial Sequence
  derived and/or modified CDS sequence (opt5) from neuraminidase__InfluenzaA__AGQ81724
augaaccccaaucagaagaucauugccaucggcagcgugucccugaccauugcuacaaucugccuccugaugcaaauugccauccuugucacgaccaugacacugcacuucaaacauaacgaguguucuaauagcuccaacaaucaggcgguuccuugcgggccgaucauuaucgaaagaaacgugaccgagauugugcaccucaauucuacaacccuggaaaaggagaucugucccaaagcugccggauaccgggacuggagcaagccucagugccagauuacaggcuuugcccccuucuccaaagauaacucuauccgccuuagcgcuuccggggacauuugggucaccagagaaccuuaugugagcuguggacugggcaagugcuaccaauuugcccucgggcagggaacgacccuggauaaucggcauucuaacggcacaucccacgaccgcacaccccauagaacccugcucaugaaugagcugggcguuccuuuccaccuugcuaccaaacagguguguaucgccuggucuagcuccagcugccacgaugggaaggcguggcugcaugucugugugacgggagacgaucggaacgccacagcuucuaucauuuaugacggcauccucguugauuccauugggagcugguccaagaauauccugcgcacccaggagucugaaugcguguguauuaacggaacaugcaccgucgugaugaccgacggcagcgccuccgggaaagcugauacaagaauccuuuuuauccgggagggaaagauugugcacaucagcccgcugucuggcuccgcccaacaugucgaagagugcagcuguuacccccaguauccugagguucgcugcguguguagagacaauuggcggggcucuaaccgccccgugcucuacauuaacauggaagauuauagcaucgacuccggguacgucugcucuggacuggugggcgacacgccuagaaaugaugacauuagcuccagcucuaacuguaaagaucccaauaacgagcgcggggcgccgggaguuaagggcugggccuucgacuccgggaaugaucuguggaugggacggaccaucgaaaaggacagcagaucuggcuacgagacauuucgggugaucggcggguggaacaccgcuaauuccaaaagccagacauccagacaggucauuguggauucugacaacagcuccggauauucuggcaucuucagcguugaagggaaguccugcauuaaucgcuguuuuuacguggagcucauccggggaagaccuaaagagacccgcgucugguggacgagcaacucuauuaucguguucugcggcacauccgggaccuauggcaccggaagcuggcccgauggcgccaauauuaacuuuauggcuaucuga

SEQ ID NO: 215592 - RNA, 1410 nt, Artificial Sequence
  derived and/or modified CDS sequence (opt5) from neuraminidase__InfluenzaA__AGQ81726
augaaccccaaucagaagaucauugccaucggcagcgugucccugaccauugcuacaaucugccuccugaugcaaauugccauccuugucacgaccaugacacugcacuucaaacauaacgaguguucuaauagcuccaacaaucaggcgguuccuugcgggccgaucauuaucgaaagaaacauuaccgagaucgugcaccucaauucuacaacccuggaaaaggagauuugucccaaagcugccggauaccgggacuggagcaagccucagugccagaucacaggcuuugcccccuucuccaaagauaacucuauucgccuuagcgcuuccggggacaucugggugaccagagaaccuuaugucagcuguggacugggcaagugcuaccaauuugcccucgggcagggaacgacccuggauaaucggcauucuaacggcacaucccacgaccgcacaccccauagaacccugcucaugaaugagcugggcgugccuuuccaccuugcuaccaagcagguuuguaucgccuggucuagcuccagcugccacgaugggaaagcguggcugcaugugugugucacgggagacgaucggaacgccacagcuucuauuaucuaugacggcauucucguggauuccaucgggagcugguccaagaauauucugcgcacccaggagucugaaugcguuuguaucaaaagaacaugcaccguggucaugaccgacggaagcgccuccggcaaggcugauacacggauccuuuuuauucgcgaggggaaaaucgugcacauuagcccgcugucuggauccgcccaacauguggaagagugcagcuguuacccccaguauccugaggucagaugcguuugucgggacaacuggcgcggcucuaauagacccgugcucuacaucaacauggcggauuauagcauugacuccggcuacgugugcucugggcuggucggagacacgccucggaacgaugacaucagcuccagcucuaauuguaaggaucccaacaaugaacgcggcgccccgggggugaagggaugggcuuucgacuccggcaacgaucuguggauggggagaaccaucgagaaagaaagccggucuggauacgagacauuuagaguuauuggcggcuggaauaccgccaacuccaagagccagacaucccgccaggugaucgucgacucugauaauagcuccggguauucuggaauuuucagcguggaaggcaaauccugcaucaaccgguguuuuuacguugagcucauuagagggcgcccuaaggagacccgggugugguggacgagcaauucuaucauugucuucugcggaacauccggcaccuaugggaccggcagcuggcccgacggagcuaacaucaauuuuauggccaucuga

SEQ ID NO: 215593 - RNA, 1410 nt, Artificial Sequence
  derived and/or modified CDS sequence (opt5) from neuraminidase__InfluenzaA__AGQ81727
augaaccccaaucagaagaucauugccaucggcagcgugucccugaccauugcuacaaucugccuccugaugcaagucgccauucuuguuacgaccaugacacugcacuucaaacauaacgaguguucuaauagcuccaacaaucaggcggugccuugcgggccgaucaucauugaaagaaacaucaccgagauugugcaccucaauucuacaacccuggaaaaggagaucugucccaaagcugccggauaccgggacuggagcaagccucagugccagauuacaggcuuugcccccuucuccaaagauaacucuauccgccuuagcgcuuccggggacauuugggucaccagagaaccuuaugugagcuguggacugggcaagugcuaccaauuugcccucgggcagggaacgacccuggauaaucggcauucuaacggcacaucccacgaccgcacaccccauagaacccugcucaugaaugagcugggcguuccuuuccaccuugcuaccaaacagguguguaucgccuggucuagcuccagcugccacgaugggcgggcguggcugcaugucugugugacgggagacgaucgcaacgccacagcuucuaucauuuaugacggcauccucguugauuccauugggagcugguccaagaauauccugagaacccaggagucugaaugcguguguauuaacggaacaugcaccgucgugaugaccgacggcagcgccuccgggaaggcugauacacggauccuuuuuauccgcgagggaaaaauugugcacaucagcccgcugucuggcuccgcccaacaugucgaagagugcagcuguuacccccaguauccugagguuagaugcgugugucgggacaauuggcgcggcucuaacagacccgugcucuacauuaacauggcggauuauagcaucgacuccggguacgucugcucuggacuggugggcgacacgccucggaaugaugacauuagcuccagcucuaacuguaaggaucccaauaacgaacgcggggccccgggaguuaaaggcugggcuuucgacuccgggaaugaucuguggaugggaagaaccaucgagaaggaaagccggucuggcuacgagacauuuagagugaucggcggguggaacaccgccaauuccaagagccagacaucccgccaggucauuguggacucugauaacagcuccggauauucuggcaucuucagcguugaagggaaauccugcauuaaucgguguuuuuacguggagcucaucagaggacgcccuaaggagacccgggucugguggacgagcaacucuauuaucguguucugcggcacauccgggaccuauggcaccggaagcuggcccgacggcgcuaauauuaacuuuaugccuaucuga

SEQ ID NO: 215594 - RNA, 1410 nt, Artificial Sequence
  derived and/or modified CDS sequence (opt5) from neuraminidase__InfluenzaA__AGQ81728
augaaccccaaucagaagaucguggccauuggcagcgucucccugaccaucgcuacaaugugccuccugaugcaaauugcccuuuucgcgacgaccaugacacugcacuuuaaacagaccgggucuacaaacagcuccgacaaucaggcuguuccuuguggaccgaucauuaucgagagaaacaucaccgaaauugugcaucucaauucuacaacccuggagaaggaaacgugccccaaaagcgccggcuaccggaacugguccaagccucagugucaaaucaccggguucgcccccuuuucuaaagauaauagcauucgccuuuccgcuggaggcgacaucugggugacaagagagccuuaugucagcugcgggcugggaaaguguuaccaguucgcccucggccagggcaccacacuggauaacaagcacucuaaugggaccacguaugaccggacaccccaucgcacccugcucaugaacgaacugggagugccuuuucaccuugcuacaaaacagguuugcauugccugguccucuagcuccugucaugauggcaaggcguggcugcacgugugcgucaccggggacgauaaaaaugccaccgcuagcaucauuuacgacggaauccucguggauucuaucgccuccuggagcaagaacauucugagaacacaagaguccgaguguguuugcaucaauggcacguguaccguggucaugacagacgggucugcuagcggacgggccgauacccgcauucuuuucaucagagaaggcaaaauugugcacaucuccccgcugagcggcucugcgcagcauguggaggaaugcuccugcuauccccgguacccugagguccgcuguguuugcagagacaacuggaaggggagcaaucggcccgugcucuauaucaacauggccgauuacucuauugacagcuccuacguguguucuggaaucgucggcgacacaccucgcaacgaugacagaagcuccagcucuaauugccgggaucccaacaaugagauuggggcuccgggagugaagggcugggccuuugacuccgggaacgauaucuggaugggacgcaccauugaaaaagacagcagaucuggcuaugagacguuccggguuaucggcgggugguccacagcuaauagcaagucccagaucaacagacaggugauugucgaucgcgacaauucuagcggauacuccggcaucuuuucuguggaagggaaaagcuguauuaaccggugcuucuauguugagcugaucagaggacgcccuaaggaaaaucgggugugguggaccuccaacagcauuaucgucuuuuguggcaccucugggacauacggcaccggauccuggcccgauggcgccaauauuaaccugaugccuaucuga

SEQ ID NO: 215595 - RNA, 1410 nt, Artificial Sequence
  derived and/or modified CDS sequence (opt5) from neuraminidase__InfluenzaA__AGQ81729
augaaccccaaucagaagaucauugccaucggcagcgugucccugaccauugcuacaaucugccuccugaugcaaauugccauccuugucgcgacgaugacccugcacucuaaacauggggaguguacaaacagcuccaauaaccaggcuguuccuugcggaccgaucauuaucgaaagaaaugugaccgagauugugcaccucaacucuacaacccuggaaaaggagaucugucccaaagccgccggcuaccgggacuggagcaagccucagugccagauuacaggguucgcucccuuuuccaaagauaauucuauccgccuuagcgccuccggagacauuugggucaccagagaaccuuaugugagcuguggccuggggaagugcuaccaauucgcucucggacagggcacgacccuggauaaccggcauucuaauggcacaucccacgaccgcacaccccauagaacccugcucaugaacgagcuggggaucccuuuucaccuugccaccaagcagguuuguaucgcguggucuucuuccagcugccacgauggaaaagccuggcugcaugugugugucacgggcgacgaucggaaugcuacagccucuauuaucuaugacgggaugcucguggauuccauuggaagcugguccaagaacauccugcgcacccaggagucugaaugcguuuguauuaauggcacaugcaccguggucaugaccgacgggagcgcuuccggaaaagccgauacaagaauccuuuucauccgggagggcaagauugugcacaucagcccgcugcucggcucugcgcaacauguggaagagugcuccuguuacccccaguauccugagguccgcugcguuuguagagacaacuggcgggggagcaaucgccccgugcuguacauuaacauggccgauuauucuguggacagcggauacgucugcuccggccuggugggggacacgccuagaaacgaugacaccucuagcuccagcaauuguaaagaucccaacaaugaacggggagcuccgggcguuaaggggugggccuuugacucuggaaacgauaucuggaugggccgcacaauugagaaggacuccagaagcggcuacgaaaccuuccgggugaucgggggauggaauacagcuaacucuaaaucccagaccagcagacaggucaucguggauuccgacaauucuagcggcuauuccgggauuuuuagcguugagggaaagagcugcaucaaccgcuguuucuacguggaacucauucggggcagaccuaaagagacgcgcgucugguggacauccaauagcaucauuguguuuugcgggaccucuggcaccuauggaacaggcuccuggcccgauggggccaacaucaauuucaugccuauuuga

SEQ ID NO: 215596 - RNA, 1410 nt, Artificial Sequence
  derived and/or modified CDS sequence (opt5) from neuraminidase__InfluenzaA__AGQ81730
augaaccccaaucagaagaucauugccaucggcagcgugucccugaccauugcuacaaucugccuccugaugcaaauugccauccuugucacgaccaugacacugcacuucaaacauaacgaguguaucaauucuagcaacaaucaguccguuccuugcgggccgauuaucauugaaagaaacgugaccgagaucgugcaccucaauucuacaacccuggaaaaggagauuugucccaaagcggcuggauaccgggacuggagcaagccucagugccagaucacaggcuuugcccccuucuccaaagauaacucuauucgccuuagcgccuccggggacaucugggucaccagagaaccuuaugugagcuguggacugggcaagugcuaccaauuugcucucgggcagggaacgacccuggauaaucggcauucuaacggcacaucccacgaccgcacaccccauagaacccugcucaugaaugagcugggcguuccuuuccaccuugccagcaaacagguguguaucgcuuggucuuccagcucuugccacgaugggaaggccuggcugcaugucugugugaccggagacgaucggaacgcgacggccuccauuaucuaugacggcaugcucguugauagcauuggguccuggucuaagaauauccugcgcacacaggagagcgaaugcguguguauuaacggaaccugcacagucgugaugaccgacggcuccgcuagcggggaggccgauaccagaauccuuuuuauccgggaaggaaaaauugugcacaucucuccgcuguccggcagcgcucaacaugucgaggagugcucuuguuacccccaguauccugaaguucgcugcguguguagagacaauuggcggggcagcaaccgccccgugcucuacauuaacauggccgauuauuccaucgacucuggguacgucugcagcggacuggugggcgacacaccuagaaaugaugacauuuccucuagcuccaacuguaaggaucccaauaacgagcgcggggcgccgggaguuaaaggcugggccuucgacagcgggaaugauaucuggaugggacggacgaucgaaaaggacucuagauccggcuacgagaccuuucgggugauuggcggguggaacacagcuaauagcaagucccagaccucuagacaggucaucguggauagcgacaacuccucuggauauagcggcauuuucuccguugaagggaaaagcugcaucaaucgcuguuuuuacguggagcugauucggggaagaccuaaggagacacgcgucugguggaccucuaacuccaucauuguguucugcggcacgagcgggacauauggcaccggaucuuggcccgauggcgccaauaucaacuuuauggcuaucuga

SEQ ID NO: 215597 - RNA, 1410 nt, Artificial Sequence
  derived and/or modified CDS sequence (opt5) from neuraminidase__InfluenzaA__AGQ81731
augaaccccaaucagaagaucauugccaucggcagcgugucccugaccauugcuacaaucugccuccugaugcaaauugccauccuugucacgaccaugacacugcacuucaaacauaacgaguguucuaauagcuccaacaaucaggcgguuccuugcgggccgaucauuaucgaaagaaacauuaccgagaucgugcaccucaauucuacaacccuggaaaaggagauuugucccaaaacagcuggauaccgggacuggagcaagccucagugccagaucaccggcuuugcccccuucuccaaagauaacucuauucgccuuagcgccuccggggacaucugggugacgagagaaccuuaugucagcuguggauuuggcaagugcuaccaauucgcucuggggcagggaaccacacucgauaaucggcauucuaacggcaccucccacgaccgcacaccccauagaacccugcugaugaaugagcucggcgugccuuuucaccuggccacgaagcagguuuguaucgcuuggucuagcuccagcugccacgaugggaaagccuggcuucaugugugugucacaggagacgaucggaacgcgaccgccucuauuaucuaugacggcauucugguggauuccaucgggagcugguccaagaauauucuccgcacacaggagucugaaugcguuuguaucaacggaaccugcaccguggucaugacagacggcagcgcuuccgggaaagccgauacgagaauccuguucauucgggagggaaagaucgugcacauuagcccgcuuucuggcuccgcucaacauguggaagagugcagcuguuacccccaguauccugagguccgcugcguuuguagagacaauuggcggggcucuaaccgccccgugcuguacaucaacaugaccgauuauagcauugacuccggguacgugugcucuggacucgucggcgacacaccuagaaaugaugacaucagcuccagcucuaacuguaaagaucccaauaacgaacgcggggccccgggagugaagggcugggcguuugacuccgggaaugaucuguggaugggacggaccaucgagaaggaaagcagaucuggcuacgagacauuccggguuauuggcggguggaacaccgccaauuccaaaagccagacguccagacaggugaucgucgacucugauaacagcuccggauauucuggcauuuuuagcguggaagggaaguccugcaucaaucgcuguuucuacguugagcugauucggggaagaccuaaagagacacgcgugugguggaccagcaacucuaucauugucuuuugcggcaccuccgggacauauggcaccggaagcuggcccgacggcgcuaauaucaacuucauggccaucuga

SEQ ID NO: 215598 - RNA, 1410 nt, Artificial Sequence
  derived and/or modified CDS sequence (opt5) from neuraminidase__InfluenzaA__AGQ81732
augaaccccaaucagaagaucauugccaucggcagcgugucccugaccauugcuacaaucugccuccugaugcaagucgccauucuuguuacgaccaugacacugcacuucaaacauaacgaguguucuaauagcuccaacaaucaggcggugccuugcgggccgaucaucauugaaagaaacaucaccgagauugugcaccucaauucuacaacccuggaaaaggagaucugucccaaagcugccggauaccgggacuggagcaagccucagugccagauuacaggcuuugcccccuucuccaaagauaacucuauccgccuuagcgcuuccggggacauuugggucaccagagaaccuuaugugagcuguggacugggcaagugcuaccaauuugcccucgggcagggaacgacccuggauaaucggcauucuaacggcacaucccacgaccgcacaccccauagaacccugcucaugaaugagcugggcguuccuuuccaccuugcuaccaaacagguguguaucgccuggucuagcuccagcugccacgaugggaaggcguggcugcaugucugugugacgggagacgaucggaacgccacagcuucuaucauuuaugacggcauccucguugauuccauugggagcugguccaagaauauccugcgcacccaggagucugaaugcguguguauuaacggaacaugcaccgucgugaugaccgacggcagcgccuccgggaaagcugauacaagaauccuuuuuauccgggagggaaagauugugcacaucagcccgcugucuggcuccgcccaacaugucgaagagugcagcuguuacccccaguauccugagguucgcugcguguguagagacaauuggcggggcucuaaccgccccgugcucuacauuaacauggcggauuauagcaucgacuccggguacgucugcucuggacuggugggcgacacgccuagaaaugaugacauuagcuccagcucuaacuguaaagaucccaauaacgaacgcggggccccgggaguuaagggcugggcuuucgacuccgggaaugaucuguggaugggacggaccaucgagaaggaaagcagaucuggcuacgagacauuucgggugaucggcggguggaacaccgccaauuccaaaagccagacauccagacaggucauuguggacucugauaacagcuccggauauucuggcaucuucagcguugaagggaaguccugcauuaaucgcuguuuuuacguggagcucauccggggaagaccuaaagagacccgcgucugguggacgagcaacucuauuaucguguucugcggcacauccgggaccuauggcaccggaagcuggcccgacggcgcuaauauuaacuuuaugccuaucuga

SEQ ID NO: 215599 - RNA, 1410 nt, Artificial Sequence
  derived and/or modified CDS sequence (opt5) from neuraminidase__InfluenzaA__AGQ81733
augaaccccaaucagaagaucauugccaucggcagcgugucccugaccauugcuacaaucugccuccugaugcaaauugccauccuugucacgaccaugacacugcacuucaaacauaacgaguguucuaauagcuccaacucucaggcgguuccuugcgggccgaucauuaucgaaagaaaugugaccgagauugugcaccucaacagcacaacccuggaaaaggagaucugucccaaagcugccgaauaccgggacugguccaagccucagugccagauuacaggauuugcccccuucucuaaagauaauagcauccgccuuuccgcuagcggcgacauuugggucaccagagagccuuaugugucuugugggcugggaaagugcuaccaauuugcccucggccaggggacgacccuggauaaccggcauuccaauggaacaagccacgaccgcacaccccauagaacccugcucaugaacgagcugggcguuccuuuccaccuugcuaccaaacagguguguaucgccuggucuuccagcucuugccacgauggcaaggcguggcugcaugucugugugacgggggacgaucggaaugccacagcuuccaucauuuaugacggaauccucguugauagcauuggcuccuggucuaagaacauccugcgcacccaggaaagcgagugcguguguauuaaugggacaugcaccgucgugaugaccgacggauccgccagcggcaaagcugauacaagaauccuuuuuauccgggaagggaagauugugcacaucucuccgcuguccggaagcgcccaacaugucgaggagugcucuuguuacccccaguauccugaaguucgcugcguguguagagacaacuggcggggcagcaaucgccccgugcucuacauuaacauggcggauuauuccaucgacucuggcuacgucugcagcgggcuggugggagacacgccuagaaacgaugacauuuccucuagcuccaauuguaaagaucccaacaaugagcggggcgccccggggguuaagggaugggcuuucgacagcggcaacgaucuguggauggggcgcaccaucgaaaaggacucuagauccggauacgagacauuucgggugaucggcggcuggaauaccgccaacagcaaaucccagacaucuagacaggucauuguggauagcgacaauuccucuggguauagcggaaucuucuccguugaaggcaagagcugcauuaaccgcuguuuuuacguggagcucauccgggggagaccuaaagagacccgcgucugguggacgucuaauuccauuaucguguucugcggaacaagcggcaccuaugggaccggcucuuggcccgauggagcuaacauuaauuuuaugccuaucuga

SEQ ID NO: 215600 - RNA, 1410 nt, Artificial Sequence
  derived and/or modified CDS sequence (opt5) from neuraminidase__InfluenzaA__AGQ81734
augaaccccaaucagaagaucauugccaucggcagcgugucccugaccauugcuacaaucugccuccugaugcaaauugccauccuugucacgaccaugacacugcacuucaaacauaacgaguacucuaauagcuccaacaaucaggcgguuccuugugggccgaucauuaucgaaagaaacauuaccgagaucgugcaccucaauucuacaacccuggaaaaggagauuugccccaaagcugccggauaucgggacuggagcaagccucagugucagaucacaggcuuugcccccuucuccaaagauaacucuauucgccuuagcgcuuccggggacaucugggugaccagagaaccuuacgucagcugcggacugggcaaguguuaucaauuugcccucgggcagggaacgacccuggauaaucggcauucuaacggcacaucccacgaccgcacaccccauagaacccugcucaugaaugagcugggcgugccuuuccaccuugcuaccaagcagguuugcaucgccuggucuagcuccagcugucacgaugggaaagcguggcugcaugugugcgucacgggagacgaucggaacgccacagcuucuauuaucuacgacggcauucucguggauuccaucgggagcugguccaagaauauucugcgcacccaggagucuaaauguguuugcaucaagagaacauguaccguggucaaaaccgacggaagcgccuccggcaaggcugauacacggauccuuuuuauucgcgaagggaagaucgugcacauuagcccgcugucuggauccgcccaacauguggaggaaugcagcugcuauccccaguacccugaggucagauguguuugccgggacaacuggcgcggcucuaauagacccgugcucuauaucaacauggcggauuacagcauugacuccggcuacguguguucugggcuggucggagacacgccucggaacgaugacaucagcuccagcucuaauugcaaagaucccaacaaugagcgcggcgccccgggggugaagggaugggcuuucgacuccggcaacgaucuguggauggggagaaccaucgaaaaagagagccggucuggauaugaaacauuuagaguuauuggcggcuggaauaccgccaacuccaagagccagacaucccgccaggugaucgucgacucugauaauagcuccggguacucuggaauuuucagcguggagggcaaauccuguaucaaccggugcuuuuauguugaacucauuagagggcgcccuaaggagacccgggugugguggacgagcaauucuaucauugucuucuguggaacauccggcaccuacgggaccggcagcuggcccgacggagcuaacaucaauuuuauggccaucuga

SEQ ID NO: 215601 - RNA, 1410 nt, Artificial Sequence; identical to SEQ ID NO: 215599
  derived and/or modified CDS sequence (opt5) from neuraminidase__InfluenzaA__AGQ81735

SEQ ID NO: 215602 - RNA, 1410 nt, Artificial Sequence
  derived and/or modified CDS sequence (opt5) from neuraminidase__InfluenzaA__AGQ81736
augaaccccaaucagaagaucauugccaucggcagcgugucccugaccauugcuacaaucugccuccugaugcaaauugccauccuugucgcgacgaugacccugcacucuaaacauggggaguguacagacagcuccaacaaucaggcuguuccuugcggaccgaucauuaucgaaagaaacgugaccgagauugugcaccucaauucuacaacccuggaaaaggagaucugucccaaagccgccggcuacaaggauuggagcaaaccucagugccagauuacaggguucgcucccuuuuccaaggacaacucuauccggcuuagcgccuccggagauauuugggucacccgcgaaccuuaugugagcuguggccuggggaagugcuaccaauucgcucucggacagggcacgacccuggacaauagacauucuaacggcacaucccacgaucggacaccccaucgcacccugcucaugaaugagcuggggguuccuuuucaccuugccaccaaacagguguguaucgcguggucuagcuccagcugccacgacggaaaggccuggcugcaugucugugugacgggcgaugacagaaacgcuacagccucuaucauuuaugaugggaugcucguugacuccaucggaagcugguccaaaaauauucugcggacccaggagucugaaugcguguguaucaacggcacaugcaccgucgugaugaccgaugggagcgcuuccggaaaggccgacacacgcauucuuuucaucagagagggcaaaaucgcgcacauuagcccgcugucuggcuccgcccaacauguggaagagugcagcuguuacccccaguauccugagguccggugcguuugucgcgauaauuggagagggucuaaccggcccgugcucuacaucaauauggcugacuauagcguggacuccggauacgucugcucuggccuggugggggauacgccucgcaacgacgauaccagcuccagcucuaacuguaaggaccccaauaacgaaagaggagccccgggcguuaaggggugggcuuuugauuccggaaaugacauuuggaugggccggacaaucgagaaagauagccgcucuggcuacgaaaccuucagagugauugggggauggaacacagccaauuccaagagccagaccucccggcaggucaucguggacucugauaacagcuccggcuauucugggaucuuuagcguugagggaaaauccugcauuaauagauguuucuacguggaacugauccgcggccggccuaaggagacgagagucugguggacaagcaacucuauuaucguguuuugcgggaccuccggcaccuauggaacaggcagcuggcccgacggggccaauauuaacuucaugccuaucuga

SEQ ID NO: 215603 - RNA, 1410 nt, Artificial Sequence
  derived and/or modified CDS sequence (opt5) from neuraminidase__InfluenzaA__AGQ81737
augaaccccaaucagaagaucauugccaucggcagcgugucccugaccauugcuacaaucugccuccugaugcaaauugccauccuugucacgaccaugacacugcacuucaaacauaacgaguguucuaauagcuccaacaaucaggcgguuccuugcgggccgaucauuaucgaaagaaacauuaccgagaucgugcaccucaauucuacaacccuggaaaaggagauuugucccaaagcugccggauaccgggacuggagcaagccucagugccagaucacaggcuuugcccccuucuccaaagauaacucuauucgccuuagcgcuuccggggacaucugggugaccagagaaccuuaugucagcuguggacugggcaagugcuaccaauuugcccucgggcagggaacgacccuggauaaucggcauucuaacggcacaucccacgaccgcacaccccauagaacccugcucaugaaugagcugggcgugccuuuccaccuugcuaccaagcagguuuguaucgccuggucuagcuccagcugccacgaugggaaagcguggcugcaugugugugucacgggagacgaucggaacgccacagcuucuauuaucuaugacggcauucucguggauuccaucgggagcugguccaagaauauucugcgcacccaggagucugaaugcguuuguaucaacggaacaugcaccguggucaugaccgacggcagcgccuccgggaaagcugauacaagaauccuuuuuauucgggagggaaagaucgugcacauuagcccgcugucuggcuccgcccaacauguggaagagugcagcuguuacccccaguauccugagguccgcugcguuuguagagacaauuggcggggcucuaaccgccccgugcucuacaucaacauggcggauuauagcauugacuccggguacgugugcucuggacuggucggcgacacgccuagaaaugaugacaucagcuccagcucuaacuguaaagaucccaauaacgaacgcggggccccgggagugaagggcugggcuuucgacuccgggaaugaucuguggaugggacggaccaucgagaaggaaagcagaucuggcuacgagacauuucggguuauuggcggguggaacaccgccaauuccaaaagccagacauccagacaggugaucgucgacucugauaacagcuccggauauucuggcauuuucagcguggaagggaaguccugcaucaaucgcuguuuuuacguugagcucauucggggaagaccuaaagagacccgcgugugguggacgagcaacucuaucauugucuucugcggcacauccgggaccuauggcaccggaagcuggcccgacggcgcuaauaucaacuuuauggccaucuga

SEQ ID NO: 215604 - RNA, 1410 nt, Artificial Sequence
  derived and/or modified CDS sequence (opt5) from neuraminidase__InfluenzaA__AGQ81738
augaaccccaaucagaagaucauugccaucggcagcgugucccugaccauugcuacaaucugccuccugaugcaagucgccauucuuguuacgaccaugacacugcacuucaaacauaacgaguguucuaauagcuccaacaaucaggcggugccuugcgggccgaucaucauugaaagaaacaucaccgagauugugcaccucaauucuacaacccuggaaaaggagaucugucccaaagcugccggauaccgggacuggagcaagccucagugccagauuacaggcuuugcccccuucuccaaagauaacucuauccgccuuagcgcuuccggggacauuugggucaccagagaaccuuaugugagcuguggacugggcaagugcuaccaauuugcccucgggcagggaacgacccuggauaaucggcauucuaacggcacaucccacgaccgcacaccccauagaacccugcucaugaaugagcugggcguuccuuuccaccuugcuaccaaacagguguguaucgccuggucuagcuccagcugccacgaugggaaggcguggcugcaugucugugugacgggagacgaucggaacgccacagcuucuaucauuuaugacggcauccucguugauuccauugggagcugguccaagaauauccugcgcacccaggagucugaaugcguguguauuaacggaacaugcaccgucgugaugaccgacggcagcgccuccgggaaagcugauacaagaauccuuuuuauccgggagggaaagauuauccacauuagcccgcugucuggcuccgcccaacauguggaagagugcagcuguuacccccaguauccugagguccgcugcguuuguagagacaauuggcggggcucuaaccgccccgugcucuacaucaacauggcggauuauagcauugacuccggguacgugugcucuggacuggucggcgacacgccuagaaaugaugacaucagcuccagcucuaacuguaaagaucccaauaacgaacgcggggccccgggagugaagggcugggcuuucgacuccgggaaugaucuguggaugggacggaccaucgagaaggaaagcagaucuggcuacgagacauuucggguuauuggcggguggaacaccgccaauuccaaaagccagacauccagacaggugaucgucgacucugauaacagcuccggauauucuggcauuuucagcguggaagggaaguccugcaucaaucgcuguuuuuacguugagcucauucggggaagaccuaaagagacccgcgugugguggacgagcaacucuaucauugucuucugcggcacauccgggaccuauggcaccggaagcuggcccgacggcgcuaauaucaacuuuaugccuaucuga

SEQ ID NO: 215605 - RNA, 1410 nt, Artificial Sequence
  derived and/or modified CDS sequence (opt5) from neuraminidase__InfluenzaA__AGQ81739
augaaccccaaucagaagaucauugccaucggcagcgugucccugaccauugcuacaaucugccuccugaugcaaauugccauccuugucacgaccaugacacugcacuucaaacaugacgaguguaccaacucuagcaauaaccaggcgguuccuugcgaaccgaucauuaucgagagaaaugugacagaaauugugcacaucaacuccaccauucucgagaaggaaaucugucccaaagcugccggguaccggaauuggucuaagccucagugccagauuacaggauuugcccccuucagcaaagauaacuccauccgccugucugcuagcggcgacaucugggucaccagagagccuuauguguccugugggcuuggaaagugcuaccaauuugcccugggccaggggacgacccucgauaaucggcauagcaacggaacacugaaugaccgcacaccccacagaacccugcucaugaacgagcugggcguuccuuuccaucuugcuaccaaacagguguguauugccuggucuuccagcucuugccacgauggcaaggcguggcugcacgucugugugacgggggacgaucggaaugccacagcuuccaucauuuaugacgauaugcucguugacagcaucggaucuugguccaagaacauucugcgcacccaggaaagcgagugcguguguaucaauggcacaugcaccgucgugaugaccgauggguccgccucuggaaaagcugacacaagaauccuuuuuauucgggaaggcaagaucgugcauauuagcccgcuguccgggagcgcccaacacgucgaggagugcucuuguuacccccaguauccugaaguucgcugcguguguagagauaacuggcggggauccaaccgccccgugcucuacaucaauauggcggacuauagcauugacucuggcuacgucugcagcggccuggugggggauacgccuagaaacgacgauaucuccucuagcuccaauuguaaagaccccaacaaugagcggggagccccgggcguuaaggggugggcuuucgauagcggaaacgacaucuggaugggccgcaccauugaaaaggauucuagauccggguacgagacauuucgggugaucggaggcuggaauaccgccaacagcaaaucucagacauccagacaggucauuguggacagcgauaauuccucuggcuauagcgggaucuucuccguugaaggaaagucuugcauuaaccgcuguuuuuacguggagcugauccggggcagaccuaaagagacccgcgucugguggacgagcaauuccauuaucguguucugcgggacaagcggaaccuauggcaccgggucuuggcccgacggcgcuaacaucaauuuuauggccauuuga

SEQ ID NO: 215606 - RNA, 1410 nt, Artificial Sequence
  derived and/or modified CDS sequence (opt5) from neuraminidase__InfluenzaA__AGQ81740
augaaccccaaucagaagaucguggccauuggcagcgucucccugaccaucgcuacaauuugccuccugaugcaaaucgccauucuuguuacgaccaugacacugcacuucaaacauggggaguguaccaacucuagcaauaaccaggcggugccuugcggaccgaucaucauugaaagaaauaucacagagauugugcaccucaacuccaccacacuggaaaaggagaucugucccaaagcugccggcuaccgggacuggucuaagccucagugccagauuaccggguuugcccccuucagcaaagauaauuccauccgccuuucugcuagcggagacauuugggucacgagagaaccuuauguguccuguggccuggggaagugcuaccaauuugcccucggacagggcaccacacuggauaaccggcauagcaauggcaccucucacgaccgcacaccccauagaacccugcucaugaacgagcuggggguuccuuuccaccuugcuacgaaacagguguguaucgccugguccucuagcuccugccacgauggaaaggcguggcugcaugucugugugacaggcgacgaucggaaugccaccgcuagcaucauuuauaacgggauccucguugacucuauuggauccuggagcaagaauauccugcgcacacaggaguccgaaugcguguguauuaacgggaccugcaccgucgugaugacagauggcucugccagcggaaaagcugacacgagaauccuuuuuauccgggagggcaagauugugcacaucuccccgcugagcggcucugcccaacaugucgaagagugcuccuguuacccccaguauccugagguucgcugcguguguagagauaauuggcgggggagcaaccgccccgugcucuacauuaacauggcggacuauucugucgauagcggauacgugugcuccggccugguuggggacaccccuagaaaugacgauacaucuagcuccagcaacuguaaagaccccaauaacgaacggggagccccgggcgugaaggggugggcuuucgauucuggaaaugacaucuggaugggccgcaccauugagaaggaucugagauccggcuacgaaacauuucgggucaucgggggauggaacaccgccaauagcaaaucucagacguccagacaggugaucguugacagcgauaacuccucuggcuauagcgggauuuucuccguggagggaaagucuugcaucaaucgcuguuuuuacgucgaacucauucggggcagaccuaaagagacacgcgugugguggaccagcaacuccaucauugucuucugcgggaccagcggcacauauggaaccggcucuuggcccgacggggcuaauaucaacuuuaugccuauuuga

SEQ ID NO: 215607 - RNA, 1410 nt, Artificial Sequence
  derived and/or modified CDS sequence (opt5) from neuraminidase__InfluenzaA__AGQ81741
augaaccccaaucagaagaucguggccauuggcagcgucucccugaccaucgcuacaauuugccuccugaugcaaaucgccauucuuguuacgaccaugacacugcacuucaaacauggggaguguaccaacucuagcaauaaccaggcggugccuugcggaccgaucaucauugaaagaaauaucacagagauugugcaccucaacuccaccacacuggacaaggaaaucugucccaaagcugccggcuaccgggauuggucuaagccucagugccagauuaccggguuugcccccuucagcaaagacaauuccauccgccuuucugcuagcggagauauuugggucacgagagagccuuauguguccuguggccuggggaagugcuaccaauuugcccucggacagggcaccacacuggacaaccggcauagcaauggcaccucucacgaucgcacaccccauagaacccugcucaugaacgaacuggggguuccuuuccaccuugcuacgaaacagguguguaucgccugguccucuagcuccugccacgacggaaaggcguggcugcaugucugugugacaggcgaugaccggaaugccaccgcuagcaucauuuaugaugggaugcucguugacucuaucggauccuggagcaagaacauucugcgcacacaggaguccgagugcguguguaucaaugggaccugcaccgucgugaugacagauggcucugccagcggaaaagcugacacgcggauucuuuuuaucagagaaggcaagaucgugcacauuuccccgcugagcggcucugcccaacaugucgaggaaugcuccuguuacccccaguauccugagguucgcugcguguguagagauaacuggcgggggagcaaucgccccgugcucuacaucaacauggcggacuauucugucgacagcggauacgugugcuccggccugguuggggauaccccuagaaacgacgauacaucuagcuccagcaauuguaaagaccccaacaaugagcggggagccccgggcgugaaggggugggcuuucgauucuggaaacgacauuuggaugggccgcaccaucgaaaaggaucugagauccggcuacgagacauuucgggucauugggggauggaauaccgccaacagcaaaucucagacguccagacaggugaucguugacagcgauaauuccucuggcuauagcgggaucuucuccguggaaggaaagucuugcauuaaccgcuguuuuuacgucgagcucauccggggcagaccuaaagaaacacgcgugugguggaccagcaauuccauuaucgucuucugcgggaccagcggcacauauggaaccggcucuuggcccgacggggcuaacauuaauuuuaugccuaucuga

SEQ ID NO: 215608 - RNA, 1410 nt, Artificial Sequence
  derived and/or modified CDS sequence (opt5) from neuraminidase__InfluenzaA__AGQ81742
augaaccccaaucagaagaucguggccauuggcagcgucucccugaccaucgcuacaauuugccuccugaugcaaaucgccauucuuguuacgaccaugacacugcacuucaaacauggggaguguaccaacucuagcaauaaccaggcggugccuugcggaccgaucaucauugaaagaaauaucacagagauugugcaccucaacuccaccacacuggaaaaggagaucugucccaaagcugccgaauaccgggacuggucuaagccucagugccagauuaccggcuuugcccccuucagcaaagauaauuccauccgccuuucugcuagcggggacauuugggucacgagagagccuuauguguccuguggacugggcaagugcuaccaauuugcccucgggcagggaaccacacuggauaaccggcauagcaauggcaccucucacgaccgcacaccccauagaacccugcucaugaacgagcugggcguuccuuuccaccuugcuacgaaacagguguguaucgccugguccucuagcuccugccacgaugggaaggcguggcugcaugucugugugacaggagacgaucggaaugccaccgcuagcaucauuuaugacggcaugcucguugauucuaucggguccuggagcaagaacauucugcgcacacaggaauccgagugcguguguaucaauggaaccugcaccgucgugaugacagacggcucugccagcgggaaagcugauacgcggauucuuuuuauccgggaaggaaagaucgugcacauuuccccgcugagcggcucugcccaacaugucgaggagugcuccuguuacccccaguauccugaaguucgcugcguguguagagacaacuggcggggcagcaaucgccccgugcucuacaucaacauggcggauuauucugucgacagcggguacgugugcuccggacugguuggcgacaccccuagaaacgaugacacaucuagcuccagcaauuguaaagaucccaacaaugagagaggggccccgggagugaagggcugggcuuucgacucugggaacgauauuuggaugggacgcaccaucgaaaaggaccugagauccggcuacgagacauuucgggucauuggcggguggaauaccgccaacagcaaaucucagacguccagacaggugaucguugauagcgacaauuccucuggauauagcggcaucuucuccguggaagggaagucuugcauuaaccgcuguuuuuacgucgagcucauccggggaagaccuaaagagacacgcgugugguggaccagcaauuccauuaucgucuucugcggcaccagcgggacauauggcaccggaucuuggcccgauggcgcuaacauuaauuuuaugccuaucuga

SEQ ID NO: 215609 - RNA, 1410 nt, Artificial Sequence
  derived and/or modified CDS sequence (opt5) from neuraminidase__InfluenzaA__AGQ81744
augaaccccaaucagaagaucauugccaucggcagcgugucccugaccauugcuacaaucugccuccugaugcaaauugccauccuugucacgaccaugacacugcacuucagacaugacgaguguaccaacucuagcaauaaccaggcgguuccuugcgggccgaucauuaucgaacggaaugugacagagauugugcaccucaacuccaccacacuggaaaaagagaucugucccaaggcugccgaauaccgcgauuggucuaaaccucagugccagauuaccggauuuguccccuucagcaaggacaauuccaucagacuuucugccggcggggauauuugggugacgcgggagccuuauguuagcuguggacugggcaaaugcuaccaauuugcucucgggcagggaaccacacuggacaaccgccauuccaauggcaccagccacgauagaacaccccaucggacccugcucaugaacgagcugggcgugccuuuccaccuugccacgaagcaggucuguaucgcuuggucuuccagcucuugccacgacgggaaggccuggcugcauguguguguuacaggagaugaccgcaaugcgaccgccuccaucauuuaugauggcaugcucguggacagcaucgggucuugguccaaaaacauucugagaacacaggaaagcgagugcgucuguaucaauggaaccugcaccguggugaugacagauggcuccgcuucugggaaggccgacacgcggauucuuuuuauccgcgaaggaaaaaucguccacauuagcccgcuguccggcagcgcucaacauguugaggagugcucuuguuacccccaguauccugaagugagaugcgugugucgggauaacuggcgcggcuccaauagacccguccucuacaucaacguggccgacuauagcguugacucuggguacgugugcagcggacuggucggcgauaccccucggaacgacgauauuuccucuagcuccaauuguaaggaccccaacaaugagcgcggggcgccgggagugaaaggcugggccuucgauagcgggaacgacaucuggaugggaagaacaauugaaaaggauucucgguccggcuacgagaccuuuagaguuaucggcggguggaauacagcuaacagcaagucucagaccucccgccaggugaucgucgacagcgauaauccuuccggauauucuggcauuuucagcguggaagggaaauccugcaucaaccgguguuuuuacgucgagcugauuagaggacgccccaaggagacgcgggugugguggacaucuaauagcaucauuguuuucugcggcaccuccgggaccuauggcacaggaagcuggccugacggcgccaacaucaauuuuaugcccauuuga

SEQ ID NO: 215610 - RNA, 1410 nt, Artificial Sequence
  derived and/or modified CDS sequence (opt5) from neuraminidase__InfluenzaA__AGQ81746
augaaccccaaucagaagaucauugccaucggcagcgugucccugaccauugcuacaaucugccuccugaugcaaauugccauccuugucacgaccaugacacugcacuucaaacauaacgaguguucuaauagcuccaacucucaggcgguuccuugcgggccgaucauuaucgaaagaaaugugaccgagauugugcaccucaacagcacaacccuggaaaaggagaucugucccaaagcugccgaauaccggggaugguccaagccucagugccagauuacaggcuuugcccccuucucuaaagacaauagcauccgccuuuccgcuagcggggauauuugggucaccagagagccuuaugugucuugugaccugggaaagugcuaccaauuugcccucggccaggggacgacccuggauaaccggcauuccaauggaacaagccacgaccgcacaccccauagaacccugcucaugaacgagcugggcguuccuuuccaccuugcuaccaaacagguguguaucgccuggucuuccagcucuugccacgauggcaaggcguggcugcaugucugugugacgggggacgaucggaaugccacagcuuccaucauuuaugacggaauccucguugauagcauuggcuccuggucuaagaacauccugcgcacccaggaaagcgagugcguguguauuaaugggacaugcaccgucgugaugaccgacggauccgccagcggcaaagcugauacaagaauccuuuuuauccgggaagggaagauugugcacaucucuccgcuguccggaagcgcccaacaugucgaggagugcucuuguuacccccaguauccugaaguucgcugcguguguagagacaacuggcggggcagcaaucgccccgugcucuacauuaacauggcggauuauuccaucgacucuggcuacgucugcagcgggcuggugggagacacgccuagaaacgaugacauuuccucuagcuccaauuguaaagaucccaacaaugagcggggcgccccggggguuaagggaugggcuuucgacagcggcaacgaucuguggauggggcgcaccaucgaaaaggacucuagauccggauacgagacauuucgggugaucggcggcuggaauaccgccaacagcaaaucccagacaucuagacaggucauuguggauagcgacaauuccucuggguauagcggaaucuucuccguugaaggcaagagcugcauuaaccgcuguuuuuacguggagcucauccgggggagaccuaaagagacccgcgucugguggacgucuaauuccauuaucguguucugcggaacaagcggcaccuaugggaccggcucuuggcccgauggagcuaacauuaauuuuaugccuaucuga

SEQ ID NO: 215611 - RNA, 1410 nt, Artificial Sequence
  derived and/or modified CDS sequence (opt5) from neuraminidase__InfluenzaA__AGQ81747
augaaccccaaucagaagaucguggccauuggcagcgucucccugaccaucgcuacaauuugccuccugaugcaaaucgccauucuuguuacgaccaugacacugcacuucaaacauggggaguguaccaacucuagcaauaaccaggcggugccuugcggaccgaucaucauugaaagaaauaucacagagauugugcaccucaacuccaccacacuggaaaaggagaucugucccaaagcugccggcuaccgggacuggucuaagccucagugccagauuaccggguuugcccccuucagcaaagauaauuccauccgccuuucugcuagcggagacauuugggucacgagagaaccuuauguguccuguggccuggggaagugcuaccaauuugcccucggacagggcaccacacuggauaaccggcauagcaauggcaccucucacgaccgcacaccccauagaacccugcucaugaacgagcuggggguuccuuuccaccuugcuacgaaacagguguguaucgccugguccucuagcuccugccacgauggaaaggcguggcugcaugucugugugacaggcgacgaucggaaugccaccgcuagcaucauuuaugacgggaugcucguugauucuaucggauccuggagcaagaacauucugcgcacacaggaguccgaaugcguguguaucaaugggaccugcaccgucgugaugacagacggcucugccagcggaaaagcugauacgcggauucuuuuuaucagagagggcaagaucgugcacauuuccccgcugagcggcucugcccaacaugucgaagagugcuccuguuacccccaguauccugagguucgcugcguguguagagacaacuggcgggggagcaaucgccccgugcucuacaucaacauggcggauuauucugucgacagcggauacgugugcuccggccugguuggggacaccccuagaaacgaugacacaucuagcuccagcaauuguaaagaucccaacaaugaacggggagccccgggcgugaaggggugggcuuucgacucuggaaacgauauuuggaugggccgcaccaucgagaaggaccugagauccggcuacgaaacauuucgggucauugggggauggaauaccgccaacagcaaaucucagacguccagacaggugaucguugauagcgacaauuccucuggcuauagcgggaucuucuccguggagggaaagucuugcauuaaccgcuguuuuuacgucgaacucauccggggcagaccuaaagagacacgcgugugguggaccagcaauuccauuaucgucuucugcgggaccagcggcacauauggaaccggcucuuggcccgauggggcuaacauuaauuuuaugccuaucuga

SEQ ID NO: 215612 - RNA, 1401 nt, Artificial Sequence
  derived and/or modified CDS sequence (opt5) from neuraminidase__InfluenzaA__AGQ81749
augaaccccaaucagaagaucauugccaucggcagcgugucccugaccacagcuauuaucugcuuccucaugcaaauugccauccugacgaccacaaugacccuucacuuuaaacagaacgaguguucuaauccuagcaacaaucaggucguuccgugcgaacccaucauuaucgagagaaacacagugcaucugaauagcaccacaauugaaaaggagaucuguucuaaaguggcggaauacaagaacuggagcaaaccucagugccaaauuaccggguucgcucccuuuuccaaggacaauucuauccggcucagcgccggaggcgauauuugggucacgcgcgagccuuauguguccuguagccuggggaagugcuaccaguucgcccuuggacagggcaccacacugaaaaacaagcacucuaaugggaccacacaugacagaaucccccaccggacccuccugaugaacgagcugggaguuccuuuucaucucggcacgaaacagguguguaucgcuugguccuccucuuccugcuaugauggcaaggccuggcugcacauuugugucacaggggacgauaaaaaugcuaccgccagcaucauuuacgacggaaugcuugcggauucuaucggcuccuggagcaagaacauucugcgcacacaagaauccgagugcguguguaucaaugggaccugcgccguugugaugaccgacggaucugcuagcggcaaggccgauacaagaauccucuucauucgggaagggcgcaucauuaacaucuccccgcugagcggaucugcucagcacgucgaggagugcuccuguuaucccagauacccugaagugcggugcgugugucgcgacaacuggaaaggcagcaauagacccguccuuuauauuaacauggccgauuacucuguugagagcuccuacgugugcucuggccuggugggggacacgccucggaaugaugacagcuccuccucuuccaacugucgcgaccccaauaacgaaagaggagcgccgggcgucaaggggugggccuuugaugacggaaaugauguguggaugggccggaccaucaaaaaggacagccgcucuggguaugagacauucagaguuaucaacggauggaccacagcuaauuccaaaagccagauuaacagacaggugaucgucgauuccgacaauuggucuggcuacagcggcauuuuuagcguggaagggaagaacugcaucaaucgguguuucuauguugagcucauucgcggacggccucaagagcccaaagugugguggaccucuaacagcaucauugccuuuugcggcacguccgggacauacggaaccggcagcuggccugauggggcuaauaucaacuucaugcccaucuga

SEQ ID NO: 215613 - RNA, 1401 nt, Artificial Sequence; identical to SEQ ID NO: 215612
  derived and/or modified CDS sequence (opt5) from neuraminidase__InfluenzaA__AGQ81750

SEQ ID NO: 215614 - RNA, 1410 nt, Artificial Sequence
  derived and/or modified CDS sequence (opt5) from neuraminidase__InfluenzaA__AGQ81751
augaaccccaaucagaagaucauugccaucggcagcgugucccugaccauugcuacaaucugccuccugaugcaaauugccauccuugucacgaccaugacacuguacuucaaacacaacgaguguucuaauagcuccaacaaucaggcgguuccuugcgggccgaucauuaucgaaagaaacauuaccgagaucgugcaucucaauucuacaacccuggaaaaggagauuugucccaaagcugccggauaucgggacuggagcaagccucagugccagaucacaggcuuugcccccuucuccaaagauaacucuauucgccuuagcgcuuccggggacaucugggugaccagagaaccuuacgucagcuguggacugggcaagugcuaucaauuugcccucgggcagggaacgacccuggauaaucggcacucuaacggcacaucccaugaccgcacaccccacagaacccugcucaugaaugagcugggcgugccuuuccaucuugcuaccaagcagguuuguaucgccuggucuagcuccagcugccacgaugggaaagcguggcugcacgugugugucacgggagacgaucggaacgccacagcuucuauuaucuacgacggcauucucguggauuccaucgggagcugguccaagaauauucugcgcacccaggagucugaaugcguuuguaucaacggaacaugcaccguggucaugaccgacggcagcgccuccgggaaagcugauacaagaauccuuuuuauucgggagggaaagaucgugcauauuagcccgcugucuggcuccgcccaacacguggaagagugcagcuguuauccccaguacccugagguccgcugcguuuguagagacaauuggcggggcucuaaccgccccgugcucuauaucaacauggcggauuacagcauugacuccggguacgugugcucuggacuggucggcgacacgccuagaaaugaugacaucagcuccagcucuaacuguaaagaucccaauaacgaacgcggggccccgggagugaagggcugggcuuucgacuccgggaaugaucuguggaugggacggaccaucgagaaggaaagcagaucuggcuaugagacauuucggguuauuggcggguggaacaccgccaauuccaaaagccagacauccagacaggugaucgucgacucugauaacagcuccggauacucuggcauuuucagcguggaagggaaguccugcaucaaucgcuguuuuuauguugagcucauucggggaagaccuaaagagacccgcgugugguggacgagcaacucuaucauugucuucugcggcacauccgggaccuacggcaccggaagcuggcccgacggcgcuaauaucaacuuuaugccuaucuga

SEQ ID NO: 215615 - RNA, 1410 nt, Artificial Sequence
  derived and/or modified CDS sequence (opt5) from neuraminidase__InfluenzaA__AGQ81753
augaaccccaaucagaagaucguggccauuggcagcgucucccugaccaucgcuacaauuugccuccugaugcaaaucgccauucuuguuacgaccaugacacugcacuucaaacauggggaguguaccaacucuagcaauaaccaggcggugccuugcggaccgaucaucauugaaagaaauaucacaggcauugugcaccucaacuccaccacacuggagaaggaaaucugucccaaagcugccggguaccgggacuggucuaagccucagugccagauuaccggauuugcccccuucagcaaagauaauuccauccgccuuucugcuagcggcgacauuugggucacgagagagccuuauguguccugugggcugggaaagugcuaccaauuugcccucggccagggcaccacacuggauaaccggcauagcaaugggaccucucacgaccgcacaccccauagaacccugcucaugaacgaacugggaguuccuuuccaccuugcuacgaaacagguguguaucgccugguccucuagcuccugccacgauggcaaggcguggcugcauaucugugucacaggggacgaucggaaugccaccgcuagcauuaucuaugacggaaugcucguggauucuauuggcuccuggagcaagaacauccugcgcacacaggaguccgagugcguuuguauuaaugggaccugcaccguggucaugacagacggaucugccagcggcaaagcugauacgagaauccuuuuuauccgggaaggcaagauugugcacaucuccccgcugagcgggucugcccaacauguggaggaaugcuccuguuacccccaguauccugagguccgcugcguuuguagagacaacuggcggggaagcaaucgccccgugcucuacauuaacauggcggauuauucuguggacagcggcuacgucugcuccgggcuggugggagacaccccuagaaacgaugacacaucuagcuccagcaauuguaaagaucccaacaaugagcggggcgccccggggguuaagggaugggcuuucgacucuggcaacgauaucuggaugggccgcaccauugaaaaggaccugagauccggguacgagacauuucgggugaucggaggcuggaauaccgccaacagcaaaucucagacgaauagacaggucaucguggauuccgacaacagcuccggguauucuggaauuuucagcguugaaggcaaguccugcaucaaucgcuguuuuuacguggagcucauucgggggagaccuaaagaaacacgcgucugguggaccucuaacagcaucauuguguucugcggcaccuccggaacauauggcaccgggagcuggcccgauggagcuaauaucaacuuuaugccuauuuga

SEQ ID NO: 215616 - RNA, 1410 nt, Artificial Sequence; identical to SEQ ID NO: 215615
  derived and/or modified CDS sequence (opt5) from neuraminidase__InfluenzaA__AGQ81754

SEQ ID NO: 215617 - RNA, 1410 nt, Artificial Sequence
  derived and/or modified CDS sequence (opt5) from neuraminidase__InfluenzaA__AGQ81756
augaaccccaaucagaagaucauugccaucggcagcauuucccugaccaucgcuacaauuugccuccugauccaaaucgccauucuugugacgaccaugacacugcacuucaaacauggggaguguaccaacucuagcaauaaccaggcggucccuugcggaccgaucauuaucgaaagaaauguuacagagauugugcaccucaacuccaccacacuggaaaaggagaucugucccaaagcugccggcuaccgggacuggucuaagccucagugccagauuaccggguuugcccccuucagcaaagauaauuccauccgccuuucugcuagcggagacaucugggugacgagagaaccuuaugucuccuguggccuggggaagugcuaccaauuugcccucggacagggcaccacacuggauaaccggcauagcaauggcaccucucacgaccgcacaccccauagaacccugcucaugaacgagcugggggugccuuuccaccuugcuacgaagcagguuuguauugccugguccucuagcuccugccacgauggaaaagcguggcugcaugugugugucacaggcgacgaucggaaugccaccgcuagcaucauuuaugacgggcuccugguggauucuaucggauccuggagcaagaacauucuucgcacacaggaguccgaaugcguuuguaucaaugggaccugcaccguggucaugacagacggcucugccagcggaaaagcugauacgagaauccuguuuauucgggagggcaagaucauucacaucuccccgcucagcggcucugcccaacauguggaagagugcuccuguuacccccaguauccugaggugcgcugcgucuguagagacaacuggcgggggagcaaucgccccguucuguacauuaacauggcggauuauucuguggacagcggauacgugugcuccggccuggucggggacaccccuagaaacgaugacacaucuagcuccagcaauuguaaagaucccaacaaugaacggggagccccgggcgugaaggggugggcuuucgacucuggaaacgauaucuggaugggccgcaccaucgagaaggacuccagaagcggcuacgaaacauuucggguuauugggggauggaauaccgccaacucuaaaucccagacgagcagacaggugaucgucgauuccgacaauucuagcggcuauuccgggauuuucucuguggagggaaagagcugcaucaaccgcuguuuuuacguugaacucauucggggcagaccuaaagagacacgcgugugguggaccuccaauagcaucauugucuucugcgggaccucuggcacauauggaaccggcuccuggcccgauggggcuaacaucaauuuuaugccuaucuga

SEQ ID NO: 215618 - RNA, 1410 nt, Artificial Sequence
  derived and/or modified CDS sequence (opt5) from neuraminidase__InfluenzaA__AGQ81757
augaaccccaaucagaagaucauugccaucggcagcgugucccugaccauugcuacaaucugccuccugauucaaaucgccauccuugucacgaccaugacacugcacuucaaacauggggaguguaccaacucuagcaauaaccaggcgguuccuugcggaccgauuaucauugaaagaaaugugacagagaucgugcaccucaacuccaccacacuggaaaaggagauuugucccaaagcugccggcuaccgggacuggucuaagccucagugccagaucaccggguuugcccccuucagcaaagauaauuccauucgccuuucugcuagcggagacaucugggucacgagagaaccuuauguguccuguggccuggggaagugcuaccaauuugcccucggacagggcaccacacuggauaaccggcauagcaauggcaccucucacgaccgcacaccccauagaacccugcucaugaacgagcuggggguuccuuuccaccuugcuacgaaacagguguguaucgccugguccucuagcuccugccacgauggaaaggcguggcugcaugucugugugacaggcgacgaucggaaugccaccgcuagcauuaucuaugacgggcuccugguugauucuauuggauccuggagcaagaacauccuucgcacacaggaguccgaaugcguguguauuaaugggaccugcaccgucgugaugacagacggcucugccagcggaaaagcugauacgagaauccuguuuauccgggagggcaagauuauccacauuuccccgcucagcggcucugcccaacauguggaagagugcuccuguuacccccaguauccugagguccgcugcguuuguagagacaacuggcgggggagcaaucgccccgugcuguacaucaacauggcggauuauucuguggacagcggauacgucugcuccggccuggugggggacaccccuagaaacgaugacacaucuagcuccagcaauuguaaagaucccaacaaugaacggggagccccgggcguuaaggggugggcuuucgacucuggaaacgauauuuggaugggccgcaccaucgagaaggacuccagaagcggcuacgaaacauuucgggugaucgggggauggaauaccgccaacucuaaaucccagacgagcagacaggucauuguggauuccgacaauucuagcggcuauuccgggaucuucucuguugagggaaagagcugcauuaaccgcuguuuuuacguggaacucauccggggcagaccuaaagagacacgcgucugguggaccuccaauagcauuaucguguucugcgggaccucuggcacauauggaaccggcuccuggcccgauggggcuaacauuaauuuuaugccuaucuga

SEQ ID NO: 215619 - RNA, 1401 nt, Artificial Sequence
  derived and/or modified CDS sequence (opt5) from neuraminidase__InfluenzaA__AGQ81758
augaaccccaaucagaagaucauugccaucggcagcgugucccugauuaucgcuauuaucugccuccugaugcaaaucgccauucuuaccacaacgaugacccugcacuucagacagaacgaguguucuaauccuagcaacaaucaggucguuccgugcgaacccacaaucauugagcggaacaccgugcaucucaauuccacaaccaucgaacgcgagauuuguccuaaaguggcggaauacaagaacuggucuaaaccccagugccaaaucacaggguuugcuccuuucagcaaggacaauuccauuagacugucugccggaggcgauaucugggucacccgggagcccuaugugagcuguucccuugggaaaugcuaccaguuugcccugggacagggcacgacccucaagaacaagcacagcaaugggacaacccaugaccgcacaccucacagaacccugcugaugaacgagcucggaguuccguuccaucugggcacgaaacagguguguaucgcuuggucuuccagcucuugcuaugauggcaaggccuggcuucacauuugugucacaggggacgaugaaaaugcuaccgccuccaucauuuacgacggaaugcugguggauagcaucggcucuugguccaaaaacauucuccggacacaagagagcgaaugcguuuguaucaaugggaccugcgcgguggucaugaccgacggauccgccucuggcaaggcugauacacgcgugcuguuuaucagagaggggaaaauuaucaacauuagcccccuuuccggaagcgcccagcacguggaggaaugcucuuguuauccucgguaccccgagguccgcugcguuuguagagacaacuggaagggcuccaaucggccugugcuguauaucaacauggcugauuacagcauugaaucuagcuacgugugcuccggccucgucggggacacgccccgcaaugaugacucuagcuccagcucuaacuguagagacccgaauaacgagcggggagccccuggcgugaaggggugggcguucgaugacggaaaugauguuuggaugggccgcaccaucaaaaacgacuccagaagcggguaugaaacauuucggguggucaauggauggaccauggccaacucuaagucccagaucaauagacaggugauuguugauagcgacaacugguccggcuacucuggcaucuucagcguggaggggaaaaagugcauuaaucgcuguuuuuaugucgagcugauccggggaagaccccaagaaccucgcgugugguggacauccaacucuauuaucgucuucugcggcaccagcgggacguacggaacaggcuccuggcccgauggggcuaauauuaacuuuaugcccaucuga

SEQ ID NO: 215620 - RNA, 1401 nt, Artificial Sequence
  derived and/or modified CDS sequence (opt5) from neuraminidase__InfluenzaA__AGQ81759
augaaccccaaucagaagaucauugccaucggcagcgugucccugaccauugcuaucauuugcuuccucauccaaaucgccauucugacaacgaccaugacacuucacuuuagacagucugaguguagcaacccuuccaauaaccaggucguuccgugcgaacccaucauuaucgagcggaauaccgugcaucugaacucuacaauuaucgaaaaagagauuuguccuaagguggcggaauacaaaaauuggagcaagccccagugccaaaucaccggguucgcuccuuuuuccaaagacaacucuauccgccucagcgccggaggcgauauuugggucacaagagagcccuauguguccuguagccuggggaagugcuaccaguucgcccuuggacagggcaccacgcugaagaauaaacacucuaacgggaccacacaugaccggaucccucaccgcacccuccugaugaaugagcugggaguuccguuucaucucggcacaaaacagguguguauugcuugguccuccucuuccugccacgauggcaaggccuggcugcacaucugugucaccggggacgauaagaacgcuacggccagcauuaucuaugacggaaugcuuguggauucuaucggcuccuggagcaaaaauauucugagaacacaagaauccgagugcguuuguaucaacgggaccugcgcgguggucaugacagacggaucugccagcggcaaggcugauacccggauucucuucauccgcgaagggaagauuaucaauaucagcccccugagcggaucugcccagcauguggaggagugcuccuguuacccuagauaucccgaagugcggugcgucugucgcgacaacuggaaaggcagcaacagaccuguucuuuacauuaauauggcugauuauucuaucgagagcuccuacgugugcucuggccuggugggggacacaccccgggaugacgacagcuccucuagcuccaacugucgcgauccgaauaacgaaagaggagccccuggcgucaaggggugggcguuugacgauggaaaugacauuuggaugggccggaccaucaaaagcgauucucgcuccggguacgagacguucagagugauuaacggauggaccacagccaauagcaagucccagaucaaccggcagguuauuguggacucugauagcugguccggcuauucuggcaucuuuagcgucgaagggaaaaauugcaucaacagauguuucuacguggagcucauucgcggacggcccagagagacccgcguuugguggacauccaauagcaucauuguguuuugcggcaccucugggacguauggaacaggcuccuggccugacggggcuaacaucaauuucaugcccauuuga

SEQ ID NO: 215621 - RNA, 1401 nt, Artificial Sequence
  derived and/or modified CDS sequence (opt5) from neuraminidase__InfluenzaA__AGQ81760
augaaccccaaucagaagaucauugccaucggcagcgugucccugaccauugcuaucauuugcuuccucaugcaaaucgccauccugacaacgaccaugacacuucacuuuagacagaacgaguguucuaauccuagcaacaaucaggucguuccgugcgaacccauuaucauugagcggaacaccgugcaucucaauuccacaaccaucgaaaaagagauuuguccuaagguggcggaauacaaaaacuggucuaagccccagugccaaaucacaggguucgcuccuuuuagcaaagacaauuccauucgccucucugccggaggcgauaucugggucaccagagagcccuaugugagcuguucccuggggaagugcuaccaguucgcccuuggacagggcacgacccugaagaacaaacacagcaaugggacaacccaugaccggaucccucaccgcacacuccugaugaacgagcugggaguuccguuucaucucggcaccaaacagguguguauugcuuggucuuccagcucuugccacgauggcaaggccuggcugcacaucugugucacgggggacgauaagaaugcuacagccuccauuaucuaugacggaaugcuuguggauagcauuggcucuugguccaaaaacauccugagaacccaagaaagcgagugcguuuguaucaaugggacaugcgcgguggucaugaccgacggauccgccucuggcaaggcugauacccgggugcuguucauucgcgaagggaagaucauuaacaucagcccccuguccggaagcgcccagcauguggaggagugcucuuguuacccuagauaucccgaaguccggugcguuugucgcgacaacuggaaaggcuccaauagaccugugcuuuacauuaacauggcugauuauagcaucgagucuagcuacgugugcuccggccuggucggggacacaccccgggaugacgacucuagcuccagcucuaauugucgcgauccgaacaaugaaagaggagccccuggcgugaaggggugggcguuugacgauggaaacgacaucuggaugggccggacgauuaaauccgauagccgcucuggguacgagaccuucagaguugugaauggauggaucacagccaacuccaagagccagauuaaucggcaggucaucguggacuccgauucuuggagcggcuauuccggcaucuuuucuguugaagggaaaaacugcauuaauagauguuucuacguggagcucauucgcggacggccccaagagaccagagucugguggacaagcaacuccaucaucguguuuugcggcaccagcgggacguauggaacaggcucuuggccugacggggcuaauauuaacuucaugcccaucuga

SEQ ID NO: 215622 - RNA, 1401 nt, Artificial Sequence
  derived and/or modified CDS sequence (opt5) from neuraminidase__InfluenzaA__AGQ81761
augaaccccaaucagaagaucauugccaucggcagcgugucccugaccauugcuaucauuugcuuccucaugcaaaucgccauccugacaacgaccaugacacuucacuuuagacagaacgaguguucuaauccuagcaacaaucaggucguuccgugcgaacccauuaucauugagcggaacaccgugcaucucaauuccacaaccaucgaaaaagagauuuguccuaagguggcggaauacaaaaacuggucuaagccccagugccaaaucacaggguucgcuccuuuuagcaaagacaauuccauucgccugucugccggaggcgauaucugggucaccagagagcccuaugugagcuguucccuggggaagugcuaccaguucgcccuuggacagggcacgacccugaagaacaaacacagcaaugggacaacccaugaccggaucccucaccgcacacuccugaugaacgagcugggaguuccguuucaucucggcaccaaacagguguguauugcuuggucuuccagcucuugccacgauggcaaggccuggcugcacaucugugucacgggggacgauaagaaugcuacagccuccauuaucuaugacggaaugcuuguggauagcauuggcucuugguccaaaaacauccugagaacccaagaaagcgagugcguuuguaucaaugggacaugcgcgguggucaugaccgacggauccgccucuggcaaggcugauacccggauucucuucaucaaggaagggaaaauuaucaacauuagcccccuguccggaagcgcccagcauguggaggagugcucuuguuacccucgcuaucccgaagugagaugcgucugucgggacaacuggaagggcuccaaucgcccuguucuuuacaucaacauggcugauuauagcaucgagucuagcuacgugugcuccggccuggugggggacacacccagagaugacgacucuagcuccagcucuaauugucgggauccgaacaaugaacgcggagccccuggcgucaaagggugggcguuugacgauggaaacgacauuuggaugggcagaacgaucaaguccgauagccggucuggguacgagaccuuccgcgugguuaauggauggacaaccgccaacuccaaaagccagauuaauagacaggugaucgucgacuccgauucuuggagcggcuauuccggcaucuuuucuguggaagggaagaacugcauuaaucgguguuucuacguugagcucauuagaggacgcccccaagagacacgggugugguggaccagcaacuccaucaucgucuuuugcggcacgagcgggacauauggaaccggcucuuggccugacggggcuaauauuaacuucaugcccaucuga

SEQ ID NO: 215623 - RNA, 1401 nt, Artificial Sequence
  derived and/or modified CDS sequence (opt5) from neuraminidase__InfluenzaA__AGQ81763
augaaccccaaucagaagaucauugccaucggcagcgugucccugauuaucgcuauuaucugccuccugaugcaaaucgccauucuuaccacaacgaugacccugcacuucagacagaacgaguguucuaauccuagcaacaaucaggucguuccgugcgaacccaucauuaucgagcggaacacagugcaucucaauuccaccacaauugaacgcgagaucuguccuaaaguggcggaauacaagaacuggucuaaaccccagugccaaauuaccggguuugcuccuuucagcaaggacaauuccaucagacugucugccggaggcgauaucugggucacacgggagcccuaugugagcuguucccuugggaaaugcuaccaguuugcccugggacagggcaccacgcucaagaacaagcacagcaaugggaccacacaugaccgcaccccucacagaacacugcugaugaacgagcucggaguuccguuccaucugggcaccaaacagguguguauugcuuggucuuccagcucuugcuaugauggcaaggccuggcuucacaucugugucacgggggacgauaaaaaugcuacagccuccauuaucuacgacggaaugcugguggauagcauuggcucuugguccaagaacauccuccggacccaagaaagcgagugcguuuguaucaaugggacaugcgcgguggucaugaccgacggauccgccucuggcaaagcugauacccgcgugcuguuuauuagagaagggaagaucauuaacaucagcccccuuuccggaagcgcccagcacguggaggagugcucuuguuauccucgguaccccgaaguccgcugcguuuguagagacaacuggaagggcuccaaucggccugugcuguauauuaacauggcugauuacagcaucgagucuagcuacgugugcuccggccucgucggggacacaccccgcaaugaugacucuagcuccagcucuaacuguagagacccgaauaacgaacggggagccccuggcgugaaagggugggcguucgaugacggaaaugauguuuggaugggccgcacgaucaagaacggguccagaagcggauaugagaccuuucggguggucaauggcuggacaauggccaacucuaaaucccagauuaauagacaggugaucguugacagcgauaacugguccggcuacucugggauuuucagcguggaaggaaagaaaugcaucaaucgcuguuuuuaugucgagcugauucggggcagaccccaagagccucgcgugugguggaccuccaacucuaucauugucuucugcgggacaagcggaaccuacggcacgggguccuggcccgacggcgcuaauaucaacuuuaugcccaucuga

SEQ ID NO: 215624 - RNA, 1401 nt, Artificial Sequence
  derived and/or modified CDS sequence (opt5) from neuraminidase__InfluenzaA__AGQ81766
augaaccccaaucagaagaucauugccaucggcagcgugucccugaccauugcuaucauuugcuuccucaugcaaaucgccauccugacaacgaccaugacacuucacuuuagacagaacgaguguucuaauccuagcaacaaucaggucguuccgugcgaacccauuaucauugagcggaacaccgugcaucucaauuccacaaccaucgaaaaagagauuuguccuaagguggcggaauacaaaaacuggucuaagccccagugccaaaucacaggguucgcuccuuuuagcaaagacaauuccauucgccugucugccggaggcgauaucugggucaccagagagcccuaugugagcuguucccuggggaagugcuaccaguucgcccuuggacagggcacgacccugaagaacaaacacagcaaugggacaacccaugaccggaucccucaccgcacacuccugaugaacgagcugggaguuccguuucaucucggcaccaaacagguguguauugcuuggucuuccagcucuugccacgauggcaaggccuggcugcacaucugugucacgggggacgauaagaaugcuacagccuccauuaucuaugacggaaugcuuguggauagcauuggcucuugguccaaaaacauccugagaacccaagaaagcgagugcguuuguaucaaugggacaugcgcgguggucaugaccgacggauccgccucuggcaaggcugauacccggauucucuucauccgcgaagggaagauuaucaacauuagcccccuguccggaagcgcccagcauguggaggagugcucuuguuacccuagauaucccgaagugcggugcgucugucgcgacaacuggaaaggcuccaauagaccuguucuuuacaucaacauggcugauuauagcaucgagucuagcuacgugugcuccggccuggugggggacacaccccgggaugacgacucuuuuagcuccagcaauugucgcgauccgaacaaugaaagaggagccccuggcgucaaggggugggcguucgacgauggaaacgacauuuggaugggccggacgaucaaaucugauucccgcagcggguacgagaccuuuagagugguuaauggauggacaaccgccaacucuaagucccagauuaauagacaggugaucgucgacagcgauuccuggucuggcuauagcggcauuuucuccguggaagggaaaaacugcaucaaucgguguuuuuacguugagcucauucgcggacggccccaagagacaaucgugugguggaccucuaacagcaucauugucuucugcggcacguccgggacauauggaaccggcagcuggccugacggggcuaauaucaacuuuaugcccauuuga

SEQ ID NO: 215625 - RNA, 1401 nt, Artificial Sequence; identical to SEQ ID NO: 215624
  derived and/or modified CDS sequence (opt5) from neuraminidase__InfluenzaA__AGQ81767

SEQ ID NO: 215626 - RNA, 1410 nt, Artificial Sequence
  derived and/or modified CDS sequence (opt5) from neuraminidase__InfluenzaA__AGQ81768
augaaccccaaucagaagaucguggccauuggcagcgucucccugaccaucgcuacaauuugccuccugaugcaaaucgccauucuuguuacgaccaugacacugcacuucaaacauggggaguguaccaacucuagcaauaaccaggcggugccuugcggaccgaucaucauugaaagaaauaucacagagauugugcaccucaacuccaccacacuggaaaaggagaucugucccaaagcugccggcuaccgggacuggucuaagccucagugccagauuaccggguuugcccccuucagcaaagauaauuccauccgccuuucugcuagcggagacauuugggucacgagagaaccuuauguguccuguggccuggggaagugcuaccaauuugcccucggacagggcaccacacuggauaaccggcauagcaauggcaccucucacgaccgcacaccccauagaacccugcucauguccgagcuggggguuccuuuccaccuugcuacgaaacagguguguaucgccuggucuagcuccagcugccacgauggagaggcguggcugcauaucugugucacaggcgacgaucggaacgccaccgcuucuauuaucuaugacgggaugcucguggauuccauuggaagcugguccaagaauauccugcgcacacaggaaucugagugcguuuguauuaacgggaccugcaccguggucaugacagacggcagcgccuccggaaaggcugauacgagaauccuuuuuauccgggaaggcaaaauugugcacaucagcccgcugucuggcuccgcccaacauguggaggagugcagcuguuacccccaguauccugaaguccgcugcguuuguagagacaauuggcgggggucuaaccgccccgugcucuacauuaauauggcggauuauagcguggacuccggauacgucugcucuggccuggugggggacaccccuagaaacgaugacacaagcuccagcucuaacuguaaggaucccaauaacgagcggggagccccgggcguuaaagggugggcuuucgacuccggaaaugauaucuggaugggccgcaccauugaaaaggaccugagaagcggcuacgagacauuucgggugaucgggggauggaacaccgccaauucuaagucccagacgaacagacaggucaucguggauagcgacaauuccucuggcuauagcgggauuuucuccguugaaggaaaaucuugcaucaaccgcuguuuuuacguggagcucauucggggcagaccuaaggagacacgcgucugguggaccagcaauuccaucauuguguucugcgggaccagcggcacauauggaaccggcucuuggcccgauggggcuaacaucaauuuuaugccuauuuga

SEQ ID NO: 215627 - RNA, 1410 nt, Artificial Sequence
  derived and/or modified CDS sequence (opt5) from neuraminidase__InfluenzaA__AGQ81769
augaaccccaaucagaagaucguggccauuggcagcgucucccugaccaucgcuacaauuugccuccugaugcaaaucgccauucuuguuacgaccaugacacugcacuucaaacauggggaguguaccaacucuagcaauaaccaggcggugccuugcggaccgaucaucauugaaagaaauaucacagagauugugcaccucaacuccaccacacuggaaaaggagaucugucccaaagcugccggcuaccgggacuggucuaagccucagugccagauuaccggguuugcccccuucagcaaagauaauuccauccgccuuucugcuagcggagacauuugggucacgagagaaccuuauguguccuguggccuggggaagugcuaccaauuugcccucggacagggcaccacacuggauaaccggcauagcaauggcaccucucacgaccgcacaccccauagaacccugcucauguccgagcuggggguuccuuuccaccuugcuacgaaacagguguguaucgccuggucuagcuccagcugccacgauggagaggcguggcugcauaucugugucacaggcgacgaucggaacgccaccgcuucuauuaucuaugggggaaugcucguggacuccauuggcagcugguccaagaauauccugcgcacacaggaaucugagugcguuuguauuaacgggaccugcaccguggucaugacagauggaagcgccuccggcaaggcugacacgagaauccuuuuuauccgggaaggcaaaauugugcacaucagcccgcugucuggguccgcccaacauguggaggagugcagcuguuacccccaguauccugaaguccgcugcguuuguagagauaauuggcggggaucuaaccgccccgugcucuacauuaauauggcggacuauagcguggauuccggcuacgucugcucugggcuggugggagacaccccuagaaacgacgauacaagcuccagcucuaacuguaaggaccccaauaacgagcggggcgccccggggguuaaaggaugggcuuucgauuccggcaaugacaucuggaugggccgcaccauugaaaaggaucugagaagcggguacgagacauuucgggugaucggaggcuggaacaccgccaauucuaagucccagacgaacagacaggucaucguggacagcgauaauuccucuggguauagcggaauuuucuccguugaaggcaaaucuugcaucaaccgcuguuuuuacguggagcucauucgggggagaccuaaggagacacgcgucugguggaccagcaauuccaucauuguguucugcggcaccagcggaacauauggcaccgggucuuggcccgacggagcuaacaucaauuuuaugccuauuuga

SEQ ID NO: 215628 - RNA, 1401 nt, Artificial Sequence
  derived and/or modified CDS sequence (opt5) from neuraminidase__InfluenzaA__AGQ81770
augaaccccaaucagaagaucauugccaucggcagcguguccauuaccaucgcuauuaucugcuucaucaugcaaauugccauccugacaacgaccaugacacuccacuuuagacagaacgaguguucuaauccuagcaacaaucaggucguuccgugcgaacccauuaucauugagcggaacaccgugcaucuuaauuccacaaccaucgaaaaagagacauguccuaagguggcggaauacaaaaacuggucuaagccccagugccaaauuaccggguucgcuccuuuuagcaaagacaauuccauccgccugucugccggaggcgauaucugggucacgagagagcccuaugugagcuguucccuggggaagugcuaccaguucgcccucggacagggcaccacacugaagaacaaacacagcaaugggaccacacaugaccggauuccucaccgcacccuucugaugaacgagcucggaguuccguuucaucugggcacgaaacagguguguaucgcuuggucuuccagcucuugccacgauggcaaggccuggcugcacauuugugucacaggggacgauaagaaugcuaccgccuccaucauuuaugacggaaugcucguggauagcaucggcucuugguccaaaaacauccugagaacacaagaaagcgagugcguuuguauuaaugggaccugcgcgguggucaugaccgacggauccgccucuggcaaggcugauacacgggugcuuuucauccgcgaagggaagauuaucaacauuagcccccuguccggaagcgcccagcauguggaggagugcucuuguuacccuagauaucccgaaguccggugcguuugucgcgacaacuggaaaggcuccaauagaccugugcucuacaucaacauggcugauuauagcguggagucuagcuacgucugcuccggccuggugggggacacgccccgggaugacgacucuagcuccagcucuaauugucgcgauccgaacaaugaaagaggagccccuggcguuaaggggugggcguuugacgauggaaacgacaucuggaugggccggaccauuaaauccgauagccgcucuggguacgagacauucagaguggucaauggauggaccacagccaacuccaagagccagaucaauagacaggugauuguugacuccgauucuuggagcggcuauuccggcaucuuuucuguggaagggaaaaacugcauuaaucgguguuucuacgucgagcuuauccgcggacggccccaagagaccagagugugguggacgagcaacuccauuaucgucuuuugcggcacaagcgggaccuauggaaccggcucuuggccugacggggcuaauaucaacuucaugcccauuuga

SEQ ID NO: 215629 - RNA, 1410 nt, Artificial Sequence
  derived and/or modified CDS sequence (opt5) from neuraminidase__InfluenzaA__AGQ81772
augaaccccaaucagaagaucguggccauuggcagcgcuucccugaccaucgccacaaugugccuccugcuucaaauugcgcuguucgcuacgaccaugacacuccacuuuaaacagaccggguguacaaacucuagcgacaaucaggccgucccuugcggaccgaucauuaucgagagaaacaucaccgaaauuguucaucuuaauuccacaacccuggagaaggaaacgugucccaaaucugccggcuaccggaacuggagcaagccucagugccaaaucaccggguucgcucccuuuuccaaagauaauucuauucgccuggccgcugccggagacaucugggugacaagagagccuuaugugagcuguggccucgggaagugcuaccaguucgcgcugggacagggcaccacacuggauaacaagcacuccaauggcaccacgcaugaccggacaccccaccgcacccuccugaugagcgaacuuggggucccuuuucaucuggccacaaaacagguguguauugcuuggucuuccagcucuugccacgauggaaaggccuggcuccacguuugugugaccggcgacgauaaaaacgcuaccgccuccaucauuuaugacgggauccuggucgauagcaucgcgucuugguccaagaauauucuuagaacacaagagagcgagugcguguguaucaacggaacgugcaccguugugaugacagacggcuccgccucugggcgggcugauacccgcauucuguucaucagagaaggaaaaauuguccauaucagcccgcucuccggcagcgcccagcacguggaggaaugcucuuguuacccccgguauccugaggugcgcugcgucuguagagacaauuggaagggcuccaaccggcccguucuguuuaucaauauggcugauuacagcauugacucuagcuaugugugcccugggcuggugggagacacaccccgcaacgaugacagauccucuagcuccaacugucgggauccgaauaacgagcgcggcgccccuggggucaagggaugggccuucgacagcggcaaugauaucuggauggggagaaccauugaaaaagacucucgguccggauacgagacguuuagagugaucagcggcuggucuacagcuaacuccaagagccagauuaaucgccagguuaucguggaucgggacaacuccucuggcuacagcgggaucuucuccgucgaaggaaaaucuugcauuaauagauguuuuuauguggagcucauccgcggccggcccaaggaaaacagaguuugguggaccagcaauuccauuaucguguucugcgggaccagcggaacauacggcaccgggucuuggccugauggcgcgaacauuaaucugaugcccaucuga

SEQ ID NO: 215630 - RNA, 1401 nt, Artificial Sequence
  derived and/or modified CDS sequence (opt5) from neuraminidase__InfluenzaA__AGQ81773
augaaccccaaucagaagaucauugccaucggcagcgugucccugaccauugcuaucauuugcuuccucaugcaaaucgccauccugacaacgaccaugacacuucacuuuagacagaacgaguguucuaauccuagcaacaaucaggucguuccgugcgaacccauuaucauugagcggaaaaccgugcaucugaacuccacaaccaucgaaaaggagauuuguccuaaaguggcggaauacaagaauuggucuaaaccccagugccaaaucacaggguucgcuccuuuuagcaaggacaacuccauucgccucucugccggaggcgauaucugggucaccagagagcccuaugugagcuguucccuggggaagugcuaccaguucgcccuuggacagggcacgacccugaaaaauaagcacagcaacgggacaacccaugaccggaucccucaccgcacacuccugaugaaugagcugggaguuccgcuccauuggggcaccaaacagguguguauugcuuggucuuccagcucuugccacgauggcaaggccuggcugcacaucugugucacgggggacgauaaaaacgcuacagccuccauuaucuaugacggaaugcuuguggauagcauuggcucuugguccaagaauauccugagaacccaagaaagcgagugcguuuguaucaacgggacaugcgcgguggucaugaccgacggauccgccucuggcaaggcugauacccgggugcucuuuauucgcgaagggaaaaucauuaauaucagcccccuguccggaagcgcccagcauguggaggagugcucuuguuacccuagauaucccgaaguccggugcguuugucgcgacaacuggaagggcuccaacagaccugugcuuuacauuaauauggcugauuauagcaucgagucuagcuacgugugcuccggccuggucggggacacaccccgggaugacgacucuagcuccagcucuaacugucgcgauccgaauaacgaaagaggagccccuggcgugaaaggguggggauucgacgauggcaaugacaucuggauggggcggacgauuaaguccgauagccgcucuggauacgagaccuuuagaguugugaacggcuggacaaccgccaauuccaaaagccagaucaaccggcaggucauuguggacuccgauucuuggagcggcuauuccgggaucuucucuguugaaggaaagaauugcauuaacagauguuuuuacguggagcucauccgcggccggccccaagagacaagagucugguggaccagcaauuccauuaucguguucugcgggacgagcggaacauauggcaccgggucuuggccugacggcgcgaacaucaauuuuaugcccauuuga

SEQ ID NO: 215631 - RNA, 1401 nt, Artificial Sequence
  derived and/or modified CDS sequence (opt5) from neuraminidase__InfluenzaA__AGQ81774
augaaccccaaucagaagaucauugccaucggcagcgugucccugauuaucgcuauuaucugccuccugaugcaaaucgccauucuuaccacaacgaugacccugcacuucagacagaacgaguguucuaauccuagcaacaaucaggucaugccgugcgaacccaucauuaucgagcggaacacaguucaucucaauuccaccacaauugaacgcgagaucuguccuaaaguggcggaauacaagaacuggucuaaaccccagugccaaauuaccggguuugcuccuuucagcaaggacaauuccaucagacugucugccggaggcgauaucugggugacacgggagcccuaugucagcuguucccuugacaaaugcuaccaguuugcccuggggcagggaaccacgcucaagaacaagcacagcaauggcaccacacaugaucgcaccccucacagaacacugcugaugaacgagcucggggugccguuccaucugggaaccaaacagguuuguauugcuuggucuuccagcucuugcuaugacggcaaggccuggcuucacaucugugugacgggcgaugacaaaaaugcuacagccuccauuaucuacgaugggaugcuggucgacagcauuggaucuugguccaagaacauccuccggacccaagaaagcgagugcguguguaucaauggcacaugcgcgguugugaugaccgauggguccgccucuggaaaagcugacacccgcguccuguuuauuagagaaggcaagaucauuaacaucagcccccuuuccgggagcgcccagcacguggaggagugcucuuguuauccucgguaccccgaagugcgcugcgucuguagagauaacuggaagggauccaaucggccuauucuguauaucaacauggcugacuacagcaucgagucuagcuacguuugcuccggccucgugggcgauacaccccgcaaugacgacucuagcuccagcucuaacuguagagauccgaauaacgaacgcggggccccuggagugaaaggcugggcguucgacgaugggaaugacgucuggaugggacggacgauuaagaacggcuccagaagcggguaugagaccuuucgggugguuaauggauggacaaucgccaacucuaaaucccagauuaauagacaggugaucgucgauagcgacgauugguccggcuacucuggcauuuucagcguggaagggaagaaaugcaucaaccgcuguuuuuauguugagcugauucggggaagaccccaagagccucgcgugugguggaccuccaauucuaucaucgucuucugcggcacaagcgggaccuacggaacgggcuccuggcccgacggggcuaacauuaauuuuaugcccaucuga

SEQ ID NO: 215632 - RNA, 1401 nt, Artificial Sequence
  derived and/or modified CDS sequence (opt5) from neuraminidase__InfluenzaA__AGQ81776
augaaccccaaucagaagaucauugccaucggcagcgugucccugaccauugcuaucauuugcuuccucaugcaaaucgccauccugacaacgaccaugacacuucacuuuagacagaacgaguguucuaauccuagcaacaaucaggucguuccgugcgaacccauuaucauugagcggaacaccgugcaucucaauuccacaaccaucgaaaaagagauuuguccuaagguggcggaauacaaaaacuggucuaagccccagugccaaaucacaggguucgcuccuuuuagcaaagacaauuccauucgccucucugccggaggcgauaucugggucaccagagagcccuaugugagcuguucccuggggaagugcuaccaguucgcccuuggacagggcacgacccugaagaacaaacacagcaaugggacaacccaugaccggaucccucaccgcacacuccugaugaacgagcugggaguuccguuucaucucggcaccaaacagguguguauugcuuggucuuccagcucuugccacgauggcaaggccuggcugcacaucugugucacgggggacgauaagaaugcuacagccuccauuaucuaugacggaaugcuuguggauagcauuggcucuugguccaaaaacauccugagaacccaagaaagcgagugcguuuguaucaaugggacaugcgcgguggucaugaccgacggauccgccucuggcaaggcugauacccgggugcuguucauucgcgaagggaagaucauuaacaucagcccccuguccggaagcgcccagcauguggaggagugcucuuguuacccuagauaucccgaaguccggugcguuugucgcgacaacuggaaaggcuccaauagaccugugcuuuacauuaacauggcugauuauagcaucgagucuagcuacgugugcuccggccuggucggggacacaccccgggaugacgacucuagcuccagcucuaauugucgcgauccgaacaaugaaagaggagccccuggcgugaaggggugggcguuugacgauggaaacgacaucuggaugggccggacgauuaaauccgauagccgcucuggguacgagaccuucagaguuaucgacggauggacaaccgccgauuccaagagccagauuaauagacaggugaucgucgacuccgauucuuggagcggcuauuccggcaucuuuucuguggaagggaaaaacugcauuaaucgguguuucuacguugagcucauucgcggacggccccaagagacaagagugugguggaccagcaacuccaucaucgucuuuugcggcacgagcgggacauauggaaccggcucuuggccugacggggcuaauauuaacuucaugcccaucuga

SEQ ID NO: 215633 - RNA, 1410 nt, Artificial Sequence
  derived and/or modified CDS sequence (opt5) from neuraminidase__InfluenzaA__AGQ81777
augaaccccaaucagaagaucgugaccauuggcagcgccucccugacaaucgcuacgaugugccuccugcuucaaauugcccuguucgcgaccacaaugacccuccacuuuaaacagacaggguguaccaacucuagcgacaaucaggcugucccuugcggaccgaucauuaucgagagaaacaucacagaaauuguucaucugaauagcaccacgcuugagaaggaaaccugucccaaaucugccggcuaccggaacuggagcaagccucagugccaaaucacaggguucgcccccuuuuccaaagauaauucuauucgccuggcugccgcuggagacaucugggugaccagagagccuuaugugagcuguggccucgggaagugcuaccaguucgcccugggacagggcacaacccuggauaacaagcacuccaauggcacgacacaugaccggacaccccaccgcacccuccugaugaacgaacuuggggucccuuuucaucuggcgaccaaacagguguguauugccugguccucuuccagcugccacgauggaaaggcuuggcuccacguuugugugaccggcgacgauaaaaaugccacagcuucuaucauuuaugacgggauccuggucgauuccaucgccagcuggucuaagaacauucuuagaacgcaagaguccgagugcguguguaucaauggaaccugcacaguugugaugaccgacggcagcgcguccgggcgggccgauacacgcauucuguucaucagagaaggaaaaauuguccauaucucuccgcucagcggcuccgcucagcacguggaggaaugcagcuguuacccccgguauccugaggugcgcugcgucuguagagacaacuggaauggcucuaaccggcccguucuguuuaucaacauggccgauuacuccauugacagcucuuaugugugcagcgggcuggugggagacaccccucgcaaugaugacagauccucuagcuccaacugucgggaucccaauaacgagcgcggcgcuccgggggucaagggaugggccuucgacagcggcaaugauaucuggauggggagaacgauugaaaaggacucucgguccggauacgagacauuuagagugaucagcggcuggucuaccgccaacuccaaaagccagauuaaucgccagguuaucguggaucgggacaacuccucuggcuacagcgggaucuucuccgucgaaggaaagucuugcauuaauagauguuuuuauguggagcucauccgcggccggccuaaagaaaacagaguuugguggaccagcaauuccauuaucguguucugcgggacaagcggaaccuacggcacagggucuuggcccgauggcgcuaacauuaaucugaugccuaucuga

SEQ ID NO: 215634 - RNA, 1410 nt, Artificial Sequence
  derived and/or modified CDS sequence (opt5) from neuraminidase__InfluenzaA__AGQ81778
augaaccccaaucagaagaucgugaccauuggcagcgccucccugacaaucgcuacgaugugccuccugcuucaaauugcccuguucgcgaccacaaugacccuccacuuuaaacagacaggguguaccaacucuagcgacaaucaggcugucccuugcggaccgaucauuaucgagagaaacaucacagaaauuguucaucugaauagcaccacgcuugagaaggaaaccugucccaaaucugccggcuaccggaacuggagcaagccucagugccaaaucacaggguucgcccccuuuuccaaagauaauucuauucgccuggcugccgcuggagacaucugggugaccagagagccuuaugugagcuguggccucgggaagugcuaccaguucgcccugggacagggcacaacccuggauaacaagcacuccaauggcacgacacaugaccggacaccccaccgcacccuccugaugaacgaacuuggggucccuuuucaucuggcgaccaaacagguguguauugccugguccucuuccagcugccacgauggaaaggcuuggcuccacguuugugugaccggcgacgauaaaaaugccacagcuucuaucauuuaugacgggauccuggucgauuccaucgccagcuggucuaagaacauucuuagaacgcaagaguccgagugcguguguaucaauggaaccugcacaguugugaugaccgacggcagcgcguccgggcgggccgauacacgcauucuguucaucagagaaggaaaaauuguccauaucucuccgcucagcggcuccgcucagcacguggaggaaugcagcuguuacccccgguauccugaggugcgcugcgucuguagagacaacuggaagggcucuaaucggcccguucuguuuaucaacauggccgauuacuccauugacagcucuuaugugugcagcgggcuggugggagacaccccucgcaacgaugacagauccucuagcuccaauugucgggaucccaacaaugagcgcggcgcuccgggggucaagggaugggccuucgacagcggcaacgauaucuggauggggagaacgauugaaaaagacucucgguccggauacgagacauuuagagugaucagcggcuggucuaccgccaauuccaagagccagauuaaccgccagguuaucguggaucgggacaauuccucuggcuacagcgggaucuucuccgucgaaggaaaaucuugcauuaacagauguuuuuauguggagcucauccgcggccggccuaaggaaaauagaguuugguggaccagcaacuccauuaucguguucugcgggacaagcggaaccuacggcacagggucuuggcccgauggcgcuaauauuaaccugaugccuaucuga

SEQ ID NO: 215635 - RNA, 1410 nt, Artificial Sequence
  derived and/or modified CDS sequence (opt5) from neuraminidase__InfluenzaA__AGQ81779
augaaccccaaucagaagaucguggccauuggcagcgcuucccugaccaucgccacaaugugccuccugcuucaaauugcgcuguucgcuacgaccaugacacuccacuuuaaacagaccggguguacaaacucuagcgacaaucaggccgucccuugcggaccgaucauuaucgagagaaacaucaccgaaauuguucaucugaauagcacaacccuugagaaggaaacgugucccaaaucugccggcuaccggaacuggagcaagccucagugccaaaucaccggguucgcucccuuuuccaaagauaauucuauucgccuggccgcugccggagacaucugggugacaagagagccuuaugugagcuguggccucgggaagugcuaccaguucgcgcugggacagggcaccacacuggauaacaagcacuccaauggcaccacgcaugaccggacaccccaccgcacccuccugaugaacgaacuuggggucccuuuucaucuggccacaaaacagguguguauugcuugguccucuuccagcugccacgauggaaaggccuggcuccacguuugugugaccggcgacgauaaaaaugcuaccgccucuaucauuuaugacgggauccuggucgauuccaucgcgagcuggucuaagaacauucuuagaacacaagaguccgagugcguguguaucaauggaacgugcaccguugugaugacagacggcagcgccuccgggcgggcugauacccgcauucuguucaucagagaaggaaaaauuguccauaucucuccgcucagcggcuccgcccagcacguggaggaaugcagcuguuacccccgguauccugagauccgcugcguguguagagacaacuggaagggcucuaaucggcccguccuguuuauuaacauggcugauuacuccaucgacagcucuuauguuugcagcgggcuggugggagacacaccucgcaacgaugacagauccucuagcuccaauugucgggaucccaacaaugagcgcggcgccccgggggugaagggaugggccuucgacagcggcaacgauauuuggauggggagaaccaucgaaaaagacucucgguccggauacgagacguuuagagucauuagcggcuggucuacagcuaauuccaagagccagaucaaccgccaggugaucguugaucgggacaauuccucuggcuacagcgggauuuucuccguggaaggaaaaucuugcaucaacagauguuuuuaugucgagcucauucgcggccggccuaaggaaaauagagugugguggaccagcaacuccaucauuguuuucugcgggaccagcggaacauacggcaccgggucuuggcccgauggcgcgaauaucaaccugaugccuauuuga

SEQ ID NO: 215636 - RNA, 1410 nt, Artificial Sequence
  derived and/or modified CDS sequence (opt5) from neuraminidase__InfluenzaA__AGQ81780
augaaccccaaucagaagaucguggccauuggcagcgcuucccugaccaucgccacaaugugccuccugcuucaaauugcgcuguucgcuacgaccaugacacuccacuuuaaacagaccggguguacaaacucuagcgacaaucaggccgucccuugcggaccgaucauuaucgagagaaacaucaccgaaauuguucaucugaauagcacaacccuugagaaggaaacgugucccaaaucugccggcuaccggaacuggagcaagccucagugccaaaucaccggguucgcucccuuuuccaaagauaauucuauucgccuggccgcugccggagacaucugggugacaagagagccuuaugugagcuguggccucgggaagugcuaccaguucgcgcugggacagggcaccacacuggauaacaagcacuccaauggcaccacgcaugaccggacaccccaccgcacccuccugaugaacgaacuuggggucccuuuucaucuggccacaaaacagguguguauugcuugguccucuuccagcugccacgauggaaaggccuggcuccacguuugugugaccggcgacgauaaaaaugcuaccgccucuaucauuuaugacgggauccuggucgauuccaucgcgagcuggucuaagaacauucuuagaacacaagaguccgagugcguguguaucaauggaacgugcaccguugugaugacagacggcagcgccuccgggcgggcugauacccgcauucuguucaucagagaaggaaaaauuguccauaucucuccgcucagcggcuccgcccagcacguggaggaaugcagcuguuacccccgguauccugaggugcgcugcgucuguagagacaacuggaagggcucuaaucggcccguucuguuuaucaacauggcugauuacuccauugacagcucuuaugugugcagcgggcuggugggagacacaccucgcaacgaugacagauccucuagcuccaauugucgggaucccaacaaugagcgcggcgccagcggggucaagggaugggccuucgacucuggcaacgauaucuggauggggagaaccauugaaaaagacucccggagcggauacgagacguuuagagugaucucuggcugguccacagcuaauagcaagucccagauuaaccgccagguuaucguggaucgggacaauucuagcggcuacuccgggaucuucucugucgaaggaaaaagcugcauuaacagauguuuuuauguggagcucauccgcggccggccgaaggaaaauagaguuugguggaccuccaacagcauuaucguguucugcgggaccucuggaacauacggcaccggguccuggccugauggcgcgaauauuaaccugaugcccaucuga

SEQ ID NO: 215637 - RNA, 1401 nt, Artificial Sequence
  derived and/or modified CDS sequence (opt5) from neuraminidase__InfluenzaA__AGQ81781
augaaccccaaucagaagaucauugccaucggcagcgugucccugaccauugcuaucauuugcuuccucaugcaaaucgccauccugacaacgaccaugacaccucacuuuagacagaacgaguguucuaauccgagcaacaaucaggucguucccugcgaaccuauuaucauugagcggaacaccgugcaucuuaauuccacaaccaucgaaaaagagauuugucccaagguggcggaauacaaaaacuggucuaagccucagugccaaaucacaggguucgcucccuuuagcaaagacaauuccauucgccugucugccggaggcgauaucugggucaccagagagccuuaugugagcuguucccucgggaagugcuaccaguucgcccugggacagggcacgacccuuaagaacaaacacagcaaugggacaacccaugaccggaucccgcaccgcacacugcucaugaacgagcugggaguucccuuucaucugggcaccaaacagguguguauugcuuggucuuccagcucuugccacgauggcaaggccuggcuccacaucugugucacgggggacgauaagaaugcuacagccuccauuaucuaugacggaaugcugguggauagcauuggcucuugguccaaaaacauccuuagaacccaagaaagcgagugcguuuguaucaaugggacaugcgcgguggucaugaccgacggauccgccucuggcaaggcugauacccggauucuguucauccgcgaagggaagauuaucaacauuagcccucucuccggaagcgcccagcauguggaggagugcucuuguuaccccagauauccugaagugcggugcgucugucgcgacaacuggaaaggcuccaauagacccguucuguacaucaacauggcugauuauagcaucgagucuagcuacgugugcuccggccuugugggggacacaccgcgggaugacgacucuagcuccagcucuaauugucgcgauccuaacaaugaaagaggagcccccggcgucaaggggugggcguuugacgauggaaacgacauuuggaugggccggacgaucaaauccgauagccgcucuggguacgagaccuucagagugguuaauggauggacaaccgccaacuccaagagccagauuaauagacaggugaucgucgacuccgauucuuggagcggcuauuccggcaucuuuucuguggaagggaaaaacugcauuaaucgguguuucuacguugagcugauucgcggacggccucaagagacaagagugugguggaccagcaacuccaucaucgucuuuugcggcacgagcgggacauauggaaccggcucuuggcccgacggggcugauauuaaucucaugcccaucuga

SEQ ID NO: 215638 - RNA, 1410 nt, Artificial Sequence
  derived and/or modified CDS sequence (opt5) from neuraminidase__InfluenzaA__AGQ81783
augaaccccaaucagaagaucgugaccauuggcagcgccucccugacaaucgcuacgaugugccuccugcuucaaauugcccuguucgcgaccacaaugacccuccacuuuaaacagacaggguguaccaacucuagcgacaaucaggcugucccuugcggaccgaucauuaucgagagaaacaucacagaaauuguucaucugaauagcaccacgcuugagaaggaaaccugucccaaaucugccggcuaccggaacuggagcaagccucagugccaaaucacaggguucgcccccuuuuccaaagauaauucuauucgccuggcugccgcuggagacaucugggugaccagagagccuuaugugagcuguggccucgggaagugcuaccaguucgcccugggacagggcacaacccuggauaacaagcacuccaauggcacgacacaugaccggacaccccaccgcacccuccugaugaacgaacuuggggucccuuuucaucuggcgaccaaacagguguguauugccugguccucuuccagcugccacgauggaaaggcuuggcuccacguuugugugaccggcgacgauaaaaaugccacagcuucuaucauuuauaacgggauccuggucgacuccaucgccagcuggucuaagaauauucuuagaacgcaagaguccgagugcguguguaucaacggaaccugcacaguugugaugaccgauggcagcgcguccgggcgggccgacacacgcauucuguucaucagagaaggaaaaauuguccauaucucuccgcucagcggcuccgcucagcacguggaggaaugcagcuguuacccccgguauccugaggugcgcugcgucuguagagauaauuggaagggcucuaaccggcccguucuguuuaucaacauggccgacuacuccauugauagcucuuaugugugcagcgggcuggugggagacaccccucgcaaugacgauagauccucuagcuccaacugucgggaccccaauaacgagcgcggcgcuccgggggucaagggaugggccuucgauagcggcaaugacaucuggauggggagaacgauugaaaaagauucucgguccggauacgagacauuuagagugaucagcggcuggucuaccgccaacuccaagagccagauuaaucgccagguuaucguggaccgggauaacuccucuggcuacagcgggaucuucuccgucgaaggaaaaucuugcauuaauagauguuuuuauguggagcucauccgcggccggccuaaggaaaacagaguuugguggaccagcaauuccauuaucguguucugcgggacaagcggaaccuacggcacagggucuuggcccgacggcgcuaacauuaaucugaugccuaucuga

SEQ ID NO: 215639 - RNA, 1401 nt, Artificial Sequence
  derived and/or modified CDS sequence (opt5) from neuraminidase__InfluenzaA__AGQ81784
augaaccccaaucagaagaucauugccaucggcagcgugucccugaccauugcuaucauuugcuuccucaugcaaaucgccauccugacaacgaccaugacacuucacuuuagacagaacgaguguucuaauccuagcaacaaucaggucguuccgugcgaacccauuaucauugagcggaacaccgugcaucucaauuccacaaccaucgaaaaagagauuuguccuaagguggcggaauacaaaaacuggucuaagccccagugccaaaucacaggguucgcuccuuuuagcaaagacaauuccauucgccucucugccggaggcgauaucugggucaccagagagcccuaugugagcuguucccuggggaagugcuaccaguucgcccuuggacagggcacgacccugcggaacaagcacagcaaugggacaacccaugaccgcaucccucacagaacacuccugaugaacgagcugggaguuccguuucaucucggcaccaaacagguguguauugcuuggucuuccagcucuugccacgauggcaaggccuggcugcacaucugugucacgggggacgauaaaaaugcuacagccuccauuaucuaugacggaaugcuuguggauagcauuggcucuugguccaagaacauccugcggacccaagaaagcgagugcguuuguaucaaugggacaugcgcgguggucaugaccgacggaaacgccuccggcaaagcugauacccgcgugcuguucauuagagaagggaagaucauuaacaucucuccccugagcggauccgcccagcauguggaggagugcagcuguuacccucgguaucccgaaguccgcugcguuuguagagacaauuggaagggcucuaaccggccugugcuuuacauuaauauggcugauuauuccaucgagagcucuuacgugugcagcggccuggucggggacacaccccgcgaugacgacuccucuagcuccagcaacuguagagauccgaauaacgaacggggagccccuggcgugaaagggugggcguuugacgauggaaaugacaucuggaugggccgcacgauuaagucugauuccagaagcggguacgagaccuuccggguugugaacggauggacaaccgccaauucuaaaucccagaucaacagacaggucauuguggacagcgauuccuggucuggcuauagcggcaucuuuuccguugaagggaagaauugcauuaaccgcuguuucuacguggagcucauccggggaagaccccaagagacacgcgucugguggaccucuaauagcauuaucguguuuugcggcacguccgggacauauggaaccggcagcuggccugacggggcugauaucaacuucaugcccauuuga

SEQ ID NO: 215640 - RNA, 1401 nt, Artificial Sequence
  derived and/or modified CDS sequence (opt5) from neuraminidase__InfluenzaA__AGQ81785
augaaccccaaucagaagaucauugccaucggcagcgugucccugaccauugcuaucauuugcuucaucaugcaaaucgccauucucacaacgaccaugacaccucacuuuagacagaacgaguguucuaauccgagcaacaaucaggucguucccugcgaaccuaucauuaucgagcggaacaccgugcaucuuaauuccacaaccauugaaaaagagaucugucccaagguggcggaauacaaaaacuggucuaagccucagugccaaauuacaggguucgcucccuuuagcaaagacaauuccauccgccugucugccggaggcgauaucugggucaccagagagccuuaugugagcuguucccuggggaagugcuaccaguucgcccucggacagggcacgacccugaagaacaaacacagcaaugggacaacccaugaccggauuccgcaccgcacacuucugaugaacgagcucggaguucccuuucaucugggcaccaaacagguguguaucgcuuggucuuccagcucuugccacgauggcaaggccuggcugcacauuugugucacgggggacgauaagaaugcuacagccuccaucauuuaugacggaaugcucguggauagcaucggcucuugguccaaaaacauccugagaacccaagaaagcgagugcguuuguauuaaugggacaugcgcgguggucaugaccgacggauccgccucuggcaaggcugauacccggauccuuuucauucgcgaagggaagaucauuaacaucagcccucuguccggaagcgcccagcauguggaggagugcucuuguuaccccagauauccugaagugcggugcgucugucgcgacaacuggaaaggcuccaauagacccguucucuacaucaacauggcugauuauagcauugagucuagcuacgugugcuccggccuggugggggacacaccgcgggaugacgacucuagcuccagcucuaauugucgcgauccuaacaaugaaagaggagcccccggcgucaaggggugggcguuugacgauggaaacgacaucuggaugggccggacgauuaaauccgauagccgcucuggguacgagaccuucagagugguuaauggauggacaaccgccaacuccaagagccagaucaauagacaggugauugucgacuccgauucuuggagcggcuauuccggcaucuuuucuguggaagggaaaaacugcauuaaucgguguuucuacguugagcuuauccgcggacggccucaagagacaagagugugguggaccagcaacuccaucauugucuuuugcggcacgagcgggacauauggaaccggcucuuggcccgacggggcugauaucaaucugaugcccauuuga

SEQ ID NO: 215641 - RNA, 1401 nt, Artificial Sequence
  derived and/or modified CDS sequence (opt5) from neuraminidase__InfluenzaA__AGQ81787
augaaccccaaucagaagaucauugccaucggcagcgugucccugauuaucgcuauuaucugccuccugaugcaaaucgccauucuuaccacaacgaugacccugcacuucagacagaacgaguguucuaauccuagcaacaaucaggucguuccgugcgaacccaucauuaucgagcggaacacagugcaucucaauuccaccacaauugaacgcgagaucuguccuaaaguggcggaauacaagaacuggucuaaaccccagugccaaauuaccggguuugcuccuuucagcaaggacaauuccaucagacugucugccggaggcgauaucugggucacacgggagcccuaugugagcuguucccuugacaaaugcuaccaguuugcccuggggcagggaaccacgcucaagaacaagcacagcaauggcaccacacaugaucgcaccccucacagaacacugcugaugaacgagcucgggguuccguuccaucugggaaccaaacagguguguauugcuuggucuuccagcucuugcuaugacggcaaggccuggcuucacaucugugucacgggcgaugacaaaaaugcuacagccuccauuaucuacgaugggaugcugguggacagcauuggaucuugguccaagaacauccuccggacccaagaaagcgagugcguuuguaucaauggcacaugcgcgguggucaugaccgauggguccgccucuggaaaagcugacacccgcgugcuguuuauuagagaaggcaagaucauuaacaucagcccccuuuccgggagcgcccagcacguggaggagugcucuuguuauccucgguaccccgaaguccgcugcguuuguagagauaacuggaagggauccaaucggccuauucuguauaucaacauggcugacuacagcaucgagucuagcuacgugugcuccggccucgugggcgauacaccccgcaaugacgacucuagcuccagcucuaacuguagagauccgaauaacgaacgcggggccccuggagucaaaggcugggcguucgacgaugggaaugacguguggaugggacggacgauuaagaacggcuccagaagcggguaugagaccuuucggguugugaauggauggacaauggccaacucuaaaucccagaucaauagacaggucauuguggauagcgacgauugguccggcuacucuggcaucuucagcguugaagggaagaaaugcauuaaccgcuguuuuuauguggagcugauccggggaagaccccaagagccucgcgucugguggaccuccaauucuauuaucguguucugcggcacaagcgggaccuacggaacgggcuccuggcccgacggggcuaacaucaauuuuaugcccauuuga

SEQ ID NO: 215642 - RNA, 1401 nt, Artificial Sequence
  derived and/or modified CDS sequence (opt5) from neuraminidase__InfluenzaA__AGQ81789
augaaccccaaucagaagaucauugccaucggcagcgugucccugaccauugcuaucauuugccuccugaugcaaaucgccauccuuacaacgaccaugacaccucacuucagacagaacgaguguucuaauccgagcaacaaucaggucguucccugcgaaccuauuaucauugagcggaacaccgugcaucucaauuccacaaccaucgaaaaagagauuugucccaagguggcggaauacaaaaacuggucuaagccucagugccaaaucacaggguuugcucccuucagcaaagacaauuccauucgccugucugccggaggcgauaucugggucaccagagagccuuaugugagcuguucccuggggaagugcuaccaguuugcccuuggacagggcacgacccugaagaacaaacacagcaaugggacaacccaugaccggaucccgcaccgcacacuccugaugaacgagcugggaguucccuuccaucucggcaccaaacagguguguauugcuuggucuuccagcucuugccacgauggcaaggccuggcugcacaucugugucacgggggacgauaagaaugcuacagccuccauuaucuaugacggaaugcuuguggauagcauuggcucuugguccaaaaacauccugagaacccaagaaagcgagugcguuuguaucaaugggacaugcgcgguggucaugaccgacggauccgccucuggcaaggcugauacccggauucucuuuauccgcgaagggaagauuaucaacauuagcccucuguccggaagcgcccagcauguggaggagugcucuuguuaccccagauauccugaagugcggugcgucugucgcgacaacuggaaaggcuccaauagacccguucuuuacaucaacauggcugauuauagcaucgagucuagcuacgugugcuccggccuggugggggacacaccgcgggaugacgacucuagcuccagcucuaauugucgcgauccuaacaaugaaagaggagcccccggcgucaaggggugggcguucgacgauggaaacgacauuuggaugggccggacgaucaaauccgauagccgcucuggguacgagaccuuuagagugguuaauggauggacaaccgccaacuccaagagccagauuaauagacaggugaucgucgacuccgauucuuggagcggcuauuccggcauuuucucuguggaagggaaaaacugcaucaaucgguguuuuuacguugagcucauucgcggacggccucaagagacaagagugugguggaccagcaacuccaucaucgucuucugcggcacgagcgggacauauggaaccggcucuuggcccgacggggcugauauuaaucugaugcccaucuga

SEQ ID NO: 215643 - RNA, 1401 nt, Artificial Sequence
  derived and/or modified CDS sequence (opt5) from neuraminidase__InfluenzaA__AGQ81790
augaaccccaaucagaagaucauugccaucggcagcgugucccugauuaucgcuauuaucugccuccugaugcaaaucgccauucuuaccacaacgaugacccugcacuucagacagaacgaguguucuaauccuagcaacaaucaggcgaugccgugcgaacccaucauuaucgagcggaacacaguccaucucaauuccaccacaauugaacgcgagaucuguccuaaaguuaccgaauacaagaacuggucuaaaccccagugccaaauuacaggguuugcuccuuucagcaaggacaauuccaucagacugucugccggaggcgauaucugggugacccgggagcccuaugugagcuguucccuugacaaaugcuaccaguuugcccuggggcagggaacgacccucaagaacaagcacagcaauggcacaacccaugaucgcacaccucacagaacccugcugaugaacgagcucggggucccguuccaucugggaacgaaacagguguguauugcuuggucuuccagcucuugcuaugacggcaaggccuggcuucacaucuguguuacaggcgaugacaaaaaugcuaccgccuccauuaucuacgaugggaugcugguggacagcauuggaucuugguccaagaacauccuccggacacaagaaagcgagugcgucuguaucaaugggaccugcgcggugguuaugaccgauggcuccgccucuggacgcgcugacacaagagugcuguuuauucgggaaggcaaaaucauuaacaucagcccccuuuccgggaacgcccagcacgucgaggagugcagcuguuauccucgcuaccccgaagugagaugcgugugucgggauaauuggaagggaucuaaccgcccuauucuguauaucaauauggcugacuacuccaucgagagcucuuacgucugcagcggccucguuggcgauacgcccagaaacgacgacuccucuagcuccagcaauugucgggauccgaacaaugaacgcggggccccuggagugaagggcugggcguucgacgaugggaacgacguguggaugggaagaaccauuaaaaauggcucucgguccggguaugagacauuuagagucgugaacggauggaccauggccaauagcaagucucagaucaaccgccagguuauuguggauuccgacgaauggagcggcuacuccggcaucuucucugucgaggggaaaaagugcauuaaucgguguuuuuauguggagcugaucagaggacgcccccaagaaccucggguuugguggacaagcaacuccauuaucguguucugcggcaccucugggacguacggaacaggcagcuggcccgauggggcuaauaucaacuuuaugcccauuuga

SEQ ID NO: 215644 - RNA, 1401 nt, Artificial Sequence
  derived and/or modified CDS sequence (opt5) from neuraminidase__InfluenzaA__AGQ81792
augaaccccaaucagaagaucauugccaucggcagcgugucccugauuaucgcuauuaucugccuccugaugcaaaucgccauucuuaccacaacgaugacccugcacuucagacagaacgaguguucuaauccuagcaacaaucaggucaugccgugcgaacccaucauuaucgagcggaacacaguucaucucaauuccaccacaauugaacgcgagaucuguccuaaaguggcggaauacaagaacuggucuaaaccccagugccaaauuaccggguuugcuccuuucagcaaggacaauuccaucagacugucugccggaggcgauaucugggugacacgggagcccuaugucagcuguucccuuaacaaaugcuaccaguuugcccuggggcagggaaccacgcucgagaauaagcacagcaacggcaccacacaugaccgcaccccucacagaacacugcugaugaaugaacucggggugccguuccaucugggaaccaagcagguuuguauggcuuggucuuccagcucuugcuaugauggcaaagccuggcuucacauuugugugacgggcgacgauaagaacgcuacagccuccgucaucuacgacgggaugcugguggauagcauuggaucuuggucccaaaauauccuccggacccaggagagcgaaugcguuuguauuaacggcacaugcgcgguggucaugaccgacggguccgccucuggaaaagcugauacccgcgugcuguuuaucagagagggcaagaucauuaacaucagcccccuuuccgggagcgcccagcacguggaggaaugcucuuguuauccucgguaccccgagguccgcugcguuuguagagacaauuggaaaggauccaaccggccuauucuguauaucaauauggcugauuacagcauugaaucuagcuacgugugcuccggccucgugggcgacacaccccgcaacgaugacucuagcuccagcucuaauuguagagacccgaacaaugagcgcggggccccuggagucaagggcugggcguucgaugacgggaacgauguguggaugggacggacgaucaagaauggcuccagaagcggguaugaaaccuuucggguugugaacggauggacaauggccaauucuaaaucccagaucaacagacaagucauuguggacagcgaugacugguccggcuacucuggcaucuucagcguugaggggaagaaaugcauuaaucgcuguuuuuauguggagcugauccggggaagaccccaggaaccucgcgucugguggaccuccaacucuauuaucguguucugcggcacaagcgggaccuacggaacgggcuccuggcccgauggggcuaauauuaacuuuaugcccaucuga

SEQ ID NO: 215645 - RNA, 1401 nt, Artificial Sequence
  derived and/or modified CDS sequence (opt5) from neuraminidase__InfluenzaA__AGQ81793
augaaccccaaucagaagaucauugccaucggcagcgugucccugauuaucgcuauuaucugccuccugaugcaaaucgccauucuuaccacaacgaugacccugcacuucagacagaacgaguguucuaauccuagcaacaaucaggucaugccgugcgaacccaucauuaucgagcggaacacaguucaucucaauuccaccacaauugaacgcgagaucuguccuaaaguggcggaauacaagaacuggucuaaaccccagugccaaauuaccggguuugcuccuuucagcaaggacaauuccaucagacugucugccggaggcgauaucugggugacacgggagcccuaugucagcuguucccuuaacaaaugcuaccaguuugcccuggggcagggaaccacgcucgagaauaagcacagcaacggcaccacacaugaccgcaccccucacagaacacugcugaugaaugaacucggggugccguuccaucugggaaccaagcagguuuguauggcuuggucuuccagcucuugcuaugauggcaaagccuggcuucacauuugugugacgggcgacgauaagaacgcuacagccuccgucaucuacgacgggaugcugguggauagcauuggaucuugguccaaaaauauccuccggacccaagagagcgaaugcguuuguauuaacggcacaugcgcgguggucaugaccgacggguccgccucuggaaaggcugauacccgcgugcuguuuaucagagagggcaaaaucauuaacaucagcccccuuuccgggagcgcccagcacguggaggaaugcucuuguuauccucgguaccccgagguccgcugcguuuguagagacaauuggaagggauccaaccggccuauucuguauaucaauauggcugauuacagcauugaaucuagcuacgugugcuccggccucgugggcgacacaccccgcaacgaugacucuagcuccagcucuaauuguagagacccgaacaaugagcgcggggccccuggagucaagggcugggcguucgaugacgggaacgauguguggaugggacggacgaucaaaaauggcuccagaagcggguaugaaaccuuucggguugugaacggauggacaauggccaauucuaagucccagaucaacagacaggucauuguggacagcgaugacugguccggcuacucuggcaucuucagcguugaggggaaaaagugcauuaaucgcuguuuuuauguggagcugauccggggaagaccccaagaaccucgcgucugguggaccuccaacucuauuaucguguucugcggcacaagcgggaccuacggaacgggcuccuggcccgauggggcuaauauuaacuuuaugcccaucuga

SEQ ID NO: 215646 - RNA, 1401 nt, Artificial Sequence; identical to SEQ ID NO: 215645
  derived and/or modified CDS sequence (opt5) from neuraminidase__InfluenzaA__AGQ81794

SEQ ID NO: 215647 - RNA, 1401 nt, Artificial Sequence
  derived and/or modified CDS sequence (opt5) from neuraminidase__InfluenzaA__AGQ81795
augaaccccaaucagaagaucauugccaucggcagcgugucccugauuaucgcuauuaucugccuccugaugcaaaucgccauucuuaccacaacgaugacccugcacuucagacagaacgaguguaauaacccuucuaauaaccaggucaugccgugcgaacccaucauuaucgagcggaauacaguucaucucaacagcaccacaauugaacgcgagaucuguccuaaaguggcggaauacaagaauugguccaaaccccagugccaaauuaccggguuugcuccuuucucuaaggacaacagcaucagacuguccgccggaggcgauaucugggugacacgggagcccuaugucucuuguagccuugacaaaugcuaccaguuugcccuggggcagggaaccacgcucaagaauaagcacuccaacggcaccacacaugaucgcaccccucacagaacacugcugaugaaugagcucggggugccguuccaucugggaaccaaacagguuuguauugcuuggucuagcuccagcugcuaugacggcaaggccuggcuucacaucugugugacgggcgaugacaaaaacgcuacagccucuauuaucuacgaugggaugcuggucgacuccauuggaagcuggucuaagaauauccuccggacccaagaauccgagugcguguguaucaacggcacaugcgcgguugugaugaccgaugggagcgccuccggaaaagcugacacccgcguccuguuuauuagagaaggcaagaucauuaacaucucuccccuuagcggguccgcccagcacguggaggagugcagcuguuauccucgguaccccgaagugcgcugcgucuguagagauaauuggaagggaucuaaccggccuauucuguauaucaauauggcugacuacuccaucgagagcucuuacguuugcagcggccucgugggcgauacaccccgcaacgacgacuccucuagcuccagcaauuguagagauccgaacaaugaacgcggggccccuggagugaaaggcugggcguucgacgaugggaacgacgucuggaugggacggacgauuaagaauggcucuagauccggguaugagaccuuucgggugguuaacggauggacaaucgccaauagcaaaucucagauuaacagacagaucauuguggauuccgacgauuggagcggcuacuccggcaucuucucugucgaagggaagaaaugcauuaaucgcuguuuuuauguggagcugauccggggaagaccccaagagccucgcguuugguggaccagcaacuccaucauuguguucugcggcacaucugggaccuacggaacgggcagcuggcccgacggggcuaauaucaacuuuaugcccauuuga

SEQ ID NO: 215648 - RNA, 1401 nt, Artificial Sequence
  derived and/or modified CDS sequence (opt5) from neuraminidase__InfluenzaA__AGQ81796
augaaccccaaucagaagaucauugccaucggcagcgugucccugauuaucgcuauuaucugccuccugaugcaaaucgccauucuuaccacaacgaugacccugcacuucagacagaacgaguguucuaauccuagcaacaaucaggucaugccgugcgaacccaucauuaucgagcggaacacaguucaucucaauuccaccacaauugaacgcgagaucuguccuaaaguggcggaauacaagaacuggucuaaaccccagugccaaauuaccggguuugcuccuuucagcaaggacaauuccaucagacugucugccggaggcgauaucugggugacacgggagcccuaugucagcuguucccuugacaaaugcuaccaguuugcccuggggcagggaaccacgcucaagaacaagcacagcaauggcaccacacaugaucgcaccccucacagaacacugcugaugaacgagcucggggugccguuccaucugggaaccaaacagguuuguauugcuuggucuuccagcucuugcuaugacggcaaggccuggcuucacaucugugugacgggcgaugacaaaaaugcuacagccuccauuaucuacgaugggaugcuggucgacagcauuggaucuugguccaagaacauccuccggacccaagaaagcgagugcguguguaucaauggcacaugcgcgguugugaugaccgauggguccgccucuggaaaagcugacacccgcguccuguuuauuagagaaggcaagaucauuaacaucagcccccuuuccgggagcgcccagcacguggaggagugcucuuguuauccucgguaccccgaagugcgcugcgucuguagagauaacuggaagggauccaaucggccuauucuguauaucaacauggcugacuacagcaucgagucuagcuacguuugcuccggccucgugggcgauacaccccgcaaugacgacucuagcuccagcucuaacuguagagauccgaauaacgaacgcggggccccuggagugaaaggcugggcguucgacgaugggaaugacauuuggaugggacggacgaucaagaacggcuccagaagcggguaugagaccuuucgggucgugaauggauggacaauggccaacucuaaaucccagauuaauagacagguuaucguggauagcgacgauugguccggcuacucuggcauuuucagcgucgaagggaagaaaugcaucaaccgcuguuuuuauguggagcugauucggggaagaccccaagagccucgcguuugguggaccuccaauucuaucaucguguucugcggcacaagcgggaccuacggaacgggcuccuggcccgacggggcuaacauuaauuuuaugcccaucuga

SEQ ID NO: 215649 - RNA, 1401 nt, Artificial Sequence
  derived and/or modified CDS sequence (opt5) from neuraminidase__InfluenzaA__AGQ81798
augaaccccaaucagaagaucauuagcaucggcuccgugucucugauuaucgccauuaucugccuccugaugcaaaucgcuauucuuaccacaacgaugacccugcacuucagacagaacgaguguagcaauccuuccaacaaucaggucaugccgugcgaacccaucauuaucgagcggaacacaguucaucucaauucuaccacaauugaacgcgagaucuguccuaaaguggccgaauacaagaacuggagcaaaccccagugccaaauuaccggguuugcgccuuucuccaaggacaauucuaucagacugagcgcuggaggcgauaucugggugacacgggagcccuaugucuccuguagccuugacaaaugcuaccaguuugcccuggggcagggaaccacgcucaagaacaagcacucuaauggcaccacacaugaucgcaccccucacagaacacugcugaugaacgagcucggggugccguuccaucugggaaccaaacagguuuguauugccugguccuccucuuccugcuaugacggcaaggcuuggcuucacaucugugugacgggcgaugacaaaaaugccacagcuagcauuaucuacgaugggaugcuggucgacucuauuggauccuggagcaagaacauccuccggacccaagaauccgagugcguguguaucaauggcacaugcgccguugugaugaccgaugggucugcgagcggaaaagccgacacccgcguccuguuuauuagagaaggcaagaucauuaacaucagcccccuuagcgggucugcucagcacguggaggagugcuccuguuauccucgguaccccgaagugcgcugcgucuguagagauaacuggaagggaagcaaucggccuauucuguauaucaacauggccgacuacucuaucgagagcuccuacguuugcucuggccucgugggcgauacaccccgcaaugacgacagcuccucuagcuccaacuguagagauccgaauaacgaacgcggggcuccuggagugaaaggcugggccuucgacgaugggaaugacgucuggaugggacggacgauuaagaacggcagcagaucuggguaugagaccuuucgggugguuaauggauggacaauggcgaacuccaaaagccagaucaauagacaggugauugucgauuccgacgauuggucuggcuacagcggcaucuucuccguggaagggaagaaaugcauuaaccgcuguuuuuauguugagcugauccggggaagaccccaagagccucgcgugugguggaccucuaauagcauuaucgucuucugcggcacauccgggaccuacggaacgggcagcuggcccgacggggccaacaucaauuuuaugcccauuuga

SEQ ID NO: 215650 - RNA, 1401 nt, Artificial Sequence
  derived and/or modified CDS sequence (opt5) from neuraminidase__InfluenzaA__AGQ81799
augaaccccaaucagaagaucauugccaucggcagcgugucccugauuaucgcuauuaucugccuccugaugcaaaucgccauucuuaccacaacgaugacccugcacuucagacagaacgaguguucuaauccuagcaacaaucaggucaugccgugcgaacccaucauuaucgagcggaacacaguucaucucaauuccaccacaauugaacgcgagaucuguccuaaaguggcggaauacaagaacuggucuaaaccccagugccaaauuaccggguuugcuccuuucagcaaggacaauuccaucagacugucugccggaggcgauaucugggugacacgggagcccuaugucagcuguucccuugacaaaugcuaccaguuugcccuggggcagggaaccacgcucaagaacaagcacagcaauggcaccacacaugaucgcaccccucacagaacacugcugaugaacgagcucggggugccguuccaucugggaaccaaacagguuuguauugcuuggucuuccagcucuugcuaugacggcaaggccuggcuucacaucugugugacgggcgaugacaaaaaugcuacagccuccauuaucuacgaugggaugcuggucgacagcauuggaucuugguccaagaacauccuccggacccaagaaagcgagugcguguguaucaauggcacaugcgcgguugugaugaccgauggguccgccucuggaaaagcugacacccgcguccuguuuauuagagaaggcaagaucauuaacaucagcccccuuuccgggagcgcccagcacguggaggagugcucuuguuauccucgguaccccgaagugcgcugcgucuguagagauaacuggaagggauccaaucggccuauucuguauaucaacauggcugacuacagcaucgagucuagcuacguuugcuccggccucgugggcgauacaccccgcaaugacgacucuagcuccagcucuaacuguagagauccgaauaacgaacgcggggccccuggagugaaaggcugggcguucgacgaugggaaugacgucuggaugggacggacgauuaagaacggcuccagaagcggguaugagaccuuucgggugguuaauggauggacaauggccaacucuaaaucccagaucaauagacaggugauugucgauagcgacgauugguccggcuacucuggcaucuucagcguggaagggaagaaaugcauuaaccgcuguuuuuauguugagcugauccggggaagaccccaagagccucgcgugugguggaccuccaauucuauuaucgucuucugcggcacaagcgggaccuacggaacgggcuccuggcccgacggggcuaacaucaauuuuaugcccauuuga

SEQ ID NO: 215651 - RNA, 1401 nt, Artificial Sequence; identical to SEQ ID NO: 215650
  derived and/or modified CDS sequence (opt5) from neuraminidase__InfluenzaA__AGQ81800

SEQ ID NO: 215652 - RNA, 1401 nt, Artificial Sequence
  derived and/or modified CDS sequence (opt5) from neuraminidase__InfluenzaA__AGQ81801
augaaccccaaucagaagaucauugccaucggcagcgugucccugauuaucgcuauuaucugccuccugaugcaaaucgccauucuuaccacaacgaugacccugcacuucagacagaacgaguguucuaauccuagcaacaaucaggucaugccgugcgaacccaucauuaucgagcggaacacaguucaucucaauuccaccacaauugaacgcgagaucuguccuaaaguggcggaauacaagaacuggucuaaaccccagugccaaauuaccggguuugcuccuuucagcaaggacaauuccaucagacugucugccagcggagauaucugggugacacgggagcccuaugucuccuguagccuugacaaaugcuaccaguuugcccugggccaggggaccacgcucaagaacaagcacucuaauggaaccacacaugaucgcaccccucacagaacacugcugaugaacgagcucggcgugccguuccaucuggggaccaaacagguuuguauugcuugguccuccucuuccugcuaugacggaaaggccuggcuucacaucugugugacgggcgaugacaaaaaugcuacagccagcauuaucuacgauggcaugcuggucgacucuauuggguccuggagcaagaacauccuccggacccaagaauccgagugcguguguaucaauggaacaugcgcgguugugaugaccgauggcucugccagcgggaaagcugacacccgcguccuguuuauuagagaaggaaagaucauuaacaucagcccccuuagcggcucugcccagcacguggaggagugcuccuguuauccucgguaccccgaagugcgcugcgucuguagagauaacuggaaggggagcaaucggccuauucuguauaucaacauggcugacuacucuaucgagagcuccuacguuugcucuggacucgugggcgauacaccccgcaaugacgacagcuccucuagcuccaacuguagagauccgaauaacgaacggggcgccccuggggugaaaggaugggcguucgacgauggcaaugacgucuggauggggcgcacgauuaagaacggaagcagaucuggcuaugagaccuuucgggugguuaauggguggacaauggccaacuccaaaagccagaucaauagacaggugauugucgauuccgacgauuggucuggauacagcggcaucuucuccguggaaggcaagaaaugcauuaaccgcuguuuuuauguugagcugauccgggggagaccccaagagccucgcgugugguggaccucuaauagcauuaucgucuucugcggaacauccggcaccuacgggacgggaagcuggcccgacggcgcuaacaucaauuuuaugcccauuuga

SEQ ID NO: 215653 - RNA, 1401 nt, Artificial Sequence
  derived and/or modified CDS sequence (opt5) from neuraminidase__InfluenzaA__AGQ81802
augaaccccaaucagaagaucauugccaucggcagcgugucccugauuaucgcuauuaucugccuccugaugcaaaucgcccuucugaccacaacgaugacccuccacuucagacagaacgaguguucuaauccuagcaacaaucaggucaugccgugcgaacccauuaucauugagcggaacacaguucaucuuaauuccaccacaaucgaacgcgagauuuguccuaaaguggcggaauacaagaacuggucuaaaccccagugccaaaucaccggguuugcuccuuucagcaaggacaauuccauuagacugucugccggaggcgauaucugggugacacgggagcccuaugucagcuguucccuggacaaaugcuaccaguuugcccucgggcagggaaccacgcugaagaacaagcacagcaauggcaccacacaugaucgcaccccucacagaacacugcucaugaacgagcugggggugccguuccaucuuggaaccaaacagguuuguaucgcuuggucuuccagcucuugcuaugacggcaaggccuggcugcacauuugugugacgggcgaugacaaaaaugcuacagccuccaucauuuacaacgggaugcucgucgauagcaucggaucuugguccaagaauauucugcggacccaagaaagcgagugcguguguaucaacggcacaugcgcgguugugaugaccgacggguccgccucuggaaaagcugauacccgcguccuuuuuaucagagaaggcgagauuaucaacauuagcccccuguccgggagcgcccagcacguggaggaaugcucuuguuauccucgguaccccgaggugcgcugcgucuguagagacaauuggaagggauccaaccggccuauccucuauauuaauauggcugauuacagcaucgaaucuagcuacguuugcuccggccuggugggcgacacaccccgcaacgaugacucuagcuccagcucuaauuguagagacccgaacaaugagcgcggggccccuggagugaagggcugggcguucgaugacgggaacgaugucuggaugggacggacgaucaaaaauggcuccagaagcggguaugaaaccuuucgggugguuaacggauggacaauggccaauucuaagucccagauuaacagacaggugaucgucgacagcgaugacugguccggcuacucuggcauuuucagcguggaggggaaaaagugcaucaaucgcuguuuuuauguugagcugauucggggaagaccccaagaaccucgcgugugguggaccuccaacucuaucauugucuucugcggcacaagcgggaccuacggaacgggcuccuggcccgauggggcuaauaucaacuuuaugcccaucuga

SEQ ID NO: 215654 - RNA, 1401 nt, Artificial Sequence
  derived and/or modified CDS sequence (opt5) from neuraminidase__InfluenzaA__AGQ81803
augaaccccaaucagaagaucauugccaucggcagcgugucccugauuaucgcuauuaucugccuccugaugcaaaucgccauucuuaccacaacgaugacccugcacuucagacagaacgaguguucuaauccuagcaacaaucaggucaugccgugcgaacccaucauuaucgagcggaacacaguucaucucaauuccaccacaauugaacgcgagaucuguccuaaaguggcggaauacaagaacuggucuaaaccccagugccaaauuaccggguuugcuccuuucagcaaggacaauuccaucagacugucugccagcggagauaucugggugacacgggagcccuaugucuccuguagccuugacaaaugcuaccaguuugcccugggccaggggaccacgcucaagaacgagcacucuaauggaaccacacaugaucgcaccccucacagaacacugcugaugaacgaacucggcgugccguuccaucuggggaccaagcagguuuguauugcuugguccuccucuuccugcuaugacggaaaagccuggcuucacaucugugugacgggcgaugacaagaaugcuacagccagcauuaucuacgauggcaugcuggucgacucuauuggguccuggagcaaaaacauccuccggacccaagaguccgaaugcguguguaucaauggaacaugcgcgguugugaugaccgauggcucugccagcgggaaggcugacacccgcguccuguuuauuagagagggaaaaaucauuaacaucagcccccuuagcggcucugcccagcacguggaggaaugcuccuguuauccucgguaccccgaggugcgcugcgucuguagagauaacuggaaggggagcaaucggccuauucuguauaucaacauggcugacuacucuaucgaaagcuccuacguuugcucuggacucgugggcgauacaccccgcaaugacgacagcuccucuagcuccaacuguagagauccgaauaacgagcggggcgccccuggggugaagggaugggcguucgacgauggcaaugacgucuggauggggcgcacgauuaaaaacggaagcagaucuggcuaugaaaccuuucgggugguuaauggguggaucauggccaacuccaagagccagauuaauagacaggugaucgucgauuccgacgauuggucuggauacagcggcauuuucuccguggagggcaaaaagugcaucaaccgcuguuuuuauguugagcugauucgggggagaccccaagaaccucgcgugugguggacaucuaauagcaucaucgucuucugcggaaccuccggcacauacgggaccggaagcuggcccgacggcgcuaacauuaauuuuaugcccaucuga

SEQ ID NO: 215655 - RNA, 1410 nt, Artificial Sequence
  derived and/or modified CDS sequence (opt5) from neuraminidase__InfluenzaA__AGQ81804
augaaccccaaucagaagaugaucgccauuggcgcugugagccugaccaucgccauuaucugccuccugaugcaaacagcgauucuugucacgaccaugacacugcacuucaaacauaacgaguguaccaauuccucuaacaaucaggcugccccuugcgggccgaucaucauugaaagaaacguuacagagguggugcaccucaauagcaccacacuggaaaaggagaucugucccaaagccgcuggauaccggaacugguccaagccucagugccagauuaccggcuuugcccccuucucuaaagacaauagcauccgccuuuccgcugggggagauauuugggucacgagagaaccuuaugugucuuguggccuggggaagugcuaccaauuugcccucggacagggcaccacacuggacaacagccauuccaauggcaccagccacgaucggacaccccaucgcacccugcucaugaacgagcuggggguuccuuuccaccuuaugacgaaacagguguguaucgcguggucuuccagcucuugccacgacggaaaggccuggcugcaugucugugugacaggcgaugacagaaaugcuaccgccuccauuaucuaugggggaauccucguugauagcauuggcucuugguccaagaacauccugcggacacaggagagcgaaugcguguguauuaaugggaccugcgcugucgugaugaccgacggauccgccucuggcaaagcggauacacgcauccuuuuuauuagagagggcaagaucgugcacaucagcccgcuguccgggagcgcccaacaugucgaagagugcucuuguuacccccaguauccugagguucggugcgugugucgcgacaacuggagaggauccaaccggcccgugcucuacauuaauauggcugauuauagcaucgacucuggcuacgucugcagcgggcuggugggagauacgccucgcaacgacgacguuuccucuagcuccaauuguaaagaucccaacaaugaaagaggcgccccgggggugaagggaugggcuuucgacaacggcaaugauauuuggaugggccggaccaucgacaaggauagccgcucuggguacgagacauuuagagucauugacggauggaacaccgccaauuccaaaagccagacaucuagacaggugaucguuggcuccgauaacagcuccggguauucuggaaucuucagcguggaaggcaaguccugcauuaaucgguguuuuuacgucgagcugauccgcgggcggccuaaagaaaccagagugugguggacgucuaacagcauuaucgucuucugcggcacauccggaaccuauggcaccgggagcuggcccgacggagccaauauuaacuuuaugccuaucuga

SEQ ID NO: 215656 - RNA, 1401 nt, Artificial Sequence
  derived and/or modified CDS sequence (opt5) from neuraminidase__InfluenzaA__AGQ81805
augaaccccaaucagaagaucauugccaucggcagcgugucccugauuaucgcuauuaucugccuccugaugcaaaucgcccuucugaccacaacgaugacccuccacuucagacagaacgaguguucuaauccuagcaacaaucaggucaugccgugcgaacccauuaucauugagcggaacacaguucaucuuaauuccaccacaaucgaacgcgagauuuguccuaaaguggcggaauacaagaacuggucuaaaccccagugccaaaucaccggguuugcuccuuucagcaaggacaauuccauuagacugucugccggaggcgauaucugggugacacgggagcccuaugucagcuguucccuggacaaaugcuaccaguuugcccucgggcagggaaccacgaugaagaacaagcacagcaauggcaccacacaugaucgcaccccucacagaacacugcugaugaacgagcucggggugccguuccaucugggaaccaaacagguuuguaucgcuuggucuuccagcucuugcuaugacggcaaggccuggcuucacauuugugugacgggcgaugacaaaaaugcuacagccuccaucauuuacgaugggaugcuggucgacagcaucggaucuugguccaagaacauucuccggacccaagaaagcgagugcguguguaucaauggcacaugcgcgguugugaugaccgauggguccgccucuggaaaagcugacacccgcguccuguuuaucagagaaggcaagauuaucaacauuagcccccuuuccgggagcgcccagcacguggaggagugcucuuguuauccucgguaccccgaagugcgcugcgucuguagagauaacuggaagggauccaaucggccuauccuguauauuaacauggcugacuacagcaucgagucuagcuacguuugcuccggccucgugggcgauacaccccgcaaugacgacucuagcuccagcucuaacuguagagggccgaauaacgaacggggagccccuggcgugaaagggugggcguucgaugacggaaaugaugucuggaugggccgcacgaucaagaacggguccagaagcggauaugagaccuuucgggugguuaauggcuggacaauggccaacucuaaaucccagauuaauagacaggugaucgucgacagcgaugacugguccggcuacucugggauuuucagcguggaaggaaagaaaugcaucaaccgcuguuuuuauguugagcugauucggggcagaccccaagagccucgcgugugguggaccuccaauucuaucauugucuucugcgggacaagcggaaccuacggcacgggguccuggcccgauggcgcuaacaucaauuuuaugcccaucuga

SEQ ID NO: 215657 - RNA, 1401 nt, Artificial Sequence
  derived and/or modified CDS sequence (opt5) from neuraminidase__InfluenzaA__AGQ81807
augaaccccaaucagaagaucaccgccauuggcagcaucucccugauuaucgcuauuaucugccuccugaugcaaaucgccauucuuacaacgaccaugacacugcacuucagacagaacgagugucggaauccuucuaacaaucaggugaugccgugcgaacccgucaucauugagcgcaacaccguucaucucaauagcacaaccaucgaaagagagauuuguccuaaaguggcggaauacaagaacugguccaaaccccagugccaaaucacaggguuugcuccuuucucuaaggacaauagcauucggcuguccgccucuggagauaucugggugacccgcgagcccuaugucagcuguucccuuaacaaaugcuaccaguuugcccugggccaggggacgacccucaagaauaagcacagcaacggaacaacccaugacagaacaccucaccggacccugcugaugaaugagcucggcgugccguuccaucuggggacgaaacagguuuguaucgcuuggucuuccagcucuugcuaugauggaaaggccuggcuucacauuugugugacaggcgacgauaaaaacgcuaccgccuccaucauuuacgacggcaugcuggucgauagcaucgggucuugguccaagaauauucuccgcacacaagaaagcgagugcguguguaucaacggaaccugcgcgguugugaugaccgacggcuccgccucugggaaagcugauacaagaguccuguuuaucaaggaaggaaagauuaucaacauuagcccccuuuccggcagcgcccagcacguggaggagugcucuuguuauccucgguaccccgaagugcgcugcgucuguagagacaauuggaaaggguccaaccggccuauccuguauauuaauauggcugauuacagcaucgagucuagcuacguuugcuccggacucgugggcgacacgccccgcaacgaugacucuagcuccagcucuaauuguagagacccgaacaaugaacggggcgccccuggggugaagggaugggcguucgaugacggcaacgaugucuggauggggcgcaccaucaaaaauggauccagaagcggcuaugagacauuucgggugguuaacggguggauuauggccaauucuaagucccagaucaacagacaggugauugucgacagcgaugacugguccggauacucuggcaucuucagcguggaaggcaaaaagugcauuaaucgcuguuuuuauguugagcugauccgggggagaccccaagagccucgcgugugguggaccuccaacucuauuaucgucuucugcggaacaagcggcaccuacgggacgggauccuggcccgauggcgcuaauaucaacuuuaugcccauuuga

SEQ ID NO: 215658 - RNA, 1401 nt, Artificial Sequence
  derived and/or modified CDS sequence (opt5) from neuraminidase__InfluenzaA__AGQ81808
augaaccccaaucagaagaucauugccaucggcagcgugucccugaccauugcuaucauuugcuuccucaugcaaaucgccauccugacaacgaccaugacacuucacuuuaaacagaacgaguguucuaauccuagcaacaaucaggucguuccgugcgaacccauucugaucgagagaaacaccgugcaucucaauuccacaaccauugaaaaggagguguguccuaaagucgcggaauacaagaacuggucuaaaccccagugccaaaucacaggguucgcuccuuuuagcaaggacaauuccauucggcugucugccggaggcgauaucugggugacccgcgagcccuauguuagcuguucccuugggaagugcuaccaguucgcccugggacagggcacgacccucaaaaacaaucacagcaacgggacaacccaugacagaacaccucaccggacccugcugaugaaugagcucggagugccguuucaucugggcacgaagcaggucuguauugcuuggucuuccagcucuugcuaugauggcaaagccuggcuucacaucugugugacaggggacgauaagaacgcuaccgccuccaucauuuacgacggaaugcugguugauagcaucggcucuugguccaaaaauauucuccgcacacaagaaagcgagugcguguguaucaacgggaccugcgcggucgugaugaccgacggauccgccucuggcaaggcugauacacggauucuguucaucagagaagggaagaucauuaacaucagcccccuuuccggaagcgcccagcacguggaggagugcucuuguuauccucgcuaccccgaagucagaugcguuugucgggacaauuggaaaggcuccaaccgcccugugcuguauauuaauauggcugauuacagcguggagucuagcuacgucugcuccggccucgugggggacacgcccagaaacgaugacucuagcuccagcucuaauugucgggacccgaacaaugaacgcggagccccuggcguuaaggggugggcguuugaugacggaaacgauguguggaugggcagaaccauccggaauaacucccgcagcggguaugagacauucagagucgugaauggauggaccacagccaacucuaaaucccagauuaaucggcagaucaucguugacagcgaaaacugguccggcuacucuggcauuuuuagcguggaggggaagaauugcaucaacagauguuucuaugucgagcugauucgcggacggccccaagaaccuagagugugguggaccuccaacucuaucauugucuuuugcggcacgagcgggacauacggaaccggcuccuggcccgauggggcuaauaucaacuucaugcccauuuga

SEQ ID NO: 215659 - RNA, 1401 nt, Artificial Sequence
  derived and/or modified CDS sequence (opt5) from neuraminidase__InfluenzaA__AGQ81809
augaaccccaaucagaagaucaccgccauuggcagcgugucccugaucauugcuaucauuugccuccugaugcaaaucgccauccuuacaacgaccaugacacugcacuucagacagaacgaguguucuaauccuagcaacaaucaggucaugccgugcgaacccauuaucauugagcggaacaccguucaucucaauuccacaaccaucgaacgcgagauuuguccuaaaguggcggaauacaagaacuggucuaaaccccagugccaaaucacaggguuugcuccuuucagcaaggacaauuccauuagacugucugccggaggcgauaucugggugacccgggagcccuaugucagcuguuccccugacaaaugcuaccaguuugcccuugggcagggaacgacccugaagaacaagcacagcaauggcacaacccaugaucgcacaccgcacagaacccuccugaugaacgagcugggggugcccuuccaucucggaacgaaacagguuuguaucgcuuggucuuccagcucuugcuaugacggcaaggccuggcugcacauuugugugacaggcgaugacaaaaaugcuaccgccuccaucauuuacgaugggaugcuugucgacagcaucggaucuugguccaagaacauucugcggacacaagaaagcgagugcguguguaucaauggaaccugcgcgguugugaugaccgauggguccgccucuggagaagcugacacacgcauccucuuuauuagagagggcaaaaucauuaacaucagcccucuguccgggagcgcccagcacgucgaggaaugcucuuguuauccccgguacccugaggugcgcugcguguguagagauaacuggaagggauccaaucggcccauuaucuauaucaacauggucgacuacagcauuggcucucgcuacguuugcagcggccuugugggggauacgccgagaaaugacgacuccaccucuagcuccaacugucgggauccuaauaacgaacgcggagcucccggcgugaaggggugggccuucgacgauggaaaugacgucuggaugggcagaacaaucaaaaacgggagccggucuggauaugagaccuuuagagugauuaauggcuggacaauggcgaacuccaagagccagaucaaucgccagguuauuguggauucugacaacugguccggcuacagcgggaucuucuccgucgaaggcaaaaagugcauuaaucgguguuuuuauguggagcugaucagaggccgcccucaagagccccggguuugguggaccucuaacagcaucauuguguucugcgggacguccggaacauacggcaccgggucuuggcccgauggcgccgacaucaauuuuaugccuauuuga

SEQ ID NO: 215660 - RNA, 1401 nt, Artificial Sequence
  derived and/or modified CDS sequence (opt5) from neuraminidase__InfluenzaA__AGQ81810
augaaccccaaucagaagauccuggccauuggcagcgugucccucaccaucgcuauuaucugcuuccugaugcaaauugccauccuuacaacgaccaugacacugcacuuuaaacagaacgaguguucuaauccuagcaacaaucaggucguuccgugcgaacccauccucauugagagaaacaccgugcaucuuaauuccacaaccaucgaaaaggagguguguccuaaagucgcggaauacaagaacuggucuaaaccccagugccaaauuacaggguucgcuccuuuuagcaaggacaauuccauccggcugucugccggaggcgauauuugggugacccgcgagcccuauguuagcuguucccuggggaagugcuaccaguucgcccucggacagggcacgacccugaaaaacaaucacagcaacgggacaacccaugacagaacaccucaccggacccugcucaugaaugagcugggagugccguuucaucuuggcacgaagcaggucuguaucgcuuggucuuccagcucuugcuaugauggcaaagccuggcugcacauuugugugacaggggacgauaagaacgcuaccgccuccaucaucuacgacggaaugcucguugauagcauuggcucuugguccaaaaauauccugcgcacacaagaaagcgagugcguguguauuaacgggaccugcgcggucgugaugaccgacggauccgccucuggcaaggcugauacaagaauccuuuucauucgggaagggaagaucaucaacauuagcccccuguccggaagcgcccagcacguggaggagugcucuuguuauccucgcuaccccgaagucagaugcguuugucgggacaauuggaaaggcuccaaccgcccugugcucuauaucaauauggcugauuacagcauugagucuagcuacgugugcuccggccuggucggggacacgcccagaaacgaugacucuagcuccagcucuaauugucgggacccgaacaaugaacgcggagccccuggcgugaaggggugggcguuugaugacggaaacgauguuuggaugggcagaaccauccggaauaacucccgcagcggguaugagacauucagaguggucaauggauggaccacagccaacucuaaaucccagauuaauagacaggugaucguugacagcgaaaacugguccggcuacucuggcaucuuuagcguggaggggaagaauugcauuaaccgguguuucuaugucgagcugauccgcggacggccccaagaaccuagagugugguggaccuccaacucuauuaucgucuuuugcggcacgagcgggacauacggaaccggcuccuggcccgauggggcuaauauuaacuucaugcccaucuga

SEQ ID NO: 215661 - RNA, 1401 nt, Artificial Sequence
  derived and/or modified CDS sequence (opt5) from neuraminidase__InfluenzaA__AGQ81811
augaaccccaaucagaagaucauugccaucggcagcgugucccugaccauugcuaucauuugcuuccucaugcaaaucgccauccugacaacgaccaugacacuucacuuuaaacagaacgaguguucuaauccuagcaacaaucaggucguuccgugcgaacccauucugaucgagagaaacaccgugcaucucaauuccacaaccauugaaaaggagguguguccuaaagucgcggaauacaagaacuggucuaaaccccagugccaaaucacaggguucgcuccuuuuagcaaggacaauuccauucggcugucugccggaggcgauaucugggugacccgcgagcccuauguuagcuguucccuugggaagugcuaccaguucgcccugggacagggcacgacccucaaaaacaagcacagcaaugggacaacccaugacagaacaccucaccggacccugcugaugaacgagcucggagugccguuucaucugggcacgaaacaggucuguauugcuuggucuuccagcucuugcuaugauggcaaggccuggcuucacaucugugugacaggggacgauaaaaaugcuaccgccuccaucauuuacgacggaaugcugguugauagcaucggcucuugguccaagaacauucuccgcacacaagaaagcgagugcguguguaucaaugggaccugcgcggucgugaugaccgacggauccgccucuggcaaggcugauacacggauucuguucauccgggaagggaaaaucgugaacauuagcccccuuuccggaagcgcccagcacgucgaggagugcucuuguuauccucgcuaccccgaaguuagaugcgugugucgggacaacuggaagggcuccaaucgcccugugcuguauaucaacauggcugauuacagcgucgagucuagcuacgugugcuccggccucguuggggacacgcccagaaaugaugacucuuuuagcuccagcaacugucgggacccgaauaacgaacgcggagccccuggcgugaaagggugggcguucgaugacggaaaugaugucuggaugggcagaaccauucggaacgacucucgcuccggguaugagacauuuagagugguuaauggauggaccacagccaacagcaagucucagaucaauagacaggugauugucgauuccgaaagcugguccggcuacucuggcaucuucagcguggaggggaaaaacugcaucaauagauguuuuuaugucgagcugauucgcggacggccccaagaaccuagagugugguggaccuccaacucuaucauuguuuucugcggcacgagcgggacauacggaaccggcuccuggcccgacggggcuaauaucaacuuuaugcccauuuga

SEQ ID NO: 215662 - RNA, 1410 nt, Artificial Sequence
  derived and/or modified CDS sequence (opt5) from neuraminidase__InfluenzaA__AGQ81812
augaaccccaaucagaagaucauuaccaucggcagcgugucccugacaauugccacgaucugcuuccucaugcaaauugcuauccuggucaccacaaucacccuucacuuuaaacagaacgaguguucuauuccuagcaauaaccagguugugccgugcgaacccaucauuguggagagaaauaucacagaaauugucuaccugaacaauaccacaaucgagaaggaacucuguccuaaacugaccgaguaucgggacugguccaagccccagugccaaauuacgggguucgccccuuuuucuaaagauaacagcauccgccuuuccgcgggaggcgacaucugggugaccagagagcccuacguuucuuguagcccuaauaagugcuaucaguucgcucuggggcagggaacaacccucgauaacaagcauuccaauggcacaauucacgaccggaucccgcaucgcacccugcugaugaacgaacucggggugcccuuucaccugggaacgaaacaggucuguauugccuggucuagcuccagcugccaugauggcaaggccuggcuucacguguguguuacaggcgacgauagaaaugcuaccgccucuuucaucuacgacgggaugcugguggauuccauuggaagcuggucucaaaacauccuccggacacaggaguccgaaugcgucuguaucaaugggaccugcaccguggugaugacagacggcagcgcuuccggacgcgccgauacgcggauucuguuuaucaaagagggcaagauuguccacguuucuccucuuagcggguccgcgcagcauaucgaggaaugcagcuguuaucccagauacccugacgugcgcugcguguguagagauaacuggaaaggaucuaaccggcccauuaucgacaucaaugucgccgacuauuccauugauagcucuuacgugugcagcggccugguuggcgacaccccgcgcaacgaugacuccucuagcaauuccaacuguaaggauccuaauaacgagagagggaaucccggagugaagggcugggcuuucgacuacgggaacgaugucuggaugggacggacaaucagcaaagacucucgcuccggcuaugaaaccuuuagagugauugggggauggacaaccgccaauagcaagucucagguuaaccggcaagugaucgucgauaauaacaauugguccggcuacagcggcauuuucuccguggaggggaaaucuugcaucaacagauguuuuuaugucgaacucauucgcggacggccucaggagacgagagugugguggacaagcaauuccaucguuguguucugcggcaccucugggaccuacggaacaggcagcuggcccgacggggcuaacaucaacuuuaugcccauuuga

SEQ ID NO: 215663 - RNA, 1401 nt, Artificial Sequence
  derived and/or modified CDS sequence (opt5) from neuraminidase__InfluenzaA__AGQ81814
augaaccccaaucagaagaucauugccaucggcagcgugucccugaccauugcuaucaugugcuuccucaugcaaauugccauccugacaacgaccaugacacuucacuuuaaacagaacgaguguucuaauccuagcaacaaucaggucguuccgugcgaacccauccugauugagagaaacaccgugcaucucaauuccacaaccaucgaaaaggagguguguccuaaagucgcggaauacaagaacuggucuaaaccccagugccaaauuacaggguucgcuccuuuuagcaaggacaauuccauccggcugucugccggaggcgauauuugggugacccgcgagcccuauguuagcuguucccuugggaagugcuaccaguucgcccugggacagggcacgacccucaaaaacaaucacagcaacgggacaacccaugacagaacaccucaccggacccugcugaugaaugagcucggagugccguuucaucugggcacgaagcaggucuguaucgcuuggucuuccagcucuugcuaugauggcaaagccuggcuucacauuugugugacaggggacgauaagaacgcuaccgccuccaucaucuacgacggaaugcugguugauagcauuggcucuugguccaaaaauauccuccgcacacaagaaagcgagugcguguguauuaacgggaccugcgcggucgugaugaccgacggauccgccucuggcaaggcugauacaagaauccuguucauucgggaagggaagaucaucaacauuagcccccuuuccggaagcgcccagcacguggaggagugcucuuguuauccucgcuaccccgaagucagaugcguuugucgggacaauuggaaaggcuccaaccgcccugugcuguauaucaauauggcugauuacagcguggagucuagcuacgucugcuccggccucgugggggacacgcccagaaacgaugacucuagcuccagcucuaauugucgggacccgaacaaugaacgcggagccccuggcguuaaggggugggcguuugaugacggaaacgauguguggaugggcagaaccauucggaauaacucccgcagcggguaugagacauucagagucgugaauggauggaccacagccaacucuaaaucccagaucaaucggcagguuauuguggacagcgaaaacugguccggcuacucuggcaucuuuagcgucgaggggaagaauugcaucaacagauguuucuauguggagcugauucgcggacggccccaagaaccuagagucugguggaccuccaacucuaucauuguguuuugcggcacgagcgggacauacggaaccggcuccuggcccgauggggcuaauaucaacuucaugcccauuuga

SEQ ID NO: 215664 - RNA, 1401 nt, Artificial Sequence
  derived and/or modified CDS sequence (opt5) from neuraminidase__InfluenzaA__AGQ81815
augaaccccaaucagaagaucauugccaucggcagcgugucccugaccauugcuaucauuugcuuccucaugcaaaucgccauccugacaacgaccaugacacuucacuuuaaacagaacgaguguucuaauccuagcaacaaucaggucguuccgugcgaacccauucugaucgagagaaacaccgugcaucucaauuccacaaccauugaaaaggagguguguccuaaagucgcggaauacaagaacuggucuaaaccccagugccaaaucacaggguucgcuccuuuuagcaaggacaauuccauucggcugucugccggaggcgauaucugggugacccgcgagcccuauguuagcuguucccuugggaagugcuaccaguucgcccugggacagggcacgacccucaaaaacaagcacagcaaugggacaacccaugacagaacaccucaccggacccugcugaugaacgagcucggagugccguuucaucugggcacgaaacaggucuguauugcuuggucuuccagcucuugcuaugauggcaaggccuggcuucacaucugugugacaggggacgauaaaaaugcuaccgccuccaucauuuacgacggaaugcugguugauagcaucggcucuugguccaagaacauucuccgcacacaagaaagcgagugcguguguaucaaugggaccugcgcggucgugaugaccgacggauccgccucuggcaaggcugauacacggauucuguucauccgggaagggaaaaucauuaacaucagcccccuuuccggaagcgcccagcacguggaggagugcucuuguuauccucgcuaccccgaagucagaugcguuugucgggacaacuggaagggcuccaaucgcccugugcuguauauuaacauggcugauuacagcguggagucuagcuacgucugcuccggccucgugggggacacgcccagaaaugaugacucuagcuccagcucuaacugucgggacccgaauaacgaacgcggaaccccuggcguuaaagggugggccuuugaugacggaaaugauguguggaugggcagaacaauccggaacgacucccgcagcggguaugagaccuucagagucauuaauggauggacaaccgcgaacucuaagucccagaucaauagacaggugaucguugauagcgaaaacugguccggcuacucuggcauuuuuagcguggaggggaaaaauugcaucaacagauguuucuaugucgagcugauucgcggacggccccaagaaccuagagugugguggacguccaauucuaucauugucuuuugcggcacaagcgggaccuacggaaccggcuccuggcccgacggggccaacaucaacuauaugcccauuuga

SEQ ID NO: 215665 - RNA, 1401 nt, Artificial Sequence
  derived and/or modified CDS sequence (opt5) from neuraminidase__InfluenzaA__AGQ81816
augaaccccaaucagaagaucauugccaucggcagcgugucccugaccauugcuaucauuugcuuccucaugcaaaucgccauccugacaacgaccaugacacuucacuuuaaacagaacggguguucuaauccuagcaacaaucaggucguuccgugcgagcccauucugaucgaaagaaacaccgugcaucucaauuccacaaccauugagaaggaaguguguccuaaagucgcggaguacaagaacuggucuaaaccccagugccaaaucacaggauucgcuccuuuuagcaaggacaauuccauucggcugucugccggcggggauaucugggugacccgcgaacccuauguuagcuguucccuuggaaagugcuaccaguucgcccugggccaggggacgacccucaaaaacaagcacagcaauggaacaacccaugacagaacaccucaccggacccugcugaugaacgagcucggcgugccguuucaucugggcacgaaacaggucuguauugcuuggucuuccagcucuugcuaugaugggaaggccuggcuucacaucugugugacaggagacgauaaaaaugcuaccgccuccaucauuuacgacggcaugcugguugauagcaucgggucuugguccaagaacauucuccgcacacaagagagcgaaugcguguguaucaauggaaccugcgcggucgugaugaccgacggcuccgccucugggaaggcugauacacggauucuguucauccgggagggaaaaaucauuaacaucagcccccuuuccggcagcgcccagcacguggaagagugcucuuguuauccucgcuaccccgaggucagaugcguuugucgggacaacuggaagggcuccaaucgcccugugcuguauauuaacauggcugauuacagcguggaaucuagcuacgucugcuccgggcucgugggagacacgcccagaaaugaugacucuagcuccagcucuaacugucgggacccgaauaacgagcgcggcaccccugggguuaaaggaugggccuuugaugacggcaaugauguguggauggggagaacaauccggaacgacucccgcagcggauaugaaaccuucagagucauuaauggcuggacaaccgcgaacucuaagucccagaucaauagacaggugaucguugauagcgagaacugguccggcuacucugggauuuuuagcguggaaggcaaaaauugcaucaacagauguuucuaugucgagcugauucgcggacggccccaagagccuagagugugguggacguccaauucuaucauugucuuuugcgggacaagcggaaccuacggcaccggguccuggcccgacggcgccaacaucaacuauaugcccauuuga

SEQ ID NO: 215666 - RNA, 1401 nt, Artificial Sequence; identical to SEQ ID NO: 215664
  derived and/or modified CDS sequence (opt5) from neuraminidase__InfluenzaA__AGQ81817

SEQ ID NO: 215667 - RNA, 1401 nt, Artificial Sequence; identical to SEQ ID NO: 215664
  derived and/or modified CDS sequence (opt5) from neuraminidase__InfluenzaA__AGQ81818

SEQ ID NO: 215668 - RNA, 1401 nt, Artificial Sequence; identical to SEQ ID NO: 215664
  derived and/or modified CDS sequence (opt5) from neuraminidase__InfluenzaA__AGQ81819

SEQ ID NO: 215669 - RNA, 1401 nt, Artificial Sequence
  derived and/or modified CDS sequence (opt5) from neuraminidase__InfluenzaA__AGQ81820
augaaccccaaucagaagaucauugccaucggcagcgugucccugaccauugcuaucauuugcuuccucaugcaaaucgccauccugacaacgaccaugacacuucacuuuaaacagaacgaguguucuaauccuagcaacaaucaggucguuccgugcgaacccauucugaucgagagaaacaccgugcaucucaauuccacaaccauugaaaaggagguguguccuaaagucgcggaauacaagaacuggucuaaaccccagugccaaaucacaggguucgcuccuuuuagcaaggacaauuccauucggcugucugccggaggcgauaucugggugacccgcgagcccuauguuagcuguucccuugggaagugcuaccaguucgcccugggacagggcacgacccucaaaaacaagcacagcaaugggacaacccaugacagaacaccucaccggacccugcugaugaacgagcucggagugccguuucaucugggcacgaaacaggucuguauugcuuggucuuccagcucuugcuaugauggcaaggccuggcuucacaucugugugacaggggacgauaaaaaugcuaccgccuccaucauuuacgacggaaugcugguugauagcaucggcucuugguccaagaacauucuccgcacacaagaaagcgagugcguguguaucaaugggaccugcgcggucgugaugaccgacggauccgccucuggcaaggcugauacacggauucuguucaucagagaagggaaaaucauuaacaucagcccccuuuccggaagcgcccagcacguggaggagugcucuuguuauccucgcuaccccgaagucagaugcguuugucgggacaacuggaagggcuccaaucgcccugugcuguauauuaacauggcugauuacagcaucgagucuagcuacgugugcuccggccucgucggggacacgcccagaaaugaugacucuagcuccagcucuaacugucgggacccgaauaacgaacgcggaaccccuggcgugaaagggugggccuuugaugacggaaaugauguuuggaugggcagaacaauucggaacgacucccgcagcggguaugagaccuucagagugaucaauggauggacaaccgcgaacucuaagucccagaucaaucggcaggucauuguggauagcgaaaacugguccggcuacucuggcaucuuuagcguugaggggaaaaauugcauuaacagauguuucuauguggagcugauccgcggacggccccaagaaccuaaggucugguggacguccaauucuauuaucguguuuugcggcacaagcgggaccuacggaaccggcuccuggcccgacggggccaacauuaacuucaugcccaucuga

SEQ ID NO: 215670 - RNA, 1401 nt, Artificial Sequence
  derived and/or modified CDS sequence (opt5) from neuraminidase__InfluenzaA__AGQ81822
augaaccccaaucagaagaucauugccaucggcagcgugucccugaccauugcuaucauuugcuuccucaugcaaaucgccauccugacaacgaccaugacacuucacuuuaaacagaacgaguguucuaauccuagcaacaaucaggucguuccgugcgaacccauucugaucgagagaaacaccgugcaucucaauuccacaaccauugaaaagaaaguguguccuaaggucgcggaguacaaaaacuggucuaagccccagugccaaaucacaggguucgcuccuuuuagcaaggacaauuccauucggcugucugccggaggcgauaucugggugacccgcgaacccuauguuagcuguucccuugggaaaugcuaccaguucgcccugggacagggcacgacccucaagaacaaacacagcaaugggacaacccaugacagaacaccucaccggacccugcugaugaacgagcucggagugccguuucaucugggcacgaagcaggucuguauugcuuggucuuccagcucuugcuaugauggcaaagccuggcuucacaucugugugacaggggacgauaagaaugcuaccgccuccaucauuuacgacggaaugcugguugauagcaucggcucuugguccaagaacauucuccgcacacaagagagcgaaugcguguguaucaaugggaccugcgcggucgugaugaccgacggauccgccucuggcaaagcugauacacggauucuguucauccgggaggggaagaucauuaacaucagcccccuuuccggaagcgcccagcacguggaagagugcucuuguuauccucgcuaccccgaggucagaugcguuugucgggacaacuggaaaggcuccaaucgcccugugcuguauauuaacauggcugauuacagcguggaaucuagcuacgucugcuccggccucgugggggacacgcccagaaaugaugacucuagcuccagcucuaacugucgggacccgaauaacgagcgcggaaccccuggcguuaaggggugggccuuugaugacggaaaugauguguggaugggcagaacaauccggaacgacucccgcagcggguaugaaaccuucagagucauuaauggauggacaaccgcgaacucuaaaucccagaucaauagacaggugaucguugauagcgagaacugguccggcuacucuggcauuuuuagcguggaagggaagaauugcaucaacagauguuucuaugucgagcugauucgcggacggccccaagagccuagagugugguggacguccaauucuaucauugucuuuugcggcacaagcgggaccuacggaaccggcuccuggcccgacggggccaacaucaacuauaugcccauuuga

SEQ ID NO: 215671 - RNA, 1401 nt, Artificial Sequence
  derived and/or modified CDS sequence (opt5) from neuraminidase__InfluenzaA__AGQ81823
augaaccccaaucagaagaucauugccaucggcagcgugucccugaccauugcuaucauuugcuuccucaugcaaaucgccauccugacaacgaccaugacacuucacuuuaaacagaacgaguguucuaauccuagcaacaaucaggucguuccgugcgaacccauucugaucgagagaaacaccgugcaucucaauuccacaaccauugaaaaggagguguguccuaaagucgcggaauacaagaacuggucuaaaccccagugccaaaucacaggguucgcuccuuuuagcaaggacaauuccauucggcugucugccggaggcgauaucugggugacccgcgagcccuauguuagcuguucccuugggaagugcuaccaguucgcccugggacagggcacgacccucaaaaacaagcacagcaaugggacaacccaugacagaacaccucaccggacccugcugaugaacgagcucggagugccguuucaucugggcacgaaacaggucuguauugcuuggucuuccagcucuugcuaugauggcaaggccuggcuucacaucugugugacaggggacgauaaaaaugcuaccgccuccaucauuuacgacggaaugcugguugauagcaucggcucuugguccaagaacauucuccgcacacaagaaagcgagugcguguguaucaaugggaccugcgcggucgugaugaccgacggauccgccucuggcaaggcugauacacggauucuguucaucagagaagggaaaaucauuaacaucagcccccuuuccggaagcgcccagcacguggaggagugcucuuguuauccucgcuaccccgaagucagaugcguuugucgggacaacuggaagggcuccaaucgcccugugcuguauauuaacauggcugauuacagcguggagucuagcuacgucugcuccggccucgugggggacacgcccagaaaugaugacucuagcuccagcucuaacugucgggacccgaauaacgaacgcggagccccuggcguuaaagggugggcguuugaugacggaaaugauguguggaugggcagaaccauccggaacgacucccgcagcggguaugagacauucagagucgugaauggauggaccacagccaacucuaagucccagauuaaucggcagguuaucguggauagcgaaaacugguccggcuacucuggcaucuuuagcgucgaggggaaaaauugcauuaacagauguuucuauguggagcugauccgcggacggccccaagaaccuagagucugguggaccuccaauucuauuaucguguuuugcggcacgagcgggacauacggaaccggcuccuggcccgacggggcuaacauuaacuucaugcccaucuga

SEQ ID NO: 215672 - RNA, 1401 nt, Artificial Sequence; identical to SEQ ID NO: 215671
  derived and/or modified CDS sequence (opt5) from neuraminidase__InfluenzaA__AGQ81824

SEQ ID NO: 215673 - RNA, 1401 nt, Artificial Sequence; identical to SEQ ID NO: 215671
  derived and/or modified CDS sequence (opt5) from neuraminidase__InfluenzaA__AGQ81825

SEQ ID NO: 215674 - RNA, 1401 nt, Artificial Sequence
  derived and/or modified CDS sequence (opt5) from neuraminidase__InfluenzaA__AGQ81831
augaaccccaaucagaagauccuggccauuggcagcgugucccucaccaucgcuauuaucugcuuccugaugcaaauugccauccuuacaacgaccaugacacugcacuuuaaacagaacgaguguucuaauccuagcaacaaucaggucguuccgugcgaacccauccucauugagagaaacaccgugcaucuuaauuccacaaccaucgaaaaggagguguguccuaaagucgcggaauacaagaacuggucuaaaccccagugccaaauuacaggguucgcuccuuuuagcaaggacaauuccauccggcugucugccggaggcgauauuugggugacccgcgagcccuauguuagcuguucccuggggaagugcuaccaguucgcccucggacagggcacgacccugaaaaacaagcacagcaaugggacaacccaugacagaacaccucaccggacccugcucaugaacgagcugggagugccguuucaucuuggcacgaaacaggucuguaucgcuuggucuuccagcucuugcuaugauggcaaggccuggcugcacauuugugugacaggggacgauaaaaaugcuaccgccuccaucaucuacgacggaaugcucguugauagcauuggcucuugguccaagaacauccugcgcacacaagaaagcgagugcguguguauuaaugggaccugcgcggucgugaugaccgacggauccgccucuggcaaggcugauacaagaauccuuuucauucgggaagggaaaaucgugaacaucagcccccuguccggaagcgcccagcacgucgaggagugcucuuguuauccucgcuaccccgaaguuagaugcgugugucgggacaacuggaagggcuccaaucgcccugugcucuauauuaacauggcugauuacagcgucgagucuagcuacgugugcuccggccugguuggggacacgcccagaaaugaugacucuuuuagcuccagcaacugucgggacccgaauaacgaacgcggagccccuggcgugaaagggugggcguucgaugacggaaaugaugucuggaugggcagaaccauccggaacgacucucgcuccggguaugagacauuuagagugguuaauggauggaccacagccaacagcaagucucagauuaauagacaggugaucgucgauuccgaaagcugguccggcuacucuggcauuuucagcguggaggggaaaaacugcaucaaucgguguuuuuaugucgagcugauccgcggacggccccaagaaccuagagugugguggaccuccaacucuauuaucguuuucugcggcacgagcgggacauacggaaccggcuccuggcccgacggggcuaauauuaacuuuaugcccaucuga

SEQ ID NO: 215675 - RNA, 1401 nt, Artificial Sequence; identical to SEQ ID NO: 215664
  derived and/or modified CDS sequence (opt5) from neuraminidase__InfluenzaA__AGQ81837

SEQ ID NO: 215676 - RNA, 1401 nt, Artificial Sequence; identical to SEQ ID NO: 215664
  derived and/or modified CDS sequence (opt5) from neuraminidase__InfluenzaA__AGQ81838

SEQ ID NO: 215677 - RNA, 1401 nt, Artificial Sequence; identical to SEQ ID NO: 215671
  derived and/or modified CDS sequence (opt5) from neuraminidase__InfluenzaA__AGQ81839

SEQ ID NO: 215678 - RNA, 1401 nt, Artificial Sequence; identical to SEQ ID NO: 215671
  derived and/or modified CDS sequence (opt5) from neuraminidase__InfluenzaA__AGQ81840

SEQ ID NO: 215679 - RNA, 1401 nt, Artificial Sequence; identical to SEQ ID NO: 215664
  derived and/or modified CDS sequence (opt5) from neuraminidase__InfluenzaA__AGQ81841

SEQ ID NO: 215680 - RNA, 1410 nt, Artificial Sequence
  derived and/or modified CDS sequence (opt5) from neuraminidase__InfluenzaA__AGQ81843
augaaccccaaucagaagaucauuaccaucggcguggucaacacaacgcugagcaccauugcccuccugaucgggauuggaaaucuuaucuucaacacaguuauccacgagaaaauuggcgugcaucaaaccguggucuacccuacaaucaccccgcccgugauuccuaauugcuccgacacaaccaucacguauaacaauaccguugugaacaauauuacaaccacaaucauuaacaaggcugaaaaacaguuuaagcccucucugccucucugucccuucagaggguuuuucccuuuucacaaagauaaugccauccggcugggagagaacaaggacgucaucgugacccgcgaaccguacguuagcugcgauaaugacgauuguugguccuucgcgcuugcucagggcgcccugcucgggacgaagcauucuaacggaacaauuaaagacagaacccccuaucggagccugauccgcuuuccuauuggcacagcccccgugcugggcaauuacaaggagaucugcgucgcuugguccucuagcuccuguuucgaugggaaagaauggaugcacgugugcaugaccggaaacgacaacgaugccagcggccagauuaucuaugcugggaagaugaccgacucuaucaaauccuggagacgggauauucuccgcacacaagagagcgagugucagugcaucgacggaacguguauuguggccgucaccgauggcccugcggccucuuccgcugaccauagaaucuacuggauucgggaagggaagaucaucaaguaugaggacauucccaaaacaaagauccagcaccuggaagagugcagcuguuacguugauaccgacguguacugcauuugccgcgauaauuggaaaggaucuaacagaccguggaugcggaucaauaacgagacaauucuugaaaccggcuauguguguuccaaguuucacagcgacacgccucgccccgccgauccuuccacagucucuugcgacagccccuccaauaucaacggcgggcccggagugaaaggcuucggguuuagagcuggaaaugauguuuggcugggccggaccgugagcaccacagggcgcucuggauucgaggucauuaaggugaccgaaggcuggaucaacucccucaaucaugccaaaagcguuacacagacgcuggugucuaacaaugacuggagcggcuacuccgggucuuuuaucgucgagaacaauggauguuuccaaccuugcuucuauauugaacuuaucagaggccggccgaacagaaaugaugacgugagcuggaccuccaacagcauugucacauuuugugggcuggauaacgagcccggaucuggcaauuggccugacggguccaacaucggcuucaugcccaaguga

SEQ ID NO: 215681 - RNA, 1410 nt, Artificial Sequence
  derived and/or modified CDS sequence (opt5) from neuraminidase__InfluenzaA__AGQ81845
augaaccccaaucagaagaucauuaccaucggcguggucaacacaacgcugagcaccauugcccuccugaucgggauuggaaaucuuaucuucaacacaguuauccacgagaaaauuggcgugcaucaaaccgugaucuacccuacaauuaccuccccggucgugcccaauugcucugacacaaccaucacguauaacaauaccguugugaacaauauuacaaccacagucaucaacaaggcugaaaaacacuuuaagccuagccugccccucuguccuuucaaaggguuuuuccccuuucauaaggauaaugccauuagacugggagagaacaaggacgugaucguuacccgggaaccuuacguguccugcgauaaugacgauuguuggucuuucgcgcuugcucagggcgcccugcucgggacgaaacacagcaacggaacaaucaaggaccgcaccccguauagaucccugauucgguuucccaucggcacagccccuguccugggcaauuacaaagagauuugcguggcuuggucuagcuccagcuguuucgaugggaaggaauggaugcaugugugcaugaccggaaacgacaacgaugccucuggccagaucauuuaugcugggaaaaugaccgacuccaucaagagcuggcgcagagauauccuccggacacaggagucugagugucaaugcauugacggaacguguaucgucgccguuaccgauggccccgcggccaauuccgcugaccaccgcauuuacuggaucagagaagggaagauuaucaaauaugagaacaucccuaagacaaaaauucagcaccuggaagagugcagcuguuacguggacaccgauguguacugcaucugccgggacaauuggaagggaucuaaccgccccuggaugagaauuaauaacgagacaauccuugaaaccggcuaugucuguuccaaauuucauagcgauacgccgcggccugccgaccccuccacagugucuugcgauagcccuuccaauauuaacggcgggcccggaguuaagggcuucggguuucgcaccggaaaugacguguggcugggcagaaccgucagcacaaccgggcggucuggauucgaggugaucaaaguuacagaaggcuggauuaacucccucaaucacgcuaagagcgugacgcagacccuggucucuaacagcgauugguccggcuacucugggagcuuuaucguggagaauaacggauguuuccagcccugcuucuauaucgaacuuauucgcggcagaccuaauaagaacgacgaugucuccuggacaagcaacucuaucgugaccuuuugugggcuggacaaugagccgggauccggcaacuggcccgaugggagcaauauuggcuucaugccuaaauga

SEQ ID NO: 215682 - RNA, 1410 nt, Artificial Sequence; identical to SEQ ID NO: 215681
  derived and/or modified CDS sequence (opt5) from neuraminidase__InfluenzaA__AGQ81846

SEQ ID NO: 215683 - RNA, 1410 nt, Artificial Sequence; identical to SEQ ID NO: 215681
  derived and/or modified CDS sequence (opt5) from neuraminidase__InfluenzaA__AGQ81847

SEQ ID NO: 215684 - RNA, 1410 nt, Artificial Sequence
  derived and/or modified CDS sequence (opt5) from neuraminidase__InfluenzaA__AGQ81848
augaaccccaaucagaagaucauuaccaucggcguggucaacacaacgcugagcaccauugcccuccugaucgggauuggaaaucuuaucuucaacacaguuauccacgagaaaauuggcgugcaucaaaccgugaucuacccuacaauuaccuccccggucgugcccaauugcucugacacaaccaucacguauaacaauaccguugugaacaauauuacaaccacagucaucaacaaggcugaaaaacacuuuaagccuagccugccccucuguccuuucaaaggguuuuuccccuuucauaaggauaaugccauuagacugggagagaacaaggacgugaucguuacccgggaaccuuacguguccugcgauaaugacgauuguuggucuuucgcgcuugcucagggcgcccugcucgggacgaaacacagcaacggaacaaucaaggaccgcaccccguauagaucccugauucgguuucccaucggcacagccccuguccugggcaauuacaaagagauuugcguggcuuggucuagcuccagcuguuucgaugggaaggaauggaugcaugugugcaugaccggaaacgacaacgaugccucuggccagaucauuuaugcugggaaaaugaccgacuccaucaagagcuggcgcagagauauccuccggacacaggagucugagugucaaugcauugacggaaucuguauugucgccguuacggauggccccgcggccaauuccgcugaccaccgcaucuacuggauuagagaagggaagaucaucaaauaugagaacauuccuaagaccaaaauccagcaccuggaagagugcagcuguuacguggacacagauguguacugcauuugccgggacaauuggaagggaucuaaccgccccuggaugagaaucaauaacgagaccauucuugaaacaggcuaugucuguuccaaauuucauagcgauaccccgcggccugccgaccccuccacggugucuugcgauagcccuuccaauaucaacggcgggcccggaguuaagggcuucggguuucgcacaggaaaugacguguggcugggcagaaccgucagcaccacagggcggucuggauucgaggugauuaaaguuaccgaaggcuggaucaacucccucaaucacgcuaagagcgugacacagacgcuggucucuaacagcgauugguccggcuacucugggagcuuuaucguggagaauaacggauguuuccagcccugcuucuauauugaacuuauccgcggcagaccuaauaagaacgacgaugucuccuggaccagcaacucuauugugacauuuugugggcuggacaaugagccgggauccggcaacuggcccgaugggagcaauaucggcuucaugccuaaauga

SEQ ID NO: 215685 - RNA, 1410 nt, Artificial Sequence
  derived and/or modified CDS sequence (opt5) from neuraminidase__InfluenzaA__AGQ81850
augaaccccaaucagaagaucauuaccaucggcguggucaacacaacgcugagcaccauugcccuccugaucgggauuggaaaucuuaucuucaacacaguuauccacgagaaaauuggcgugcaucaaaccgugaucuacccuacaauuaccuccccggucgugcccaauugcucugacacaaccaucacguauaacaauaccguugugaacaauauuacaaccacagucaucaacaaggcugaaaaacacuuuaagccuagccugccccucuguccuuucaaaggguuuuuccccuuucauaaggauaaugccauuagacugggagagaacaaggacgugaucguuacccgggaaccuuacguguccugcgauaaugacgauuguuggucuuucgcgcuugcucagggcgcccugcucgggacgaaacacagcaacggaacaaucaaggaccgcaccccguauagaucccugauucgguuucccaucggcacagccccuguccugggcaauuacaaagagauuugcguggcuuggucuagcuccagcuguuucgaugggaaggaauggaugcaugugugcaugaccggaaacgacaacgaugccaccggccagaucauuuaugcugggaaaaugacagacucuaucaaguccuggcgcagagauauccuccggacgcaggagagcgagugucaaugcauugacggaaccuguaucgucgccguuacagauggccccgcggccaauucugcugaccaccgcauuuacuggaucagagaagggaagauuaucaaauaugagaacaucccuaagaccaaaauucagcaccuggaagagugcuccuguuacguggacacagauguguacugcaucugccgggacaauuggaagggaagcaaccgccccuggaugagaauuaauaacgagaccauccuugaaacgggcuaugucuguucuaaauuucauuccgauacaccgcggccugccgaccccagcaccguguccugcgauucuccuagcaauauuaacggcgggcccggaguuaagggcuucggguuucgcaccggaaaugacguguggcugggcagaacagucuccaccacagggcggagcggauucgaggugaucaaaguuacggaaggcuggauuaacucucucaaucacgcuaaguccgugacccagacacuggucagcaacucugauuggagcggcuacuccgggucuuuuaucguggagaauaacggauguuuccagcccugcuucuauaucgaacuuauucgcggcagaccuaauaagaacgacgaugucagcuggaccuccaacagcaucgugacauuuugugggcuggacaaugagccgggaucuggcaacuggcccgauggguccaauauuggcuucaugccuaaauga

SEQ ID NO: 215686 - RNA, 1410 nt, Artificial Sequence
  derived and/or modified CDS sequence (opt5) from neuraminidase__InfluenzaA__AGQ81852
augaaccccaaucagaagaucauuaccaucggcguggucaacacaacgcugagcaccauugcccuccugaucgggauuggaaaucuuaucuucaacacaguuauccacgagaaaauuggcgugcaucaaaccgugacauacccuaccaucacauccccggucgugcccaauugcucugacaccacgauuaccuauaacaauacaguugugaacaauaucaccacaaccgucauuaacaaggcugaaaaacacuuuaagccuagccugccccucuguccuuucaaaggguuuuuccccuuucauaaggauaaugccaucagacugggagagaacaaggacgugauuguuacgcgggaaccuuacguguccugcgauaaugacgauuguuggucuuucgcgcuugcucagggcgcccugcucgggacaaaacacagcaacggaaccaucaaggaccgcacaccguauagaucccugauccgguuucccauuggcaccgccccuguccugggcaauuacaaagagaucugcguggcuuggucuagcuccagcuguuucgaugggaaggaauggaugcaugugugcaugaccggaaacgacaacgaugccacaggccagauuaucuaugcugggaaaaugacggacucuauuaaguccuggcgcagagauauccuccggacccaggagagcgagugucaaugcaucgacggaacauguauugucgccguuaccgauggccccgcggccaauucugcugaccaccgcaucuacuggauuagagaagggaagaucauuaaauaugagaacaucccuaagacaaaaauccagcaccuggaagagugcuccuguuacguggacaccgauguguacugcauuugccgggacaauuggaagggaagcaaccgccccuggaugagaaucaauaacgagacgauucuugaaacaggcuaugucuguucuaaauuucauuccgauaccccgcggccugccgaccccagcaccguguccugcgauucuccuagcaauaucaacggcgggcccggaguuaagggcuucggguuucgcacaggaaaugacguguggcugggcagaaccgucuccacaacggggcggagcggauucgaggugauuaaaguuaccgaaggcuggaucaacucucucaaucacgcuaaguccgugacacagacccuggucagcaacucugauuggagcggcuacuccgggucuuuuauuguggagaauaacggauguuuccagcccugcuucuauaucgaacuuauccgcggcagaccuaaucggaacgacgaugucagcuggacauccaacagcauugugaccuuuugugggcuggacaaugagccgggaucuggcaacuggcccgauggguccaauaucggcuucaugccuaaguga

SEQ ID NO: 215687 - RNA, 1410 nt, Artificial Sequence
  derived and/or modified CDS sequence (opt5) from neuraminidase__InfluenzaA__AGQ81853
augaaccccaaucagaagaucauuaccaucggcguggucaacacaacgcugagcaccauugcccuccugaucgggauuggaaaucuuaucuucaacacaguuauccacgagaaaauuggcgugcaucaaaccgugacauacccuaccaucacauccccggucgugcccaauugcucugacaccacgauuaccuauaacaauacaguugugaacaauaucaccacaaccgucauuaacaaggcugaaaaacacuuuaagccuagccugccccucuguccuuucaaaggguuuuuccccuuucauaaggauaaugccaucagacugggagagaacaaggacgugauuguuacgcgggaaccuuacguguccugcgauaaugacgauuguuggucuuucgcgcuugcucagggcgcccugcucgggacaaaacacagcaacggaaccaucaaggaccgcacaccguauagaucccugauccgguuucccauuggcaccgccccuguccugggcaauuacaaagagaucugcguggcuuggucuagcuccagcuguuucgaugggaaggaauggaugcaugugugcaugaccggaaacgacaacgaugccacaggccagauuaucuaugcugggaaaaugacggacucuauuaaguccuggcgcagagauauccuccggacccaggagagcgagugucaaugcaucgacggaacauguauugucgccguuaccgauggccccgcggccaauucugcugaccaccgcaucuacuggauuagagaagggaagaucauuaaauaugagaacaucccuaagacaaaaauccagcaccuggaagagugcuccuguuacguggacaccgauguguacugcauuugccgggacaauuggaagggaagcaaccgccccuggaugagaaucaauaacgagacgauucuugaaacaggcuaugucuguucuaaauuucauuccgauaccccgcggccugccgaccccagcaccguguccugcgauucuccuagcaauaucaacggcgggcccggaguuaagggcuucggguuucgcacaggaaaugacguguggcugggcagaaccgucuccacaacggggcggagcggauucgaggugauuaaaguuaccgaaggcuggaucaacucucucaaucacgcuaaguccgugacacagacccuggucagcaacucugauuggagcggcuacuccgggucuuuuauuguggagaauaacggauguuuccagcccugcuucuauaucgaacuuauccgcggcagaccuaauaagaacgacgaugucagcuggacauccaacagcauugugaccuuuugugggcuggacaaugagccgggaucuggcaacuggcccgauggguccaauaucggcuucaugccuaaauga

SEQ ID NO: 215688 - RNA, 1410 nt, Artificial Sequence; identical to SEQ ID NO: 215687
  derived and/or modified CDS sequence (opt5) from neuraminidase__InfluenzaA__AGQ81854

SEQ ID NO: 215689 - RNA, 1410 nt, Artificial Sequence; identical to SEQ ID NO: 215687
  derived and/or modified CDS sequence (opt5) from neuraminidase__InfluenzaA__AGQ81855

SEQ ID NO: 215690 - RNA, 1410 nt, Artificial Sequence; identical to SEQ ID NO: 215680
  derived and/or modified CDS sequence (opt5) from neuraminidase__InfluenzaA__AGQ81856

SEQ ID NO: 215691 - RNA, 1410 nt, Artificial Sequence
  derived and/or modified CDS sequence (opt5) from neuraminidase__InfluenzaA__AGQ81857
augaaccccaaucagaagaucauuaccaucggcguggucaacacaacgcugagcaccauugcccuccugaucgggauuggaaaucuuaucuucaacacaguuauccacgagaaaauuggcgugcaucaaaccguggucuacccuacaaucaccccgcccgugauuccuaauugcuccgacacaaccaucacguauaacaauaccguugugaacaauauuacaaccacaaucauuaacaaggcugaaaaacaguuuaagcccucucugccucucugucccuucagaggguuuuucccuuuucacaaagauaaugccauccggcugggagagaacaaggacgucaucgugacccgcgaaccguacguuagcugcgauaaugacgauuguugguccuucgcgcuugcucagggcgcccugcucgggacgaagcauucuaacggaacaauuaaagacagaacccccuaucggagccugauccgcuuuccuauuggcacagcccccgugcugggcaauuacaaggagaucugcgucgcuugguccucuagcuccuguuucgaugggaaagaauggaugcacgugugcaugaccggaaacgacaacgaugccagcggccagauuaucuaugcugggaagaugaccgacucuaucaaauccuggagacgggauauucuccgcacacaagagagcgagugucagugcaucgacggaacguguauuguggccgucaccgauggcccugcggccucuuccgcugaccauagaaucuacuggauucgggaagggaagaucaucaaguaugaggacauucccaaaacaaagauccagcaccuggaagagugcagcuguuacguugauaccgacguguacugcauuugccgcgauaauuggaaaggaucuaacagaccguggaugcggaucaauaacgagacaauucuugaaaccggcuauguguguuccaaguuucacagcgacacgccucgccccgccgauccuuccacagucucuugcgacagccccuccaauaucaacggcgggcccggagugaaaggcuucggguuuagagcuggaaaugauguuuggcugggccggaccgugagcaccacagggcgcucuggauucgaggucauuaaggugaccgaaggcuggaucaacucccucaaucaugccaaaagcguuacacagacgcuggugucuaacaaugacuggagcggcuacuccgggucuuuuaucgucgagagcaacggauguuuccaaccuugcuucuauauugaacuuaucagaggccggccgaauagaaacgaugacguguccuggaccagcaauucuauugucacauuuugugggcuggauaacgagcccggauccggcaacuggccugacgggagcaauaucggcuucaugcccaaguga

SEQ ID NO: 215692 - RNA, 1410 nt, Artificial Sequence
  derived and/or modified CDS sequence (opt5) from neuraminidase__InfluenzaA__AGQ81858
augaaccccaaucagaagaucauuaccaucggcguggucaacacaacgcugagcaccauugcccuccugaucgggguuggaaaucuuauuuucaacacagugauccacgagaaaaucggcgaccaucaaauuguggucuacccuaccacaaccgcuuccgugguuccgaauugcucugauacaaucauuaccuauaacaauacgguggucaacaauaucaccacaaccauuaucacaaaggaagagacccacuuuaaaagcucccugccccucuguccuuucagaggguuuuuccccuuucauaaggacaacgccauucggcugggagaaaauaaagaugugaucguuacgcgcgagccuuacgugucuugcgacaacgaugacuguuggagcuucgcgcuugcucagggcgcccugcucgggacaaagcacuccaauggaaccaucaaggauagaacacccuaucggucucugauucgcuuuccuaucggcaccgccccgguccugggcaacuacaaagaaauuugcguggcuuggagcuccagcucuuguuucgacgggaaggaguggaugcaugugugcaugaccggaaaugauaacgacgccuccggccagaucauguaugcugggaaaaugacagauagcauuaagucuuggagaaaagacauccuccggacgcaggaguccgaaugucaaugcaucgauggaaccuguauugucgccguuacagacggccccgcgaccaacagcgccgaccaccgcaucuacuggauuagagaggggaagaucauuaaguaugaaaauaucccuaaaacaaagauccagcaccuggaggagugcucuuguuacguggauauugacguguacugcgucugccgggauaacuggaaaggauccaaucgccccuggaugagaaucaacaaugaaaccauucuugagacgggcuauguguguagcaaguuucauuccgacacaccucggcccgcugauccgucuaccguuagcugcgacuccccuagcaacgugaauggcgggcccggagucaaaggcuucggguuuaagaccggaaacgauguguggcugggccgcacaguuucuaccuccgggagaagcggauucgaaaucauuaaagugacagagggcuggaucaauucuccuaaccacgccaagagcgucacgcagacccucguguccaauaacgacuggucuggcuacagcggguccuuuauugucgaaaauaacggauguuuccagcccugcuucuauaucgagcugauccggggccgccccaauaagaacgaugacgugagcuggacaucuaacuccauuguuaccuuuugugggcuugauaaugagccuggaagcggcaacuggccggacgggucuaauaucggcuucaugcccaaauga

SEQ ID NO: 215693 - RNA, 1410 nt, Artificial Sequence
  derived and/or modified CDS sequence (opt5) from neuraminidase__InfluenzaA__AGQ81859
augaaccccaaucagaagaucauuaccaucggcguggucaacacaacgcugagcaccauugcccuccugaucgggauuggaaaucuuaucuucaacacaguuauccacgagaaaauuggcgugcaucaaaccguggucugcccuacaaucaccccgcccgugguuccuaauuguuccgacacaaccauuacguacaacaauaccguggucaacaauaucacaaccacaauuaucaacaaggcugaaaaacaguuuaagucuagccugccccucugcccuuucagaggguuuuuccccuuucacaaagauaaugccauucggcugggagagaacaaggacgugaucguuacccgcgaaccuuauguguccugugauaaugacgauugcuggucuuucgcgcuugcucagggcgcccugcucgggacgaagcauagcaacggaacaaucaaagacagaaccccguaccggucccugauucgcuuucccaucggcacagccccuguccugggcaauuauaaggagauuuguguggcuuggucuagcuccagcugcuucgaugggaaagaauggaugcacaucuguaugaccggaaacgacaacgaugccucuggccagauuaucuacgcugggaagaugaccgacuccaucaaaagcuggagacgggauauucuccgcacacaagagucugagugccaguguaucgacggaacgugcauuguggccaucaccgauggccccgcggccuccagcgcugaccauagaauuuauuggauccgggaagggaagaucauuaaguacgagaauaucccuaaaacaaagauucagcaccuggaagaguguucuugcuaugucgacaucgauguuuacugcauuugucgcgacaacuggaaaggauccaauagacccuggaugcggaucaacaaugagaccauucuugaaacaggcuacgugugcagcaaguuucacuccgauaccccgcgcccugccgaccccucuacggugagcugugauuccccuagcaacaucaauggcgggcccggagucaaaggcuucggguuuagagcuggaaacgacguguggcugggccggacaguuucuaccaccgggcgcuccggauucgaggugaucaaggucacagaaggcuggauuaauagccucaaccaugccaaaucugugacccagacacugguuagcaauuccgauuggucuggcuauagcggguccuuuaucguggagaacaauggaugcuuccaacccuguuucuacauugaacuuaucagaggccggccuaacagaaaugacgaugucagcuggacgucuaacuccauugugaccuuuugcgggcuggacaacgagccgggaagcggcaauuggcccgaugggucuaacaucggcuucaugccuaaguga

SEQ ID NO: 215694 - RNA, 1413 nt, Artificial Sequence
  derived and/or modified CDS sequence (opt5) from neuraminidase__InfluenzaA__AGQ81860
augaaccccaaucagaagaucauuugcaucagcgccaccggcaugacacuguccguggucucucuccugauugggaucgcuaaccuuggacugaauauuggccuccacuacaaaguuggggacacgccugaugugagcaucccgaacaugaaugagaccaacuccacaaccacaaucauuaauaacaauacccaaaacaauuucacaaacaucaccaauauuaucgugaacaagaaugaagagaaaacguuucugaaccuuaccaagccccugugugaagucaacucuuggcauauucucagcaaagacaaugccaucagaauuggagaggaugcgcacauccuggugacacgggaaccuuaucuguccugcgacccccagggcugucgcauguucgcucucucucaggggaccacacugagaggacggcaugccaacggcaccauccacgaucgcagcccuuuuagagcccuuguuuccugggagaugggccaggcucccagcccuuacaaugugaaggucgagugcgugggguggucuuccacgagcugucaugacggaauuucucggauguccaucugcaugagcggcccgaacaauaacgccucugcuguugugugguaugggggacgccccgucacagaaauuccuuccugggccggcaauauccugagaacccaagagagcgaaugugugugccacaaggggauuugucccguggucaugacagauggaccugcgaacaaucgggccgcuaccaaaaucaucuacuucaaggagggcaaaauucagaagaucgaggaacucgccggcuccgcucagcacauugaggaaugcucuuguuauggggccguugaggugaucaaaugcauuugccgcgacaacuggaagggagcgaauagacccgugaucaccaucaacccggaaaugaugacacauacgagcaaguaccuguguuccaaaguccuuaccgauacaagccggccuaaugaccccaccaacggcaauugcgaugccccuauuacagggggaucucccgaccccggcgugaagggguuugcuuuccuggauggagagaacuccuggcucggccgcaccaucagcaaagacucuagaagcggcuaugagaugcugaagguuccuaacgccgaaacggacacacaguccgggccgaccucucaccaagugauugucaauaaccagaauuggagcggauacuccggcgcuuuuaucgauuacugggccaacaaagaguguuucaaucccugcuuuuauguggaacugauucgggggcgcccuaaggagagcucuguucucuggaccuccaacagcaucguggcccuguguggaucuaaagaaagacuuggcuccuggagcuggcaugacggggcugagauuaucuacuucaaguga

SEQ ID NO: 215695 - RNA, 1413 nt, Artificial Sequence
  derived and/or modified CDS sequence (opt5) from neuraminidase__InfluenzaA__AGQ81861
augaaccccaaucagaagaucauuugcaucagcgccaccggcaugacacuguccguggucucucuccugauugggaucgcuaaccuuggacugaauauuggccuccacuacaaaguuggggacacgccugaugugagcaucccgaacaugaaugagaccaacuccacaaccacaaucauuaauaacaauacccaaaacaauuucacaaacaccacgaauaucauugugaacaagaaugaagagaaaaccuuucugaaccuuacaaagccccugugugaagucaacucuuggcauauccucagcaaagacaaugccauuagaaucggagaggaugcgcacauucuggugacccgggaaccuuaucuguccugcgacccccagggcugucgcauguucgcucucucucaggggacaacccugagaggacggcaugccaacggcacgauccacgaucgcagcccuuuuagagcccuuguuuccugggagaugggccaggcucccagcccuuacaaugugaaggucgagugcgugggguggucuuccacaagcugucaugacggaaucucucggauguccauuugcaugagcggcccgaacaauaacgccucugcuguugugugguaugggggacgccccgucaccgaaaucccuuccugggccggcaauauucugagaacacaagagagcgaaugugugugccacaaggggaucugucccguggucaugaccgauggaccugcgaacaaucgggccgcuaccaaaauuaucuacuucaaggagggcaaaauccagaagauugaggaacucgccggcuccgcucagcacaucgaggaaugcucuuguuauggggccguugaggugauuaaaugcaucugccgcgacaacuggaagggagcgaauagacccgugauuacaaucaacccggaaaugaugacgcauaccagcaaguaccuguguuccaaaguccuuacagauaccagccggccuaaugaccccacaaacggcaauugcgaugccccuaucaccgggggaucucccgaccccggcgugaagggguuugcuuuccuggauggagagaacuccuggcucggccgcacgauuagcaaagacucuagaagcggcuaugagaugcugaagguuccuaacgccgaaacagacacccaguccgggccgaccucucaccaagugaucgucaauaaccagaauuggagcggauacuccggcgcuuuuauugauuacugggccaacaaagaguguuucaaucccugcuuuuauguggaacugauccgggggcgcccuaaggagagcucuguucucuggacauccaacagcauuguggcccuguguggaucuaaagaaagacuuggcuccuggagcuggcaugacggggcugagaucauuuacuucaaguga

SEQ ID NO: 215696 - RNA, 1413 nt, Artificial Sequence
  derived and/or modified CDS sequence (opt5) from neuraminidase__InfluenzaA__AGQ81862
augaaccccaaucagaagaucauuugcaucagcgccaccggcaugacacuguccguggucucucuccugauugggaucgcuaaccuuggacugaauauuggccuccacuacaaaguuggggacacgccugaugugaacaucccgagcaugaaugagaccaacuccacaaccacaaucauuaauaacaauacccaaaacaauuucacaaacaucaccaauauuaucgugaacaaggaagagggaagaacguuucugaaucuuaccaaaccccugugugaagucaacucuuggcauauucucagcaaggacaacgccauccggauuggcgaggaugcgcacauccuggugacacgcgaaccuuaucuguccugcgacccccagggguguagaauguucgcucucucucagggaaccacacugcggggccgccaugccaauggcaccauccacgauagaagcccuuuucgggcccuuguuuccugggagauggggcaggcucccagcccuuacaacgugcgcgucgagugcauuggauggucuuccacgagcugucaugacggcaucucuagaauguccauuugcaugagcgggccgaauaacaaugccucugcugugguuugguauggaggccggcccgugacagaaaucccuuccugggccgggaacauucugcgcacccaagagagcgaaugugucugccacaaaggaaucugucccguggugaugacagauggcccugcgaauaacagagccgcuaccaagaucauuuacuucaaggagggcaaaauccagaagauugaggaacucgaggggaaugcccagcacaucgaagagugcuccuguuauggagcugccggcgucauuaaaugcaucugccgggacaacuggaagggggcgaaucgccccguuaucauuaucgauccggaaaugaugacccauacaucuaaauaccuguguagcagagugcuuacggacaccucccggccuaacgaucccacaagcggaaauugcgacgccccuauuaccggcgggucucccgaucccggagugaagggcuuugcuuuccuggacggcgagaacuccuggcucgggcgcacaaucagcaaggacucuagaagcggauaugagaugcugaaagucccuaaugccgaaaccgauacgcaguccggcccgacaucucaccaagugauuguuaacaaccagaauuggagcggguacuccggagcuuuuaucgacuacugggccaacaaggaguguuucaaucccugcuuuuauguggaacugauucggggcagaccuaaagagagcucuguccucuggaccuccaacagcaucguggcccugugugggucuaaggaacgccuuggcuccuggagcuggcaugauggagcugagaucauuuacuucaaauga

SEQ ID NO: 215697 - RNA, 1413 nt, Artificial Sequence
  derived and/or modified CDS sequence (opt5) from neuraminidase__InfluenzaA__AGQ81863
augaaccccaaucagaagaucauuugcaucagcgccaccggcaugacacuguccguggucucucuccugauugggaucgcuaaccuuggacugaauauuggccuccacuacaaaguuggggacacgccugaugugaacaucccgagcaugaaugagaccaacuccacaaccacaaucauuaauaacaauacccaaaacaauuucacaaacaucaccaauauuaucgugaacaaggaagaggaaagaacguuucugaaucuuaccaaaccccugugugaggucaacucuuggcauauucucagcaaggacaacgccauccggauuggagaagaugcgcacauccuggugacacgcgagccuuaucuguccugcgacccccagggcuguagaauguucgcucucucucaggggaccacacugcggggacgccaugccaauggcaccauccacgauagaagcccuuuucgggcccuuguuuccugggagaugggccaggcucccagcccuuacaacgugcgcgucgaaugcauuggguggucuuccacgagcugucaugacggaaucucuagaauguccauuugcaugagcggcccgaauaacaaugccucugcugugguuugguaugggggacggcccgugacagagaucccuuccugggccggcaacauucugcgcacccaagaaagcgagugugucugccacaaagggaucugucccguggugaugacagauggaccugcgaauaacagagccgcuaccaagaucauuuacuucaaggagggcaaaauccagaagauugaggaacucgaaggcaaugcccagcacaucgaggaaugcuccuguuauggggcugccggagucauuaaaugcaucugccgggacaacuggaagggcgcgaaucgccccguuaucauuaucgauccggagaugaugacccauacaucuaaauaccuguguagcagagugcuuacggacaccucccggccuaacgaucccauuagcgggaauugcgacgccccuaucacaggaggcucucccgaucccggggugaagggauuugcuuuccuggacggcgagaacuccuggcucggccgcaccauuagcaaggacucuagaagcggguaugaaaugcugaaagucccuaaugccgagacagauacccaguccggaccgacgucucaccaagugaucguuaacaaccagaauuggagcggcuacuccggggcuuuuauugacuacugggccaacaaggaauguuucaaucccugcuuuuauguggagcugauccggggaagaccuaaagaaagcucuguccucuggacauccaacagcaucguggcccuguguggcucuaaggagcgccuuggguccuggagcuggcaugauggcgcugagauuaucuacuucaaauga

SEQ ID NO: 215698 - RNA, 1416 nt, Artificial Sequence
  derived and/or modified CDS sequence (opt5) from neuraminidase__InfluenzaA__AGQ81864
augaaccccaaucagaagcuguucgcccucagcggcguggcuaucgcccuguccguccuuaaccugcucauugggaucucuaauguuggacugaacgugagccuucaccugaaagagaagggcccuaaacaagaagaaaauucuaccugcacaacgauuaaccagaauaacaccacaaucguggagaauaccuacgucaacaauacaaccauuaucuccaaggagacagaacucaaaccgcccaacuaucugcugcucaauaagagccuguguaacguggagggguggguugugaucgcgaaggacaaugcugucagauuuggagaguccgaacagauuaucgugacccgggagccuuacguuucuugcgaucccacgggcuguaaaauguaugcccuucaucaggggaccacaauucgcaacaagcacagcaacggaaccauccaugacagaacagccuuccggggccugauuuccaccccucucggcacgcccccuacagugagcaauucugauuuuaucugcgucgggugguccagcaccacaugucacgacggaauuggccgcaugaccaucugcauccaagggaacaaugauaacgcuaccgccacaguguacuauaauagacggcugacgaccacaauuaaaaccugggcucgcaacauccuuagaacacaggaaucugagugugugugccauaauggaaccugugccgucguuaugacggacggcuccgcgagcucucaggccuacacaaaggugauguauuuccacaaagggcuggugauuaaggaggaagcucucaagggauccgcccggcacaucgaggaaugcagcuguuacggccauucccagaaagcuaccugcgucugccgcgauaacuggcaaggcgccaauagaccgauuaucgagaucgacaugaacacccuggaacacacaucucgguacguguguaccgggauucugacagauacgagccgccccggagacaaguccagcggcgauugcucuaauccuaucaccgggucccccggagcgccuggcguuaaaggguuuggauuccucaacggcgacaauacauggcugggcagaaccauuagccccaagucucggagcggguuugagaugcuuaaaaucccgaacgccggaacagauccuaauucccgcauugcugagagacaggaaaucguggacaacaacaauuggucuggcuauagcggguccuucaucgacuacugggauaacgacagcgaguguuauaaucccugcuuuuacgucgaacugauucggggaagaccugaggaagccaaguaugugugguggaccucuaacucccucaucgcucuguguggcagccccuuccccguugggucuggcuccuuuccugauggagcccagauucaguacuucagcuga

SEQ ID NO: 215699 - RNA, 1416 nt, Artificial Sequence
  derived and/or modified CDS sequence (opt5) from neuraminidase__InfluenzaA__AGQ81865
augaaccccaaucagaagcuguucgcccucagcggcguggcuaucgcccuguccguccuuaaccugcucauugggcugucuaauguuggacuuaacgugagccugcaccucaaagagaccggcccuaagcaagaagggaaucugacaugcaugacgaucaaccagaauaacaccacaguggucgagaauaccuacgugaacaauacaaccauuaucacaaaagaaaccgaguccgaaacgccgaacuaucugcuccugaauaagucucuuuguaacguugagggauggguggucauugcgaaagacaaugcugugagauuuggcgagagcgaacagaucaucguuacccgggagcccuacguguccugcgauccuaacggguguaagauguaugcccugcaucagggaacaaccauucgcaacaagcacucuaauggcacaauccaugacagaaccgccuuccggggccucauuagcacgccccuggggacaccucccaccgucuccaacagcgauuuuaucugcgugggauggucuuccacaaccugucacgacggcauugggcgcaugaccaucugcauucaaggaaauaacgauaaugcuacagccacgguguacuauaacagacggcuuaccacaaccaucaaaacaugggcucgcaauauccugagaacccaggaaagcgagugugucugccauaacggcacgugugccguugugaugacagacgggucugcguccagccaggcccacaccaaggugauguacuuccacaaaggacucgucgugaaggaggaagcucugaaaggcucugcccggcauauugaggaaugcuccuguuauggccacaaucagaagguuaccugcgugugccgcgauaacuggcaaggggcuaauagaccuaucauugagaucgacaugaacacacuggaacauaccagccgguacgucuguacaggcauucucacggauaccucccgcccgggagacaagcccacaggggauugcucuaauccuaucaccggaagccccggcgccccuggggugaaaggauuuggcuuccugaacggcgggaauacauggcuuggaagaaccaucagcccccggucccgcucuggcuuugagaugcugaagauuccgaacgcggggacggacccuaacuccagaaucgccgagcggcaggaaauuguugauaauagcaacuggucuggauacagcggcuccuucaucgacuauuggaaugacaacucugaguguuacaaucccugcuuuuauguggaacucauuagagggcgcccugaggaagcuaaauacgucugguggaccagcaacucccugaucgcccuuuguggcagccccuuccccgugggaucuggcuccuuuccugauggggcucagauccaguauuucagcuga

SEQ ID NO: 215700 - RNA, 1416 nt, Artificial Sequence
  derived and/or modified CDS sequence (opt5) from neuraminidase__InfluenzaA__AGQ81868
augaaccccaaucagaagcuguucgcccucagcggcguggcuaucgcccuguccguccuuaaccugcucauugggaucucuaauguuggacugaacgugagccuucaccugaaagagaagggcccuaaacaagaagagaauagcacaugcaccacgauuaaccagaauaacaccacaguggucgaaaauaccuacgugaacaauacaaccaucauuacaaaggagaccgaacucaaaacgccgucuuaucugcugcucaacaagagccuguguaauguugagggguggguggucaucgcgaaggacaacgcugugagauuuggagaguccgaacagaucauuguuacccgggagcccuacgugucuugcgauccuacaggcuguaaaauguaugcccuucaucaggggaccacaauccgcaauaagcacagcaacggaaccauucaugacagaacggccuuccggggccugaucuccacaagccucggcacacccccuaccauuucuaacuccgauuuuaugugcgucggguggagcucuaccaccugucacgacggaaucggccgcaugacaauuugcauccaagggaauaacgauaaugcuacggccaccguguacuauaacagacggcugacaaccacaaucaaaaccugggcucgcaauauucuuagaacgcaggaauccgagugugugugccauaacggaaucugugccgucguuaugacagacggcagcgcgucuucccaggccuacaccaaggugauguauuuccacaaagggcugguggucaaggaggaagcucucaagggaagcgcccggcacauugaggaaugcuccuguuacggccauucucagaaagugaccugcguuugccgcgauaauuggcaaggcgcuaacagacccaucauugagaucgacaugaauacacuggaacacaccagccgguacguguguacagggauccugacggauaccucccgcccuggagacaagagcucuggcgauugcuccaacccgauugccgggagccccggagcgccuggcgucaaaggguuuggauuccucaauggcgacaacacauggcugggcagaaccaucucuccccggagccgcuccggguuugagaugcuuaagauuccuaaugccggaacagaucccaacucuagaaucgcuggccggcaggagauuguggacaauaacaacuggagcggguauuccggauccuucaucgacuacuggaaugauaacucugaauguuauaauccgugcuuuuacguugagcugaucagaggccgcccugaagaggccaaauaugugugguggaccuccaacagccucauugcucugugugggucucccuucccugucggcuccggcagcuuucccgacggagcccagauccaguacuucuccuga

SEQ ID NO: 215701 - RNA, 1416 nt, Artificial Sequence
  derived and/or modified CDS sequence (opt5) from neuraminidase__InfluenzaA__AGQ81869
augaaccccaaucagaagcuguucgcccucagcggcguggcuaucgcccuguccguccuuaaccugcucauugggaucucuaauguuggacugaacgugagccuucaccugaaagagaagggcccuaaacaagaagaaaauucuaccugcacaacgauuaaccagaauaacaccacaaucguggagaauaccuacgucaacaauacaaccauuaucuccaaggagacagaacucaaaaccccgagcuaucugcugcucaacaagucccuguguaauguggagggguggguugugaucgcgaaggacaacgcugucagauuuggagagucugaacagauuaucgugacgcgggagcccuacguuagcugcgauccuaccggcuguaaaauguaugcccuucaucaggggacaaccauucgcaauaagcacuccaacggaacaauccaugacagaaccgccuuccggggccugauuagcacgccccucggcacaccucccaccgugucuaacuccgauuuuaucugcgucggguggagcucuacaaccugucacgacggaauuggccgcaugaccaucugcauccaagggaauaacgauaaugcuacagccacgguguacuauaacagacggcugaccacaaccauucgcacaugggcuagaaauauccuucggacccaggaauccgagugugugugccauaacggaacgugugccgucguuaugacagacggcagcgcgucuucccaggccuacaccaaagugauguauuuccacaaggggcuggugauuaaagaggaagcucucaagggaagcgcccgccacaucgaggaaugcuccuguuacggccauucucagaaggcuaccugcgucugcagagauaauuggcaaggcgccaaccggccuauuaucgagaucgacaugaauacacuggaacacaccagccgcuacguguguacagggauucugacggauaccuccagaccgggagacaaaagcucuggcgauugcuccaaccccaucacagggagcccuggagcgcccggcguuaagggguuuggauuccucaauggcgacaacaccuggcugggccggacaauuucuccucgcagcagauccggguuugagaugcuuaaaauccccaaugccggaaccgauccgaacucucggauugcugagagacaggaaaucguggacaauaacaacuggagcggcuauuccgggagcuucaucgacuacuggaauaacgauucugaguguuauaauccuugcuuuuacgucgaacugauucgcggacggcccgaggaagccaaguaugugugguggacguccaacagccucaucgcucuguguggcucuccuuuccccguuggguccggcagcuuucccgacggagcccagauucaguacuucuccuga

SEQ ID NO: 215702 - RNA, 1416 nt, Artificial Sequence
  derived and/or modified CDS sequence (opt5) from neuraminidase__InfluenzaA__AGQ81870
augaaccccaaucagaagcuguucgcccucagcggcguggcuaucgcccuguccguccuuaaccugcucauugggaucucuaauguuggacugaacgugagccuucaccugaaagagaagggcccuaaacaagaagaaaauucuaccugcacaacgauuaaccagaauaacaccacaaucguggagaauaccuacgucaacaauacaaccauuaucuccaaggagacagaacucaaaccgcccagcuaucugcugcucaacaagucccuguguaauguggagggguggguugugaucgcgaaggacaacgcugucagauuuggagagucugaacagauuaucgugacccgggagccuuacguuagcugcgaucccacgggcuguaaaauguaugcccuucaucaggggaccacaauucgcaauaagcacuccaacggaaccauccaugacagaacagccuuccggggccugauuagcaccccucucggcacgcccccuacagugucuaacuccgauuuuaucugcgucggguggagcucuaccacaugucacgacggaauuggccgcaugaccaucugcauccaagggaauaacgauaaugcuaccgccacaguguacuauaacagacggcugacgaccacaauucgcaccugggcuagaaauauccuucggacacaggaauccgagugugugugccauaacggaaccugugccgucguuaugacggacggcagcgcgucuucccaggccuacacaaaagugauguauuuccacaaggggcuggugauuaaagaggaagcucucaagggaagcgcccgccacaucgaggaaugcuccuguuacggccauucucagaaggcuaccugcgucugcagagauaauuggcaaggcgccaaccggccgauuaucgagaucgacaugaauacccuggaacacacaagccgcuacguguguaccgggauucugacagauacguccagacccggagacaaaagcucuggcgauugcuccaacccuaucaccgggagccccggagcgccuggcguuaagggguuuggauuccucaauggcgacaacacauggcugggccggaccauuucuccccgcagcagauccggguuugagaugcuuaaaaucccgaaugccggaacagauccuaacucucggauugcugagagacaggaaaucguggacaauaacaacuggagcggcuauuccgggagcuucaucgacuacuggaauaacgauucugaguguuauaaucccugcuuuuacgucgaacugauucgcggacggccugaggaagccaaguaugugugguggaccuccaacagccucaucgcucuguguggcucucccuuccccguuggguccggcagcuuuccugacggagcccagauucaguacuucuccuga

SEQ ID NO: 215703 - RNA, 1416 nt, Artificial Sequence
  derived and/or modified CDS sequence (opt5) from neuraminidase__InfluenzaA__AGQ81871
augaaccccaaucagaagcuguucgcccucagcggcguggcuaucgcccuguccguccuuaaccugcucauugggaucucuaauguuggacugaacgugagccuucaccugaaagagaagggcccuaaacaagaagaaaauucuaccugcacaacgauuaaccagaauaacaccacaaucguggagaauaccuacgucaacaauacaaccauuaucuccaaggagacagaacucaaaaccccgagcuaucugcugcucaacaagucccuguguaauguggagggguggguugugaucgcgaaggacaacgcugucagauuuggagagucugaacagauuaucgugacgcgggagcccuacguuagcugcgauccuaccggcuguaaaauguaugcccuucaucaggggacaaccauucgcaauaagcacuccaacggaacaauccaugacagaaccgccuuccggggccugauuagcacgccccucggcacaccucccaccgugucuaacuccgauuuuaucugcauuggguggagcucuacaaccugucacgacggaaucggccgcaugaccaucugcauucaagggaauaacgauaaugcuacagccacggucuacuauaacagacggcugaccacaaccauccgcacaugggcuagaaauauucuucggacccaggaauccgagugugugugccauaacggaacgugugccguggucaugacagacggcagcgcgucuucccaggccuacaccaaaguuauguauuuccacaaggggcuggugaucaaagaggaagcucucaagggaagcgcccgccacauugaggaaugcuccuguuacggccauucucagaaggcuaccugcgugugcagagauaauuggcaaggcgccaaccggccuaucaucgagauugacaugaauacacuggaacacaccagccgcuacgucuguacagggauccugacggauaccuccagaccgggagacaaaagcucuggcgauugcuccaaccccauuacagggagcccuggagcgcccggcgugaagggguuuggauuccucaauggcgacaacaccuggcugggccggacaaucucuccucgcagcagauccggguuugagaugcuuaaaauucccaaugccggaaccgauccgaacucucggaucgcugagagacaggaaaucguugacaauaacaacuggagcggcuauuccgggagcuucauugacuacuggaauaacgauucugaguguuauaauccuugcuuuuacguggaacugauccgcggacggcccgaggaagccaaguaugucugguggacguccaacagccucauugcucuguguggcucuccuuuccccgugggguccggcagcuuucccgacggagcccagauccaguacuucuccuga

SEQ ID NO: 215704 - RNA, 1416 nt, Artificial Sequence
  derived and/or modified CDS sequence (opt5) from neuraminidase__InfluenzaA__AGQ81872
augaaccccaaucagaagcuguucgcccucagcggcguggcuaucgcccuguccguccuuaaccugcucauugggaucucuaauguuggacugaacgugagccuucaccugaaagagaagggcccuaaacaagaagaaaauucuaccugcacaacgauuaaccagaauaacaccacaaucguggagaauaccuacgucaacaauacaaccauuaucuccaaggagacagaacucaaaaccccgagcuaucugcugcucaacaagucccuguguaauguggagggguggguugugaucgcgaaggacaacgcugucagauuuggagagucugaacagauuaucgugacgcgggagcccuacguuagcugcgauccuaccggcuguaaaauguaugcccuucaucaggggacaaccauucgcaauaagcacuccaacggaacaauccaugacagaaccgccuuccggggccugauuagcacgccccucggcacaccucccucuguguccaacagcgauuuuaucugcgucggguggucuuccaccacaugucacgacggaauuggccgcaugaccaucugcauccaagggaauaacgauaaugcuaccgccacaguguacuauaacagacggcugacgaccacaauucgcaccugggcuagaaauauccuucggacacaggaaagcgagugugugugccauaacggaaccugugccgucguuaugacggacggcucugcguccagccaggccuacacaaaagugauguauuuccacaaggggcuggugauuaaagaggaagcucucaagggauccgcccgccacaucgaggaaugcucuuguuacggccauagccagaaggcuaccugcgucugcagagauaauuggcaaggcgccaaccggccuauuaucgagaucgacaugaauacccuggaacacacaucccgcuacguguguaccgggauucugacagauacgagcagaccgggagacaaaucuuccggcgauugcagcaaccccaucaccgggucuccuggagcgcccggcguuaagggguuuggauuccucaauggcgacaacacauggcugggccggaccauuagcccucgcuccagaucuggguuugagaugcuuaaaauccccaaugccggaacagauccgaacagccggauugcugagagacaggaaaucguggacaauaacaacugguccggcuauagcgggucuuucaucgacuacuggaauaacgauuccgaguguuauaauccuugcuuuuacgucgaacugauucgcggacggcccgaggaagccaaguaugugugguggaccagcaacucucucaucgcucuguguggcuccccuuuccccguugggagcggcuccuuucccgacggagcccagauucaguacuucucuuga

SEQ ID NO: 215705 - RNA, 1416 nt, Artificial Sequence
  derived and/or modified CDS sequence (opt5) from neuraminidase__InfluenzaA__AGQ81875
augaaccccaaucagaagcuguucgcccucagcggcguggcuaucgcccuguccguccuuaaccugcucauugggaucucuaauguuggacugaacgugagccuucaccugaaagagaagggcccuaaacaagaagaaaauucuaccugcaugacaauuaaccagaauaacacgaccguggucgagaauacauacgugaacaauaccacaaucauuaccaaggagacagaacucgagaccccguccuaucugcugcucaacaaagggcuguguaauguugagggauggguggucaucgcgaaggacaacgcugugagauuuggcgaaacggagcagaucauuguuacccgggaacccuacgugagcugcgauccuaauggguguaagauguaugcccuucaucagggaacaaccauccgcaacaaacacuccaacggcacaauucaugacagaaccgccuuccggggccugaucucuacgccccucgggacaccucccaccgucagcaauuccgauuuuauuugcgugggauggagcucuacaaccugucacgacggcaucgggcgcaugaccauuugcauccaaggaaacaaugauaacgcuacagccacgguguacuauaauagacggcugaccacaaccaucaagacaugggcucgcaacauucuuagaacccaggaguccgagugugucugccauaauggcacgugugccguugugaugacagacgggagcgcgucuucccaggcccacaccaaagugaucuacuuccacaagggacugauugucaaagaagaggcucucaagggcagcgcccggcauaucgaagagugcucuuguuauggccacucccagaaggugaccugcguuugccgcgauaacuggcaaggggcuaauagaccuauuaucgaaaucgacaugaacacacuggagcauaccagccgguacguguguacaggcauucugacggauaccucccgcccgggagacaaaucuacaggggauugcagcaaucccaucaccggauccccuggcgcccccggggucaagggauuuggcuaccucaacggcgacaauacauggcuggggagaaccauuagcccucggucucgcuccggauucgagaugcuuaaaauccccaacgcgggcacggauccgaauagcagaauuaccgaacggcaggagaucguggacaacaacaauuggucuggguauagcggauccuuuguugacuacuggaacgauaauucugaauguuauaacccuugcuucuacguggagcugaucagaggccgccccgaagaggccaaguaugucugguggacaagcaauuccauuaucgcucucugugggagcccuuuucccgugggcucuggauccuuccccgacggcgcccagauucaguacuuuagcuga

SEQ ID NO: 215706 - RNA, 1416 nt, Artificial Sequence
  derived and/or modified CDS sequence (opt5) from neuraminidase__InfluenzaA__AGQ81876
augaaccccaaucagaagcuguucgcccucagcggcguggcuaucgcccuguccguccuuaaccugcucauugggaucucuaauguuggacugaacgugagccuucaccugaaagagaagggcccuaaacaagaagaaaauucuaccugcaugacaauuaaccagaauaacacgaccguggucgagaauacauacgugaacaauaccacaaucauuaccaaggagacagaacucgagaccccguccuaucugcugcucaacaaagggcuguguaauguugagggauggguggucaucgcgaaggacaacgcugugagauuuggcgaaacggagcagaucauuguuacccgggaacccuacgugagcugcgauccuaauggguguaagauguaugcccuucaucagggaacaaccauccgcaacaaacacuccaacggcacaauucaugacagaaccgccuuccggggccugaucucuacgccccucgggacaccucccaccgucagcaauuccgauuuuauuugcgugggauggagcucuacaaccugucacgacggcaucgggcgcaugaccauuugcauccaaggagauaacgacaaugcuacagccacgguguacuauaacagacggcugaccacaaccaucaagacaugggcucgcaauauucuuagaacccaggaguccgagugugucugccauaacggcacgugugccguugugaugacagaugggagcgcgucuucccaggcccacaccaaagugaucuacuuccacaagggacugauugucaaagaagaggcucucaagggcagcgcccggcauaucgaagagugcucuuguuauggccacucccagaaggugaccugcguuugccgcgacaauuggcaaggggcuaacagaccuauuaucgaaaucgauaugaauacacuggagcauaccagccgguacguguguacaggcauucugacggacaccucccgcccgggagauaaaucuacaggggacugcagcaaccccaucaccggauccccuggcgcccccggggucaagggauuuggcuaccucaauggcgauaacacauggcuggggagaaccauuagcccucggucucgcuccggauucgagaugcuuaaaauccccaaugcgggcacggacccgaacagcagaauuaccgaacggcaggagaucguggacaauaacaacuggucuggguauagcggauccuuuguugauuacuggaaugacaacucugaauguuauaauccuugcuucuacguggagcugaucagaggccgccccgaagaggccaaguaugucugguggacaagcaacuccauuaucgcucucugugggagcccuuuucccgugggcucuggauccuuccccgauggcgcccagauucaguacuuuagcuga

SEQ ID NO: 215707 - RNA, 1416 nt, Artificial Sequence
  derived and/or modified CDS sequence (opt5) from neuraminidase__InfluenzaA__AGQ81877
augaaccccaaucagaagcuguucgcccucagcggcguggcuaucgcccuguccguccuuaaccugcucauugggaucucuaauguuggacugaacgugagccuucaccugaaagagaagggcccuaaacaagaagagaauagcacaugcaccacgauuaaccagaauaacaccacaguggucgaaaauaccuacgugaacaauacaaccaucauuacaaaggagaccgaacucaaaacgccgucuuaucugcugcucaacaagagccuguguaauguugagggguggguggucaucgcgaaggacaacgcugugagauuuggagaguccgaacagaucauuguuacccgggagcccuacgugucuugcgauccuacaggcuguaaaauguaugcccuucaucaggggaccacaauccgcaauaagcacagcaacggaaccauucaugacagaacggccuuccggggccugaucuccacaagccucggcacacccccuaccauuucuaacuccgauuuuaugugcgucggguggagcucuaccaccugucacgacggaaucggccgcaugacaauuugcauccaagggaauaacgauaaugcuacggccaccguguacuauaacagacggcugacaaccacaaucaaaaccugggcucgcaauauucuuagaacgcaggaauccgagugugugugccauaacggaaucugugccgucguuaugacagacggcagcgcgucuucccaggccuacaccaaggugauguauuuccacaaagggcugguggucaaggaggaagcucucaagggaagcgcccggcacauugaggaaugcuccuguuacggccauucucagaaagugaccugcguuugccgcgauaauuggcaaggcgcuaacagacccaucauugagaucgacaugaauacacuggaacacaccagccgguacguguguacagggauccugacggauaccucccgcccuggagacaagagcucuggcgauugcuccaacccgauuacagggagccccggagccccuggcgucaaaggguuuggauuccucaauggcgacaacaccuggcugggcagaacaaucucuccccggagccgcuccggguuugagaugcuuaagauuccuaaugcgggaaccgaucccaacucuagaaucgccggccggcaggagauuguggacaauaacaacuggagcggguauuccggauccuucaucgacuacuggaaugauaacucugaauguuauaauccgugcuuuuacguugagcugaucagaggccgcccugaagaggcuaaauaugugugguggacguccaacagccucauugcccugugugggucucccuucccugucggcuccggcagcuuucccgacggagcucagauccaguacuucuccuga

SEQ ID NO: 215708 - RNA, 1416 nt, Artificial Sequence
  derived and/or modified CDS sequence (opt5) from neuraminidase__InfluenzaA__AGQ81878
augaaccccaaucagaagcuguucgcccucagcggcguggcuaucgcccuguccguccuuaaccugcucauugggaucucuaauguuggacugaacgugagccuucaccugaaagagaagggcccuaaacaagaagagaaucugaccugcacaacgauuaaccagaauaacaccacaguggucgaaaauaccuacgugaacaauacaaccaucauuacaaaggagaccgaccucaaagcgccguccuaucugcuccugaacaagucucuuuguaauguugaaggguggguggucaucgcuaaggauaacgccgugagauuuggagagagcgagcagaucauuguuacgcgggaacccuacguguccugcgacccuaccggcuguaaaauguaugcccugcaucaggggacaaccauccgcaauaagcacucuaacggaacaauucaugauagaaccgcuuuccggggccucaucagcacgccccugggcacaccucccaccgucuccaacagcgacuuuaugugcgugggguggucuuccacaaccugucacgauggaauuggccgcaugaccaucugcauucaagggaauaacgacaaugccacagcuacgguguacuauaacagacggcuuaccacaaccaucaaaacaugggcccgcaauauccugagaacccaggagagcgaaugugucugccauaacggaacgugugcgguugugaugacagauggcucugccuccagccaggcuuacaccaaggugauguauuuccacaaagggcucgucgugaaggaggaggcccugaagggaucugcucggcacauugaagagugcuccuguuacggccauagccagaaaguuaccugcgugugccgcgacaauuggcaaggcgccaacagaccuaucauugaaaucgauaugaauacacuggagcacaccucccgguacgucuguacagggauucucacggacaccucucgcccgggagauaagagcuccggcgacugcagcaaccccaucacagggucuccuggagcgcccggcgugaaaggguuuggauuccugaauggcgauaacaccuggcuuggcagaacaaucuccccucggagccgcucuggguuugaaaugcugaagauucccaaugccggaaccgacccgaacagcagaaucgcugagcggcaggagauuguugacaauaacaacugguccggcuauucugggagcuucaucgauuacuggaaugacaacuccgaauguuauaauccuugcuuuuacguggagcucauuagaggacgccccgaagaggccaaauaugucugguggacgagcaacucucugaucgcucuuuguggcuccccuuuccccaucgggagcggcucuuuucccgauggagcccagauucaguacuucuccuga

SEQ ID NO: 215709 - RNA, 1416 nt, Artificial Sequence
  derived and/or modified CDS sequence (opt5) from neuraminidase__InfluenzaA__AGQ81882
augaaccccaaucagaagcuguucgcccucagcggcguggcuaucgcccuguccguccuuaaccugcucauugggaucucuaauguuggacugaacgugagccuucaccugaaagagaagggcgcgaaacaagaagagaaucuuaccugcacaacgauuaaccagaauaacaccacaguggucgaaaauaccuacgugaacaauacaaccguuaucacaaaggaggcugacuggaaaaccccuuccuaucugcugcucaacaagucucuguguaauguggaagggugggucgugauugccaaggauaacgccaucagauuuggagagagcgagcagaucauuguuacgcgggaaccguacguguccugcgaccccaccggcuguaaaauguaugcucuccaucaggggacaaccauccgcaauaagcacucuaacggaacaauucaugauagaaccgccuuccggggccugaucagcacgccucucggcacacccccuaccgucuccaacagcgacuuuaugugcgugggguggucuuccacaaccugucacgauggaauuggccgcaugaccaucugcauucaagggaauaacgacaaugcuacagccacgguguacuauaacggaagacugaccacaaccaucaaaacaugggcgcggaauauccuucgcacccaggagagcgaaugugucugccauaacggcacgugugccguugugaugacagaugggucugcuuccagccaggccuacaccaaggugauguauuuccacaaaggacuggucauuaaggaggaggcucucaagggcucugccagacacaucgaagagugcuccuguuacggccauagccagaaagugaccugcguuugccgggacaauuggcaaggggcgaaccgccccauuaucgaaauugauaugaauacacuggagcacaccuccagauacguguguacaggaauccugacggacaccucucggccuggcgauaagagcuccggggacugcagcaacccgaucacaggaucucccggcgccccuggggucaaaggauuuggcuuccucaauggcgauaacaccuggcuggggcgcacaauuucccccagaagccggucuggauuugaaaugcuuaagaucccuaaugcuggcauugaccccaacagccgcaucgccgagagacaggagauuguggacaauaacaacugguccggguauucuggcagcuucaucgauuacuggaaugacaacuccgaauguuauaauccgugcuuuuacguugagcugauccggggaagaccugaagaggcuaaauaugugugguggaccagcaacucucucauugcccugugugggucccccuucccugucggcagcggaucuuuucccgauggcgcccagauccaguacuucuccuga

SEQ ID NO: 215710 - RNA, 1416 nt, Artificial Sequence
  derived and/or modified CDS sequence (opt5) from neuraminidase__InfluenzaA__AGQ81883
augaaccccaaucagaagcuguucgcccucagcggcguggcuaucgcccuguccguccuuaaccugcucauugggaucucuaauguuggacugaacgugagccuucaccugaaagagaagggcccuaaacaagaagagaaucugaccugcacaacgauuaaccagaauaacaccacaguggucgaaaauaccuacgugaacaauacaaccguuaucacaaaggaggcggacuggaaaaccccguccuaucuccugcucaacaagucucuguguaauguggaagggugggucgugauugcuaaggauaacgccaucagauuuggagagagcgagcagaucauuguuacgcgggaacccuacguguccugcgacccuaccggcuguaaaauguaugcccuucaucaggggacaaccauccgcaauaagcacucuaacggaacaauucaugauagaaccgcuuuccggggccugaucagcacgccccucggcacaccucccaccgucuccaacagcgacuuuaugugcgugggguggucuuccacaaccugucacgauggaauuggccgcaugaccaucugcauucaagggaauaacgacaaugccacagcuacgguguacuauaacggaagacugaccacaaccaucaaaacaugggcccggaauauccuucgcacccaggagagcgaaugugucugccauaacggcacgugugcgguugugaugacagaugggucugccuccagccaggcuuacaccaaggugauguauuuccacaaaggacuggucauuaaggaggaggcccucaagggcucugcuagacacaucgaagagugcuccuguuacggccauagccagaaagugaccugcguuugccgggacaauuggcaaggggccaaccgcccuauuaucgaaauugauaugaauacacuggagcacaccuccagauacguguguacaggaauccugacggacaccucucggccgggcgauaagagcuccggggacugcagcaaccccaucacaggaucuccuggcgcgcccggggucaaaggauuuggcuuccucaauggcgauaacaccuggcuggggcgcacaauuuccccuagaagccggucuggauuugaaaugcuuaagauccccaaugccggcauugacccgaacagccgcaucgcugagagacaggagauuguggacaauaacaacugguccggguauucuggcagcuucaucgauuacuggaaugacaacuccgaauguuauaauccuugcuuuuacguugagcugauccggggaagacccgaagaggccaaauaugugugguggaccagcaacucucucauugcucuguguggguccccuuuccccgucggcagcggaucuuuucccgauggcgcccagauccaguacuucuccuga

SEQ ID NO: 215711 - RNA, 1416 nt, Artificial Sequence; identical to SEQ ID NO: 215710
  derived and/or modified CDS sequence (opt5) from neuraminidase__InfluenzaA__AGQ81884

SEQ ID NO: 215712 - RNA, 1416 nt, Artificial Sequence; identical to SEQ ID NO: 215710
  derived and/or modified CDS sequence (opt5) from neuraminidase__InfluenzaA__AGQ81885

SEQ ID NO: 215713 - RNA, 1416 nt, Artificial Sequence; identical to SEQ ID NO: 215710
  derived and/or modified CDS sequence (opt5) from neuraminidase__InfluenzaA__AGQ81886

SEQ ID NO: 215714 - RNA, 1356 nt, Artificial Sequence
  derived and/or modified CDS sequence (opt5) from neuraminidase__InfluenzaA__AGQ81888
augaaccccaaucagaagcuguucgcccucagcggcguggcuaucgcccuguccguccuuaaccugcucauugggcugucuaauguuggacuuaacgugagccugcaccucaaagaggcgggcccuaagcaagaagagaaucugaccugcaugacaacgaaagaaaccgagcuggggacaccguccuaccuccugcuuaacaagucucuguguaauguggaaggaugggucgugaucgcuaaagacaacgccguuagauuuggcgagagcgagcagauuaucauuacccgggaacccuauguguccugcgauccuaauggguguaagauguacgcccuccaucagggaacaaccauccgcaacaagcacucuaauggcacaauccaugacagaaccgcuuuccggggccugauuagcacgccccuugggaccccucccacagucuccaacagcgauuuuaucugcgugggauggucuuccaccacaugucacgacggcauugggcgcaugaccaucugcauucagggaaauaacgauaaugccacggcuacaguuuauuacaacagacggcugaccacaaccaucaaaaccugggcccgcaacauucucagaacacaagagagcgaaugugugugccauaauggcacgugugcggucgugaugaccgacgggucugccuccagccaggcucacacaaaggugauguauuuccacaaaggacuggucguuaaggaggaggcccugaaaggcucugcuaagcauaucgaagagugcuccuguuacggccacaaccagaaggugaccugcgugugccgggauaauuggcagggggccaaccgcccuaucauugaaaucgacaugaauacacucgagcauaccagcagauaugucuguacgggcauucugacagauaccucccggccgggagacaaacccaccggggauugcucuaacccuaucacaggaagccccggcgcgccuggggugaagggauuuggcuuccuuaauggcgacaacaccuggcuggggcgcacaauuucccccagaagccggucuggauuugaaaugcucaaaaucccgaaugccggcaucgauccuaacucccgcauugcugagagacaagagaucguugacaauagcaacuggucuggguacagcggauccuucauugacuacuggaaugauaacucugaauguuauaaucccugcuuuuacguggagcugauccggggcagaccugaagaggccaaguaugucugguggacgagcaacucccuuauugcucugugugggagccccuuccccgugggcucuggauccuuuccugacggcgcccagauccaguacuucagcuga

SEQ ID NO: 215715 - RNA, 1356 nt, Artificial Sequence
  derived and/or modified CDS sequence (opt5) from neuraminidase__InfluenzaA__AGQ81889
augaaccccaaucagaagcuguucgcccucagcggcguggcuaucgcccuguccguccuuaaccugcucauugggcugucuaauguuggacuuaacgugagccugcaccucaaagagaccggcccuaagcaagaagagaaucugacaugcaugacgaccaaagaaacagagcuggggaccccguccuaccuccugcuuaacaagucucuguguaauguggaaggaugggucgugaucgcgaaagacaacgcuguuagauuuggcgagagcgagcagauuaucauuacacgggaacccuauguguccugcgauccuaauggguguaagauguacgcccuccaucagggaaccacaauccgcaacaagcacucuaauggcaccauccaugacagaacggccuuccggggccugauuagcacaccccuugggaccccucccaccgucuccaacagcgauuuuaucugcgugggauggucuuccacaaccugucacgacggcauugggcgcaugacgaucugcauucagggaaauaacgauaaugcuacagccaccguuuauuacaacagacggcugacaaccaccaucaaaacaugggcucgcaacauucucagaacgcaagagagcgaaugugugugccauaauggcaccugugccgucgugaugacagacgggucugcguccagccaggcccacaccaaggugauguauuuccacaaaggacuggucguuaaggaggaggcucugaaaggcucugccaagcauaucgaagagugcuccuguuacggccacaaccagaaggugacaugcgugugccgggauaauuggcagggggcuaaccgcccuaucauugaaaucgacaugaauacccucgagcauacgagcagauaugucuguacaggcauucugaccgauaccucccggccgggagacaaacccacaggggauugcucuaacccuaucaccggaagccccggcgccccuggggugaagggauuuggcuuccuuaauggcgacaacacauggcuggggcgcacgauuucccccagaagccggucuggauuugaaaugcucaaaaucccgaaugcgggcaucgauccuaacucccgcauugccgagagacaagagaucguugacaauagcaacuggucuggguacagcggauccuucauugacuacuggaaugauaacucugaauguuauaaucccugcuuuuacguggagcugauccggggcagaccugaagaggcuaaguaugucugguggaccagcaacucccuuauugcccugugugggagccccuuccccgugggcucuggauccuuuccugacggcgcucagauccaguacuucagcuga

SEQ ID NO: 215716 - RNA, 1356 nt, Artificial Sequence; identical to SEQ ID NO: 215715
  derived and/or modified CDS sequence (opt5) from neuraminidase__InfluenzaA__AGQ81890

SEQ ID NO: 215717 - RNA, 1356 nt, Artificial Sequence; identical to SEQ ID NO: 215715
  derived and/or modified CDS sequence (opt5) from neuraminidase__InfluenzaA__AGQ81891

SEQ ID NO: 215718 - RNA, 1356 nt, Artificial Sequence
  derived and/or modified CDS sequence (opt5) from neuraminidase__InfluenzaA__AGQ81893
augaaccccaaucagaagcuguucgcccucagcggcguggcuaucgcccuguccguccuuaaccugcucauugggcugucuaauguuggacuuaacgugagccugcaccucaaagagaccggcccuaagcaagaagagaaucugacaugcaugacgaccaaagaaacagagcuggggaccccguccuaccuccugcuuaacaagucucuguguaauguggaaggaugggucgugaucgcgaaagacaacgcuguuagauuuggcgagagcgagcagauuaucauuacacgggaacccuauguguccugcgauccuaauggguguaagauguacgcccuccaucagggaaccacaauccgcaacaagcacucuaauggcaccauccaugacagaacggccuuccggggccugauuagcacaccccuugggaccccucccaccgucuccaacagcgauuuuaucugcgugggauggucuuccacaaccugucacgacggcauugggcgcaugacgaucugcauucagggaaauaacgauaaugcuacagccaccguuuauuacaacagacggcugacaaccaccaucaaaacaugggcucgcaacauucucagaacgcaagagagcgaaugugugugccauaauggcaccugugccgucgugaugacagacgggucugcguccagccaggcccacaccaaggugauguauuuccacaaaggacuggucguuaaggaggaggcucugaaaggcucugccaagcauaucgaagagugcuccuguuacggccacaaccagaaggugacaugcgugugccgggauaauuggcagggggcuaaccgcccuaucauugaaaucgacaugaauacccucgagcauacgagcagauaugucuguacaggcauucugaccgauaccucccggccgggagacaaacccacaggggauugcucuaacccuaucaccggaagccccggcgccccuggggugaagggauuuggcuuccuuaauggcgacaacacauggcuggggcgcacgauuucccccagaagccggucuggauuugaaaugcucaaaaucccgaaugcgggcaucgauccuaacucccgcauugccgagagacaagagaucguugacaauagcaacuggucuggguacagcggauccuucauugacuacuggaaugauaacucugaauguuauaaucccugcuuuuacguggagcugauccggggcagaccugaagaggcugaauaugucugguggaccagcaacucccuuauugcccugugugggagccccuuccccgugggcucuggauccuuuccugacggcgcucagauccaguacuucagcuga

SEQ ID NO: 215719 - RNA, 1356 nt, Artificial Sequence; identical to SEQ ID NO: 215715
  derived and/or modified CDS sequence (opt5) from neuraminidase__InfluenzaA__AGQ81894

SEQ ID NO: 215720 - RNA, 1356 nt, Artificial Sequence; identical to SEQ ID NO: 215715
  derived and/or modified CDS sequence (opt5) from neuraminidase__InfluenzaA__AGQ81895

SEQ ID NO: 215721 - RNA, 1356 nt, Artificial Sequence; identical to SEQ ID NO: 215715
  derived and/or modified CDS sequence (opt5) from neuraminidase__InfluenzaA__AGQ81896

SEQ ID NO: 215722 - RNA, 1356 nt, Artificial Sequence; identical to SEQ ID NO: 215715
  derived and/or modified CDS sequence (opt5) from neuraminidase__InfluenzaA__AGQ81897

SEQ ID NO: 215723 - RNA, 1356 nt, Artificial Sequence; identical to SEQ ID NO: 215715
  derived and/or modified CDS sequence (opt5) from neuraminidase__InfluenzaA__AGQ81898

SEQ ID NO: 215724 - RNA, 1356 nt, Artificial Sequence; identical to SEQ ID NO: 215715
  derived and/or modified CDS sequence (opt5) from neuraminidase__InfluenzaA__AGQ81899

SEQ ID NO: 215725 - RNA, 1356 nt, Artificial Sequence; identical to SEQ ID NO: 215715
  derived and/or modified CDS sequence (opt5) from neuraminidase__InfluenzaA__AGQ81900

SEQ ID NO: 215726 - RNA, 1356 nt, Artificial Sequence; identical to SEQ ID NO: 215715
  derived and/or modified CDS sequence (opt5) from neuraminidase__InfluenzaA__AGQ81901

SEQ ID NO: 215727 - RNA, 1356 nt, Artificial Sequence; identical to SEQ ID NO: 215715
  derived and/or modified CDS sequence (opt5) from neuraminidase__InfluenzaA__AGQ81902

SEQ ID NO: 215728 - RNA, 1356 nt, Artificial Sequence; identical to SEQ ID NO: 215715
  derived and/or modified CDS sequence (opt5) from neuraminidase__InfluenzaA__AGQ81903

SEQ ID NO: 215729 - RNA, 1356 nt, Artificial Sequence
  derived and/or modified CDS sequence (opt5) from neuraminidase__InfluenzaA__AGQ81904
augaaccccaaucagaagcuguucgcccucagcggcguggcuaucgcccuguccguccuuaaccugcucauugggcugucuaauguuggacuuaacgugagccugcaccucaaagagaccggcccuaagcaagaagagaaucugacaugcaugacgaccaaagaaacagagcuggggaccccguccuaccuccugcuuaacaagucucuguguaauguggaaggaugggucgugaucgcgaaagacaacgcuguuagauuuggcgagagcgagcagauuaucauuacacgggaacccuauguguccugcgauccuaauggguguaagauguacgcccuccaucagggaaccacaauccgcaacaagcacucuaauggcaccauccaugacagaacggccuuccggggccugauuagcacaccccuugggaccccucccaccgucuccaacagcgauuuuaucugcgugggauggucuuccacaaccugucacgacggcauugggcgcaugacgaucugcauucagggaaauaacgauaaugcuacagccaccguuuauuacaacagacggcugacaaccaccaucaaaacaugggcucgcaacauucucagaacgcaagagagcgaaugugugugccauaauggcaccugugccgucgugaugacagacgggucugcguccagccaggcccacaccaaggugauguauuuccacaaaggacuggucguuaaggaggaggcucugaaaggcucugccaagcauaucgaagagugcuccuguuacggccacaaccagaaggugacaugcgugugccgggauaauuggcagggggcuaaccgcccuaucauugaaaucgacaugaauacccucgagcauacgagcagauaugucuguacaggcauucugaccgauaccucccggccgggagacaaacccacaggggauugcucuaacccuaucaccggaagccccggcgccccuggggugaagggauuuggcuuccuuaauggcgacaacacauggcuggggcgcacgauuucccccagaagccggucuggauuugaaaugcucaaaaucccgaaugcgggcaucgauccuaacucccgcauuaccgagagacaagagaucguugacaauagcaacuggucuggguacagcggauccuucauugacuacuggaaugauaacucugaauguuauaaucccugcuuuuacguggagcugauccggggcagaccugaagaggccaaguaugucugguggacaagcaacucccuuauugcucugugugggagccccuuccccgugggcucuggauccuuuccugacggcgcccagauccaguacuucagcuga

SEQ ID NO: 215730 - RNA, 1356 nt, Artificial Sequence; identical to SEQ ID NO: 215715
  derived and/or modified CDS sequence (opt5) from neuraminidase__InfluenzaA__AGQ81905

SEQ ID NO: 215731 - RNA, 1356 nt, Artificial Sequence
  derived and/or modified CDS sequence (opt5) from neuraminidase__InfluenzaA__AGQ81906
augaaccccaaucagaagcuguucgcccucagcggcguggcuaucgcccuguccguccuuaaccugcucauugggcugucuaauguuggacuuaacgugagccugcaccucaaagagaccggcccuaagcaagaagagaaucugacaugcaugacgaccaaagaaacagagcuggggaccccguccuaccuccugcuuaacaagucucuguguaauguggaaggaugggucgugaucgcgaaagacaacgcuguuagauuuggcgagagcgagcagauuaucauuacacgggaacccuauguguccugcgauccuaauggguguaagauguacgcccuccaucagggaaccacaauccgcaacaagcacucuaauggcaccauccaugacagaacggccuuccggggccugauuagcacaccccuugggaccccucccaccgucuccaacagcgauuuuaucugcgugggauggucuuccacaaccugucacgacggcauugggcgcaugacgaucugcauucagggaaauaacgauaaugcuacagccaccguuuauuacaacagacggcugacaaccaccaucaaaacaugggcucgcaacauucucagaacgcaagagagcgaaugugugugccauaauggcaccugugccgucgugaugacagacgggucugcguccagccaggcccacaccaaggugauguauuuccacaaaggacuggucguuaaggaggaggcucugaaaggcucugcccggcauaucgaagagugcuccuguuacggccacaaccagaaggugacaugcgugugccgcgauaauuggcagggggcuaacagaccuaucauugaaaucgacaugaauacccucgagcauacgagccgguaugucuguacaggcauucugaccgauaccucccgcccgggagacaagcccacaggggauugcucuaacccuaucaccggaagccccggcgccccuggggugaaaggauuuggcuuccuuaauggcgacaacacauggcuggggagaacgauuagcccccggucccgcucuggauuugaaaugcucaagaucccgaaugcgggcaucgauccuaacuccagaauugccgagcggcaagagaucguugacaauagcaacuggucuggguacagcggauccuucauugacuacuggaaugauaacucugaauguuauaaucccugcuuuuacguggagcugaucagaggccgcccugaagaggcuaaauaugucugguggaccagcaacucccuuauugcccugugugggagccccuuccccgugggcucuggauccuuuccugacggcgcucagauccaguacuucagcuga

SEQ ID NO: 215732 - RNA, 1356 nt, Artificial Sequence; identical to SEQ ID NO: 215715
  derived and/or modified CDS sequence (opt5) from neuraminidase__InfluenzaA__AGQ81907

SEQ ID NO: 215733 - RNA, 1356 nt, Artificial Sequence
  derived and/or modified CDS sequence (opt5) from neuraminidase__InfluenzaA__AGQ81908
augaaccccaaucagaagcuguucgcccucagcggcguggcuaucgcccuguccguccuuaaccugcucauugggcugucuaauguuggacuuaacgugagccugcaccucaaagagaccggcccuaagcaagaagagaaucugacaugcaugacgaccaaagaaacagagcuggggaccccguccuaccuccugcuuaacaagucucuguguaauguggaaggaugggucgugaucgcgaaagacaacgcuguuagauuuggcgagagcgagcagauuaucauuacacgggaacccuauguguccugcgauccuaauggguguaagauguacgcccuccaucagggaaccacaauccgcaacaagcacucuaauggcaccauccaugacagaacggccuuccggggccugauuagcacaccccuugggaccccucccaccgucuccaacagcgauuuuaucugcgugggauggucuuccacaaccugucacgacggcauugggcgcaugacgaucugcauucagggaaauaacgauaaugcuacagccaccguuuauuacaacagacggcugacaaccaccaucaaaacaugggcucgcaacauucucagaacgcaagagagcgaaugugugugccauaauggcaccugugccgucgugaugacagacgggucugcguccaaccaggcccacaccaaggugauguauuuccacaaaggacuggucguuaaggaggaggcucugaaaggcagcgccaagcauaucgaagagugcucuuguuacggccacaaucagaaggugacaugcgugugccgggauaacuggcagggggcuaaucgcccuaucauugaaaucgacaugaacacccucgagcauacguccagauaugucuguacaggcauucugaccgauaccagccggccgggagacaaacccacaggggauugcuccaauccuaucaccggaucucccggcgccccuggggugaagggauuuggcuuccuuaacggcgacaauacauggcuggggcgcacgauuagccccagaucccggagcggauuugaaaugcucaaaaucccgaacgcgggcaucgauccuaauucucgcauuaccgagagacaagagaucguugacaacuccaauuggagcggguacucuggcagcuucauugacuacuggaacgauaauuccgaauguuauaaccccugcuuuuacguggagcugauccggggaagaccugaagaggccaaguaugucugguggacaucuaacagccuuauugcucugugugggucccccuuccccgugggcagcggaucuuuuccugacggcgcccagauccaguacuucuccuga

SEQ ID NO: 215734 - RNA, 1356 nt, Artificial Sequence; identical to SEQ ID NO: 215715
  derived and/or modified CDS sequence (opt5) from neuraminidase__InfluenzaA__AGQ81909

SEQ ID NO: 215735 - RNA, 1356 nt, Artificial Sequence
  derived and/or modified CDS sequence (opt5) from neuraminidase__InfluenzaA__AGQ81910
augaaccccaaucagaagcuguucgcccucagcggcguggcuaucgcccuguccguccuuaaccugcucauugggcugucuaauguuggacuuaacgugagccugcaccucaaagagaccggcccuaagcaagaagagaaucugacaugcaugacgaccaaagaaacagagcuggggaccccguccuaccuccugcuuaacaagucucuguguaauguggaaggaugggucgugaucgcgaaagacaacgcuguuagauuuggcgagagcgagcagauuaucauuacacgggaacccuauguguccugcgauccuaauggguguaagauguacgcccuccaucagggaaccacaauccgcaacaagcacucuaauggcaccauccaugacagaacggccuuccggggccugauuagcacaccccuugggaccccucccaccgucuccaacagcgauuuuaucugcgugggauggucuuccacaaccugucacgacggcauugggcgcaugacgaucugcauucagggaaauaacgauaaugcuacagccaccguuuauuacaacagacggcugacaaccaccaucaaaacaugggcucgcaacauucucagaacgcaagagagcgaaugugugugccauaauggcaccugugccgucgugaugacagacgggucugcguccggacaggcccacaccaaggugauguauuuccacaaaggccuggucguuaaggaggaggcucugaaaggcagcgccaagcauaucgaagagugcucuuguuacgggcacaaccagaaggugacaugcgugugccgggauaauuggcagggagcuaaccgcccuaucauugaaaucgacaugaauacccucgagcauacguccagcuaugucuguacaggcauucugaccgauaccuccagaccgggggacaaacccacaggagauugcucuaacccuaucaccggcagccccggggccccuggagugaagggcuuuggcuuccuuaauggggacaacacauggcugggacggacgauuagcccccgcuccagaucuggcuuugaaaugcucaaaaucccgaaugcggggaucgauccuaacucccggauugccgagcgccaagagaucguugacaauagcaacuggucuggauacagcggcuccuucauugacuacuggaaugauaacucugaauguuauaaucccugcuuuuacguggagcugaucagagggcggccugaagaggcuaaguaugucugguggaccagcaacucccuuauugcccuguguggcagccccuuccccgugggaucuggcuccuuuccugacggggcucagauccaguacuucagcuga

SEQ ID NO: 215736 - RNA, 1356 nt, Artificial Sequence
  derived and/or modified CDS sequence (opt5) from neuraminidase__InfluenzaA__AGQ81911
augaaccccaaucagaagcuguucgcccucagcggcguggcuaucgcccuguccguccuuaaccugcucauugggcugucuaauguuggacuuaacgugagccugcaccucaaagagaccggcccuaagcaagaagagaaucugacaugcaugacgaccaaagaaacagagcuggggaccccguccuaccuccugcuuaacaagucucuguguaauguggaaggaugggucgugaucgcgaaagacaacgcuguuagauuuggcgagagcgagcagauuaucauuacacgggaacccuauguguccugcgauccuaauggguguaagauguacgcccuccaucagggaaccacaauccgcaacaagcacucuaauggcaccauccaugacagaacggccuuccggggccugauuagcacaccccuugggaccccucccaccgucuccaacagcgauuuuaucugcgugggauggucuuccacaaccugucacgacggcauugggcgcaugacgaucugcauucagggaaauaacgauaaugcuacagccaccguuuauuacaacagacggcugacaaccaccaucaaaacaugggcucgcaacauucucagaacgcaagagagcgaaugugugugccauaauggcaccugugccgucgugaugacagacgggucugcguccggacaggcccacaccaaggugauguauuuccacaaaggccuggucguuaaggaggaggcucugaaaggcagcgccaagcauaucgaagagugcucuuguuacgggcacaaccagaaugugacaugcgugugccgggauaacuggcagggagcuaaucgcccuaucauugaaaucgacaugaacacccucgagcauacguccagauaugucuguacaggcauucugaccgauaccagccggccgggggacaagcccacaggagauugcuccaauccuaucaccggcucucccggggccccuggagugaaaggcuuuggcuuccuuaacggggacaauacauggcugggacgcacgauuagccccagaucccggagcggcuuugaaaugcucaagaucccgaacgcggggaucgauccuaauucucgcauugccgagagacaagagaucguugacaacuccaauuggagcggauacucuggcagcuucauugacuacuggaacgauaauuccgaauguuauaaccccugcuuuuacguggagcugauccgggggagaccugaagaggcuaaauaugucugguggaccucuaacagccuuauugcccuguguggcucccccuuccccgugggaagcggcucuuuuccugacggggcucagauccaguacuucuccuga

SEQ ID NO: 215737 - RNA, 1356 nt, Artificial Sequence; identical to SEQ ID NO: 215715
  derived and/or modified CDS sequence (opt5) from neuraminidase__InfluenzaA__AGQ81912

SEQ ID NO: 215738 - RNA, 1356 nt, Artificial Sequence
  derived and/or modified CDS sequence (opt5) from neuraminidase__InfluenzaA__AGQ81913
augaaccccaaucagaagcuguucgcccucagcggcguggcuaucacccuguccguccuuaaccugcucauugggcugucuaauguuggacuuaacgugagccugcaccucaaagagacaggcccuaagcaagaagagaaucugacgugcaugaccacaaaagaaaccgagcuggggacaccguccuaccuccugcuuaacaagucucuguguaauguggaaggaugggucgugaucgccaaagacaacgcgguuagauuuggcgagagcgagcagauuaucauuacccgggaacccuauguguccugcgauccuaauggguguaagauguacgcucuccaucagggaacaaccauccgcaacaagcacucuaauggcacgauccaugacagaaccgccuuccggggccugauuagcacaccccuugggaccccucccacagucuccaacagcgauuuuaucugcgugggauggucuuccaccacgugucacgacggcauugggcgcaugacaaucugcauucagggaaauaacgauaaugccaccgcuacaguuuauuacaacagacggcugaccaccacaaucaaaacgugggcccgcaacauucucagaacccaagagagcgaaugugugugccauaauggcacaugugcugucgugaugaccgacgggucugccuccggacaggcgcacacaaaggugauguauuuccacaaaggccuggucguuaaggaggaggcccugaaaggcagcgcuaagcauaucgaagagugcucuuguuacgggcacaaccagaaggugaccugcgugugccgggauaauuggcagggagccaaccgcccuaucauugaaaucgacaugaauacgcucgagcauacauccagauaugucuguaccggcauucugaccgauacaagccggccgggggacaaacccaccggagauugcuccaacccuaucacaggcucucccggggcuccuggagugaagggcuuuggcuuccuuaauggggacaacacguggcugggacgcaccauuagccccagaucccggagcggcuuugaaaugcucaaaaucccgaaugccgggaucgauccuaacucucgcauugcggagagacaagagaucguugacaauuccaacuggagcggauacucuggcagcuucauugacuacuggaaugauaacuccgaauguuauaaucccugcuuuuacguggagcugauccgggggagaccugaagaggccaaguaugucugguggacaucuaacagccuuauugcucuguguggcucccccuuccccgugggaagcggcucuuuuccugacggggcccagauccaguacuucuccuga

SEQ ID NO: 215739 - RNA, 1356 nt, Artificial Sequence; identical to SEQ ID NO: 215715
  derived and/or modified CDS sequence (opt5) from neuraminidase__InfluenzaA__AGQ81914

SEQ ID NO: 215740 - RNA, 1356 nt, Artificial Sequence; identical to SEQ ID NO: 215715
  derived and/or modified CDS sequence (opt5) from neuraminidase__InfluenzaA__AGQ81915

SEQ ID NO: 215741 - RNA, 1416 nt, Artificial Sequence
  derived and/or modified CDS sequence (opt5) from neuraminidase__InfluenzaA__AGQ81917
augaaccccaaucagaagcuguucgcccucagcggcguggcuaucgcccuguccguccuuaaccugcucauugggcugucuaauguuggacuuaacgugagccugcaccucaaagagaccggcccuaagcaagaagagaaucugacaugcaugacgaucaaccagaauaacaccacaguggucgaaaauaccuacgugaacaauacaaccauuaucacaaaagagaccgaacuggagacgccgaacuaucuccugcuuaauaagucccuguguaacguugagggguggguggucguggcgaaagacaaugcuguuagauuuggagaaucugagcagauuaucgugacccgggaacccuacgucagcugcgauccuaacggcuguaagauguaugcccuccaucaggggacaaccauccgcaacaagcacuccaauggaacaauucaugacagaaccgccuuccggggccugaucucuacgccccuuggcacaccucccaccgugagcaacuccgauuuuauuugcgugggguggagcucuacaaccugucacgacggaaucggccgcaugaccauuugcauccaagggaauaacgauaaugcuacagccacggucuacuauaacagacggcugaccacaaccauuaaaacaugggcucgcaauauccucagaacccaggaguccgaguguguuugccauaacggaacgugugccguggugaugacagacggcagcgcgucuucccaggcccacaccaaggucauguacuuccacaaagggcuggugaucaaggaagaggcucugaaaggaagcgccaagcauauugaagagugcucuuguuauggccacaaucagaagguuaccugcgugugccgggauaacuggcaaggcgcuaaucgcccuaucauugaaaucgacaugaacacacucgagcauaccuccagauacgucuguacagggauucugacggauaccagccggccgggagacaaacccacaggcgauugcuccaauccuaucaccgggucucccggagccccuggcgugaagggguuuggauuccuuaacggcgacaauacauggcugggccgcaccaucagccccagaucccggagcggguuugagaugcucaaaauuccgaacgcgggaaucgauccuaacucucgcauugccgaaagacaggagaucguugacaauuccaacuggagcggcuacucugggagcuucauugacuauuggaaugauaacuccgaauguuacaaucccugcuuuuauguggagcugauccggggaagaccugaagaggcuaaguacgucugguggacgucuaacagccuuaucgcccuguguggcucccccuuccccguggggagcggcucuuuuccugacggagcucagauucaguauuucuccuga

SEQ ID NO: 215742 - RNA, 1356 nt, Artificial Sequence
  derived and/or modified CDS sequence (opt5) from neuraminidase__InfluenzaA__AGQ81918
augaaccccaaucagaagcuguucgcccucagcggcguggcuaucgcccuguccguccuuaaccugcucauugggcugucuaauguuggacuuaacgugagccugcaccucaaagagaccggcccuaagcaagaagagaaucugacaugcaugacgaccaaagaaacagagcuggggaccccguccuaccuccugcuuaacaagggacuguguaauguggaaggcugggucgugaucgcgaaagacaacgcuguuagauuuggggagucugagcagauuaucauuacacgggaacccuaugugagcugcgauccuaauggauguaagauguacgcccuccaucagggcaccacaauccgcaacaagcacuccaauggcaccauccaugacagaacggccuuccgggggcugauuucuacaccccuuggaaccccucccaccgucagcaacuccgauuuuaucugcgugggcuggagcucuacaaccugucacgacgggauuggacgcaugacgaucugcauucagggcaauaacgauaaugcuacagccaccguuuauuacaacagacggcugacaaccaccaucaaaacaugggcucgcaacauucucagaacgcaagaguccgaaugugugugccauaaugggaccugugccgucgugaugacagacggaagcgcgucuucccaggcccacaccaaggugauguauuuccacaaaggccuggucguuaaggaggaggcucugaaaggcagcgccaagcauaucgaagagugcucuuguuacgggcacaaccagaaggugacaugcgugugccgggauaauuggcagggagcuaaccgcccuaucauugaaaucgacaugaauacccucgagcauacguccagauaugucuguacaggcauucugaccgauaccagccggccgggggacaaacccacaggagauugcuccaacccuaucaccggcucucccggggccccuggagugaagggcuuuggcuuccuuaauggggacaacacauggcugggacgcacgauuagccccagaucccggagcggcuuugaaaugcucaaaaucccgaaugcggggaucgauccuaacucucgcauugccgagagacaagagaucguugacaauuccaacuggagcggauacucuggcagcuucauugacuacuggaaugauaacuccgaauguuauaaucccugcuuuuacguggagcugauccgggggagaccugaagaggcuaaguaugucugguggaccucuaacagccuuauugcccuguguggcucccccuuccccgugggaagcggcucuuuuccugacggggcucagauccaguacuucuccuga

SEQ ID NO: 215743 - RNA, 1356 nt, Artificial Sequence; identical to SEQ ID NO: 215715
  derived and/or modified CDS sequence (opt5) from neuraminidase__InfluenzaA__AGQ81919

SEQ ID NO: 215744 - RNA, 1356 nt, Artificial Sequence; identical to SEQ ID NO: 215715
  derived and/or modified CDS sequence (opt5) from neuraminidase__InfluenzaA__AGQ81920

SEQ ID NO: 215745 - RNA, 1356 nt, Artificial Sequence
  derived and/or modified CDS sequence (opt5) from neuraminidase__InfluenzaA__AGQ81921
augaaccccaaucagaagcuguucgcccucagcggcguggcuaucgcccuguccguccuuaaccugcucauugggcugucuaauguuggacuuaacgugagccugcaccucaaagagaccggcccuaagcaagaagagaaucugacaugcaugacgaccaaagaaacagagcuggggaccccguccuaccuccugcuuaacaagucucuguguaauguggaaggaugggucgugaucgcgaaagacaacgcuguuagauuuggcgagagcgagcagauuaucauuacacgggaacccuauguguccugcgauccuaauggguguaagauguacgcccuccaucagggaaccacaauccgcaacaagcacucuaauggcaccauccaugacagaacggccuuccggggccugauuagcacaccccuugggaccccucccaccgucuccaacagcgauuuuaucugcgugggauggucuuccacaaccugucacgacggcauugggcgcaugacgaucugcauucagggaaauaacgauaaugcuacagccaccguuuauuacaacagacggcugacaaccaccaucaaaacaugggcucgcaacauucucagaacgcaagagagcgaaugugugugccauaauggcaccugugccgucgugaugacagacgggucugcguccggacaggcccacaccaaggugauguauuuccacaaaggccuggucguuaaggaggaggcucugaaaggcagcgccaagcauaucgaagagugcucuuguuacgggcacaaccagaaggugacaugcgugugccgggauaauuggcagggagcuaaccgcccuaucauugaaaucgacaugaauacccucgagcauacguccagauaugucuguacaggcauucugaccgauaccagccggccgggggacaaacccacaggagauugcuccaacccuaucaccggcucucccggggccccuggagugaagggcuuuggcuuccuuaauggggacaacacauggcugggacgcacgauuagccccagaucccggagcggcuuugaaaugcucaaaaucccgaaugcggggaucgauccuaacucucgcauugccgagagacaagagaucguugacaauuccaacuggagcggauacucuggcagcuucauugacuacuggaaugauaacuccgaauguuauaaucccugcuuuuacguggagcugauccgggggagaccugaagaggcuaaguaugucugguggaccucuaacagccuuauugcccuguguggcucccccuuccccgugggaagcggcucuuuuccugacggggcucagauccaguacuucuccuga

SEQ ID NO: 215746 - RNA, 1356 nt, Artificial Sequence; identical to SEQ ID NO: 215715
  derived and/or modified CDS sequence (opt5) from neuraminidase__InfluenzaA__AGQ81922

SEQ ID NO: 215747 - RNA, 1356 nt, Artificial Sequence; identical to SEQ ID NO: 215745
  derived and/or modified CDS sequence (opt5) from neuraminidase__InfluenzaA__AGQ81923

SEQ ID NO: 215748 - RNA, 1356 nt, Artificial Sequence
  derived and/or modified CDS sequence (opt5) from neuraminidase__InfluenzaA__AGQ81924
augaaccccaaucagaagcuguucgcccucagcggcguggcuaucgcccuguccguccuuaaccugcucauugggcugucuaauguuggacuuaacgugagccugcaccucaaagagaccggcccuaagcaagaagagaaucugacaugcaugacgaccaaagaaacagagcuggggaccccguccuaccuccugcuuaacaagucucuguguaauguggaaggaugggucgugaucgcgaaagacaacgcuguuagauuuggcgagagcgagcagauuaucauuacacgggaacccuauguguccugcgauccuaauggguguaagauguacgcccuccaucagggaaccacaauccgcaacaagcacucuaauggcaccauccaugacagaacggccuuccggggccugauuagcacaccccuugggaccccucccaccgucuccaacagcgauuuuaucugcgugggauggucuuccacaaccugucacgacggcauugggcgcaugacgaucugcauucagggaaauaacgauaaugcuacagccaccguuuauuacaacagacggcugacaaccaccaucaaaacaugggcucgcaacauucucagaacgcaagagagcgaaugugugugccauaauggcaccugugccgucgugaugacagacgggucugcgaacucccaggcccacaccaaggugauguauuuccacaaaggacuggucguuaaggaggaggcucugaaaggcagcgccaagcauaucgaagagugcucuuguuacggccacaaucagaaggugacaugcgugugccgggauaacuggcagggggcuaaucgcccuaucauugaaaucgacaugaacacccucgagcauacguccagauaugucuguacaggcauucugaccgauaccagccggccgggagacaaacccacaggggauugcuccaauccuaucaccggaucucccggcgccccuggggugaagggauuuggcuuccuuaacggcgacaauacauggcuggggcgcacgauuagccccagaucccggagcggauuugaaaugcucaaaaucccgaacgcgggcaucgauccuaauucucgcauugccgagagacaagagaucguugacaacuccaauuggagcggguacucuggcagcuucauugacuacuggaacgauaauuccgaauguuauaaccccugcuuuuacguggagcugauccggggaagaccugaagaggcuaaguaugucugguggaccucuaacagccuuauugcccugugugggucccccuuccccgugggcagcggaucuuuuccugacggcgcucagauccaguacuucuccuga

SEQ ID NO: 215749 - RNA, 1356 nt, Artificial Sequence; identical to SEQ ID NO: 215715
  derived and/or modified CDS sequence (opt5) from neuraminidase__InfluenzaA__AGQ81925

SEQ ID NO: 215750 - RNA, 1356 nt, Artificial Sequence; identical to SEQ ID NO: 215715
  derived and/or modified CDS sequence (opt5) from neuraminidase__InfluenzaA__AGQ81926

SEQ ID NO: 215751 - RNA, 1356 nt, Artificial Sequence; identical to SEQ ID NO: 215715
  derived and/or modified CDS sequence (opt5) from neuraminidase__InfluenzaA__AGQ81927

SEQ ID NO: 215752 - RNA, 1356 nt, Artificial Sequence; identical to SEQ ID NO: 215715
  derived and/or modified CDS sequence (opt5) from neuraminidase__InfluenzaA__AGQ81928

SEQ ID NO: 215753 - RNA, 1356 nt, Artificial Sequence; identical to SEQ ID NO: 215715
  derived and/or modified CDS sequence (opt5) from neuraminidase__InfluenzaA__AGQ81929

SEQ ID NO: 215754 - RNA, 1413 nt, Artificial Sequence
  derived and/or modified CDS sequence (opt5) from neuraminidase__InfluenzaA__AGQ81930
augaaccccaaucagaagaucauuaccaucggcagcauuucccuggggcucguggucuucaacguucugcuucacguggugucuaucauugucacagugcugguucucggaagaggcgggaauagcggaaucugcaacgagacggugguccgggaauacaaugagaccgugcgcaucgagaaaauuacacaauggcauaacaccuccguuguggaauaugucccuuacuggucugaaggcaauuauaugaacaauacagaggccaucugugacgugaagggguuugcuccguucagcaaagauaacggaauuagaaucggcucccggggccacguguuugucauucgcgagcccuucguuucuugcagcccuaccgaauguagaacauuuuuccugacccaggggucccuucugaaugacaagcauagcaacggaacggugaaagaucggucucccuuucgcacccucauguccguggaggucggccagagcccuaauguguaccaggccagauucgaagcgguugcuuggucugccacagccugccacgacgggaagaaguggaugaccaucggagugacaggccccgauuccaaagcugucgccgugguucauuaugggggagugccuaccgacgucgugaacagcugggcuggcgauauucugcggacgcaagagucuuccuguacaugcauccagggcaauuguuacugggucaugaccgacgggccggccaaccgccaggcgcaguauagaaucuacaaggccaaccaaggaaaaauugugggccagacagauaucagcuuuaaugggggacacauugaggaaugcuccuguuaccccaacgacggcaagguugagugcgugugucgggauaauuggaccgggaccaaccgcccuguccuggugaucucucccgaccucagcuauagaguuggauaccugugcgcuggccuuccuuccgauacaccccggggcgaagacgcccaguucacggggagcugcaccucuccgaugggaaaucagggcuauggggugaaaggauuuggcuuccgccaagggacagacgucuggaugggcagaaccauuucccggacaagcagaucuggauuugagauccugcgcaucaagaacggcuggacccagacgagcaaggaacaggugcggaaacaagugguugucgauaaucucaacugguccggguacucuggaucuuucacacugccuguggagcuuuccggcaaggacugucuggugcccugcuucugggucgagaugauuagagggaaaccugaagagaagaccaucuggaccagcagcuccagcauugugauguguggaguugauuaugaaguggcugacuggucuuggcacgauggcgccauccuccccuuugacauugauaaaauguga

SEQ ID NO: 215755 - RNA, 1413 nt, Artificial Sequence
  derived and/or modified CDS sequence (opt5) from neuraminidase__InfluenzaA__AGQ81931
augaaccccaaucagaagaucauuaccaucggcagccugucccucgggcuggugguccuuaacauucugcuccacaucauuucuaucacaaucacgguucuggugauuccuagaaauggaaacaccggcagcugcaaugagacagugauccgggaauacaacgagaccguccgcauugagaaaaucacacaauggcauaauaccaacauuaucgaauauauugaaaagccggagaaugaccuuuucaugaacaauacagggccccugugugaugccaaaggauuugcuccuuucuccaaggacaacggcaucagaaucgggucuaaaggacacguguuuguuauucgggagcccuucgugagcugcuccccuaccgaaugucgcacguuuuuccucacccagggcucucugcugaaugauaagcauagcaacggcacagucaaggacagaucccccuaccggacccucaugagcguggagaucgggcagucuccuaauguuuaucaggcccgcuuugaagcgguggcuugguccgccacagccugccacgauggcaaaaaguggaugaccauuggagucacggggccggacgcuaaagccguggcugugguccauuacggaggcauccccacagauguuauuaacagcugggccggggacauccugagaacccaagagucuuccuguacaugcauccagggagaguguuauugggugaugaccgauggcccugcgaaccggcaggcccaguaccgcgcuuucaaggccaaacaaggcaagauuaucgggcagaccgaaauuagcuuuaauggaggccacaucgaggaaugcucuuguuaucccaacgaggggaagguggaaugcgucuguagagacaauuggacaggaacgaaccggccugugcuuguuauuuccagcgaucuguccuaccgcgugggcuaccucugcgcugggcugcccucugacaccccgagaggagaggauagccaguucacaggcuccugcaccagcccuaugggcaaucagggguauggagucaaaggcuuuggguuccggcaaggaaacgacguguggaugggccgcacaaucucuagaaccucccggagcggguuugagauccuuaagauuagaaauggcuggauccagaacucuaaagaacagauuaagcgccaaguuguggucgacaauagcaacugguccggauacucuggcagcuucacgcugcccguggagcucacacggagaaauugucuggucccuugcuucuggguggaaaugauccgcgggaaacccgaggaaaagaccauuuggaccuccucuagcuccaucguuauguguggaguggaucacgagauugccaacuggagcuggcaugacggcgcgauccugcccuuugauaucgacaaaauguga

SEQ ID NO: 215756 - RNA, 1413 nt, Artificial Sequence
  derived and/or modified CDS sequence (opt5) from neuraminidase__InfluenzaA__AGQ81932
augaaccccaaucagaagaucauuaccaucggcagcauuucccuggggcucguggucuucaacguucugcuucacguggugucuaucauugucacagugcugauccucggaagaggcgggaauaacggaaucugcaaugagacgguugugcgggaauacaacgagaccguccgcauugagaaaaucacacaauggcauaauaccagcgugguugaauaugugccuuacuggaacgaaggcacauauaugaauaacaccgaggccauuugugacgucaagggguuugcuccguucuccaaagauaauggaaucagaauuggcucucggggccacguguuugugauccgcgagcccuucgucagcugcuccccuacagaauguagaaccuuuuuccugacgcaggggucucuucugaacgacaagcauagcaauggaaccguuaaagaucggucccccuuucgcacacucaugagcguggaggugggccagucuccuaacgucuaccaggccagauucgaagcgguggcuugguccgccaccgccugccacgacgggaagaaguggaugacaauuggaguuaccggcagcgauucuaaagcuguggccgucgugcauuaugggggaguucccacggacguggucaauuccugggcuggcgauauccugcggacacaagagagcucuuguaccugcauccagggcaacuguuacugggugaugacagacgggccugccaaccgccaggcgcaguauagaauuuacaaggccaaucaaggaaaagucaucggccagaccgauauuuccuuuaacgggggacacaucgaggaaugcagcuguuacccgaaugacggcaagguggagugcguuugucgggauaacuggaccgggacaaaucgccccgugcuggucauuuccccugaccucucuuauagagugggauaccugugcgcuggccuucccagcgauacgccucggggcgaagacgcccaguucaccggguccugcacaagccccaugggaaaccagggcuaugggguuaaaggauuuggcuuccgccaagggaccgacguguggaugggcagaacaaucucucagaccucccggagcggauuugagauccugagagucaagaauggcuggacgcagacaucuaaggaacaagugcgcaaacaggugguugucgauaaccucaauuggagcggguacuccggaucuuucacccugccgauugagcuuagcggcaaggacugucuggugccuugcuucuggguggagaugauccgggggaaacccgaagagaaguccauuuggaccucuagcuccagcaucgucauguguggaguggauuaugaaguugcugacuggucuuggcacgauggcgccauucucccuuuugacaucgauaaaauguga

SEQ ID NO: 215757 - RNA, 1413 nt, Artificial Sequence
  derived and/or modified CDS sequence (opt5) from neuraminidase__InfluenzaA__AGQ81934
augaaccccaaucagaagauccugugcaccagcgccacagcuauugugaucggcacgauugccguccucaucgggauugcgaaccugggacuuaauaucggccugcaccucaaaccuuccuguaacugcucucauagccaaccggagaccacaaauaccucccagacaaucauuaacaauuacuauaacgaaaccaauaucacacagauuucuaacaccaauauccagauggaggaaagagcuagccgggacuucaacaaucugacgaaggggcuuuguaccauuaacuccuggcacaucuacggaaaagauaaugccguucgcauuggcgagaacucugacgugcuggugacaagagaacccuaugucagcugcgauccugacgagugucgguuuuacgcccucucccaagggaccacaauccgcggaaagcauagcaacggcaccauccacgauagaucucaguaucgggcucugauuuccuggccccugagcucuccucccacgguguacaauucccgcguugagugcaucggcuggagcucuacauccugucaugacgggaaaagcagaauguccauuugcaucucuggaccuaacaauaacgccagcgcuguggucugguauaaucggcgcccgguggccgaaauuaacaccugggcgagaaauauccuccggacacaggaguccgaauguguuugccacaacggcgugugucccgucguguucaccgaugggagcgccaccggaccugcugacacacgcaucuacuacuuuaaggagggccggauucugaagugggagucucuuacggggaccgccaaacacaucgaagagugcuccugcuauggagaaagaacaggcauuaccuguacaugccgcgauaauuggcagggcagcaacagacccgugauccggauugacccugucgcuaugacccauacgucucaauacaucuguagccccguucugacagauaauccgagaccuaacgaccccaauguggggaagugcaacgauccuuaucccggaaauaacaacaauggcgugaaaggguucuccuaccucgacggagucaacaccuggcugggccgcaccaucucuacagccagccgguccggguaugagaugcuuaaggugcccaaugcgcugaccgacgauagaagcaaaccuauucagggacagacaaucguucucaacacggacuggucuggcuacuccggcagcuuuauggauuauugggccgaaggggacuguuaccgcgcuugcuucuacguggagcugauucggggaagaccgaaggaggauaaggucugguggaccucuaauuccaucgugagcauguguuccucuacagaauuucugggccagugggacuggcccgauggggccaaaauugaguauuuccucuga

SEQ ID NO: 215758 - RNA, 1413 nt, Artificial Sequence; identical to SEQ ID NO: 215757
  derived and/or modified CDS sequence (opt5) from neuraminidase__InfluenzaA__AGQ81935

SEQ ID NO: 215759 - RNA, 1413 nt, Artificial Sequence; identical to SEQ ID NO: 215757
  derived and/or modified CDS sequence (opt5) from neuraminidase__InfluenzaA__AGQ81936

SEQ ID NO: 215760 - RNA, 1413 nt, Artificial Sequence; identical to SEQ ID NO: 215757
  derived and/or modified CDS sequence (opt5) from neuraminidase__InfluenzaA__AGQ81937

SEQ ID NO: 215761 - RNA, 1413 nt, Artificial Sequence; identical to SEQ ID NO: 215757
  derived and/or modified CDS sequence (opt5) from neuraminidase__InfluenzaA__AGQ81938

SEQ ID NO: 215762 - RNA, 1413 nt, Artificial Sequence; identical to SEQ ID NO: 215757
  derived and/or modified CDS sequence (opt5) from neuraminidase__InfluenzaA__AGQ81939

SEQ ID NO: 215763 - RNA, 1413 nt, Artificial Sequence
  derived and/or modified CDS sequence (opt5) from neuraminidase__InfluenzaA__AGQ81940
augaaccccaaucagaagauccugugcaccagcgccacagcuauuaucauuggcgccaucgcggugcucauugggaucgcuaaccugggacuuaauaucggccugcaccucaaaccuuccuguaacugcucucauagccaaccggagacgaccaauacaucccagaccauuaucaacaauuacuauaacgaaacaaauauuacccagaucucuaacacaaauauucagauggaggaaagagccagcaagggguucaacaaucugaccaaaggacuuuguacgaucaacuccuggcacauuuacggcaaggacaaugccguccggaucggggagucuagcgauguucuggugacccgcgaacccuauguguccugcgacccugaugaguguagauuuuacgcucucagccaaggaacaaccauccggggcaaacauucuaacggcacaauucacgaccgcucccaguauagagcccugaucagcuggccccugucuuccccucccaccgucuacaacagccggguggagugcauuggguggucuuccacgagcugucaugauggaaagucccgcaugucuaucugcauuagcggcccuaauaacaaugcuuccgccguugugugguauaacagacggccggucgcggaaaucaauacaugggcccgcaacauccucagaacccaggagagcgaaugugugugccacaaugggguuugucccguggucuucacagacggaucugcuaccggcccugccgauacccggauuuacuacuuuaaggaggggaaaauccugaagugggagucccuugcuggaacagccaaacacauugaagagugcagcugcuauggcgaacgcacgggcaucaccuguacaugcagagacaacuggcaggggucuaaucggcccgugauucaaaucgauccuguggcgaugacccauacaagccaguacaucuguucccccguccugaccgacaacccgcgcccuaaugaucccaacauuggaaagugcaaugacccuuaucccggcaacaauaacaacgggguuaaaggauucucuuaccucgauggcgccaauacguggcuggggagaacaaucagcaccgcuucccggagcggauaugagaugcuuaaggugcccaacgcccugaccgacgacagaucuaagccuauucagggccagacaaucgugcucaauaccgauugguccggcuacagcgggucuuuuauggacuauugggcugaaggagauuguuaccgcgccugcuucuacgucgagcugauucggggcagaccgaaagaggacaaggugugguggacauccaacagcaucguuuccauguguucuagcacggaauuucuggggcaauggaauuggcccgauggagccaaaauugaguauuuccucuga

SEQ ID NO: 215764 - RNA, 1413 nt, Artificial Sequence
  derived and/or modified CDS sequence (opt5) from neuraminidase__InfluenzaA__AGQ81941
augaaccccaaucagaagauccugugcaccagcgccacagcuauuaucauuggcacgaucgccgugcucauuggggucgcgaaccugggacuuaauaucggccugcaccucaaaccuggguguaacugcucccauucucaaccggaggcuaccaauacaagccagaccaucauuaacaauuacuauaacgaaacaaauaucacccagauuuccaacacaaauauccagauggaggaaagacccaaccggggauucaauaaccugaccaagggccuuuguacgauuaauucuuggcacaucuacgggaaagacaacgccguucgcauuggagagaacagcgaugugcuggugaccagagaaccuuaugucuccugcgaccccgaugagugucgguuuuacgcccucucucaaggcacaaccauccgcggcaagcauagcaaugggacaauccacgacagaucccaguaucgggcucugauuagcuggccucugucuuccccucccaccguguacaacagccgcguugagugcaucggauggucuuccacgagcugucaugauggcaaaucuagaauguccauuugcaucagcgggccgaauaacaaugccuccgcuguggucugguauaaccggcgccccguggccgaaauuaauacaugggcgagaaacauccuccggacccaggagucugaauguguuugccacaauggaguguguccugucguguucacagacggcagcgccaccgggcccgcugauacccgcguguacuacuuuagagagggaaagauccugaagugggagucccuuacaggcacggcccggcacauugaagagugcagcugcuauggcgaacgcaccgggaucacauguaccugcagagacaacuggcagggaucuaaucggccugucauucaaaucgaucccguugcuaugacacauaccucccaguacauuuguagcccggugcugacggacaacccuagacccaaugauccuaacgugggcaaaugcaaugaccccuaucccgggaacaacaauaacggagucaagggcuucucuuaccucgauggggugaauacauggcugggacgcaccaucagcaccgccucccggucuggcuaugagaugcuuaaaguuccuaacgcgcugacagacgacagaagcaagccgauccagggccagaccauugugcucaauacagauugguccggguacagcggaucuuuuauggacuauugggccgaaggcgauuguuaccgcgcuugcuucuacgucgagcugauccgggggagacccaaagaggacaaggugugguggacguccaacagcauuguuucuauguguuccagcaccgaauuucugggacaaugggauuggccugacggcgccaagaucgaguauuuccucuga

SEQ ID NO: 215765 - RNA, 1413 nt, Artificial Sequence
  derived and/or modified CDS sequence (opt5) from neuraminidase__InfluenzaA__AGQ81942
augaaccccaaucagaagauccugugcaccagcgccacagcuauuaucauuggcacgaucgccgugcucauuggggucgcgaaccugggacuuaauaucggccugcaccucaaaccuggguguaacugcucccauucucaaccggaggcuaccaauacaagccagaccaucauuaacaauuacuauaacgaaacaaauaucacccagauuuccaacacaaauauccagauggaggaaagacccucucggggauucaacaaucugaccaagggccuuuguacgauuaacagcuggcacaucuacgggaaagacaaugccguucgcauuggagagaacuccgaugugcuggugaccagagaaccuuaugucucuugcgaccccgaugagugucgguuuuacgcccucagccaaggcacaaccauccgcggcaagcauuccaacgggacaauccacgacagaagccaguaucgggcucugauuucuuggccucuguccucucccccuaccguguacaauagccgcguugagugcaucggaugguccagcacgucuugucaugauggcaaauccagaaugagcauuugcaucuccgggccgaacaauaacgccucugcuauugugugguauaaucggcgccccgucgccgaaaucaacacaugggcgagaaauauccuccggacccaggagagcgaaugugugugccacaacggaguuuguccuguggucuucacagacggcuccgccaccgggcccgcugauacccgcguguacuacuuuagagagggaaagauucugaagugggagagccuuacaggcacggcccggcacaucgaagagugcucuugcuauggcgaacgcaccgggauuacauguaccugcagagacaauuggcagggauccaaccggccugugauccaaauugaucccgucgcuaugacacauaccagccaguacaucuguucuccgguucugacggacaauccuagacccaacgauccuaaugugggcaaaugcaacgaccccuaucccgggaauaacaacaauggagugaagggcuucagcuaccucgauggggucaacacauggcugggacgcaccaucuccaccgccucucggagcggcuaugagaugcuuaaagugccuaaugcgcugacagacgacagauccaagccgauucagggccagaccaucauucucaacacagauuggagcggguacucuggauccuuuauggacuauugggccgaaggcgauuguuaccgcgcuugcuucuacguugagcugauccgggggagacccaaagaggacaaggugugguggacgagcaauucuauugucuccauguguagcuccaccgaauuucugggacaaugggauuggccugacggcgccaagaucgaguauuuccucuga

SEQ ID NO: 215766 - RNA, 1413 nt, Artificial Sequence
  derived and/or modified CDS sequence (opt5) from neuraminidase__InfluenzaA__AGQ81943
augaaccccaaucagaagauccugugcaccagcgccacagcuauuaucauuggcgccaucgcggugcucauugggaucgcuaaccugggacuuaauaucggccugcaccucaaaccuuccuguaacugcucucauagccaaccggagacgaccaauacaucccagaccauuaucaacaauuacuauaacgaaacaaauauuacccagaucucuaacacaaauauucagauggaggaaagaaccagccggggguucaacaaucugacgaagggacuuuguaccaucaacuccuggcacauuuacggcaaagacaaugccauccgcaucggggagucuagcgauguccugguuacaagagaacccuauguguccugcgacccugaugagugucgguuuuacgcccucagccaaggaaccacaauucgcggcaagcauucuaacggcaccauccacgacagaucccaguaucgggcucugauuagcuggccccugucuuccccucccacgguguacaacagccgcgucgagugcaucggguggucuuccacaagcugucaugauggaaaauccagaaugucuauuugcaucagcggcccuaauaacaaugccuccgcugugguuugguauaaccggcgcccgguggccgaaaucaauaccugggcgagaaacauucuccggacacaggagagcgaaugugucugccacaauggggugugucccguuguguucaccgacggaucugccaccggcccugcugauacacgcaucuacuacuuuaaggaggggcggauucugaagugggagucccuuacgggaaccgccaaacacaucgaagagugcagcugcuauggcgaaagaacaggcauuaccuguacaugccgcgacaacuggcaggggucuaauagacccgucauccaaaucgauccuguggcuaugacccauacgagccaguacauuuguucccccgugcugacagacaacccgcggccuaaugaucccaacaucggaaagugcaaugacccuuaucccggcaacaauaacaacggggucaaaggauucucuuaccucgauggcgccaauaccuggcuggggagaaccauuagcacagcgucccgcagcggauaugagaugcuuaagguucccaacgcccugaccgacgaccggucuaaaccuauccagggccagacaauugugcucaauacggauugguccggcuacagcgggucuuuuauggacuauugggcugaaggagauuguuacagagccugcuucuacguggagcugauccgcggccggccgaaggaggacaaggucugguggaccuccaacagcauuguguccauguguucuagcacagaauuucuggggcaauggaauuggcccgauggagcuaaaaucgaguauuuccucuga

SEQ ID NO: 215767 - RNA, 1413 nt, Artificial Sequence; identical to SEQ ID NO: 215757
  derived and/or modified CDS sequence (opt5) from neuraminidase__InfluenzaA__AGQ81944

SEQ ID NO: 215768 - RNA, 1413 nt, Artificial Sequence
  derived and/or modified CDS sequence (opt5) from neuraminidase__InfluenzaA__AGQ81947
augaaccccaaucagaagauccugugcaccagcgccacagcucucgugauuggcacgaucgccguccugauugggaucgcgaaccuuggacugaauauuggccuccaccugaaaccuuccuguaacugcucucauagccaaccggaggcuaccaauacaucccagaccaucaucaacaauuacuauaacgaaacaaauauuacccagaucucuaacacaaauauucagauggaggaaagagccagccgguccuucaacaaucuuaccaaggggcuguguacgaucaacucuuggcacauuuacggaaaagacaaugccauccgcauuggcgagaacagcgauguucucgugaccagagaacccuauguguccugcgacccugaugagugucgguuuuacgcucugagccaagggacaaccauccgcggaaagcauucuaacggcacaauccacgacagaucccaguaucgggcccugauuagcuggccccucucuuccccucccaccgucuacaauagccgcguggagugcaucggcuggucuuccacgagcugucaugaugggaaauccagaaugucuauuugcaucagcggaccuaacaauaacgcuuccgccguugugugguauaaucggcgcccggucgcggaaauuaacacaugggccagaaauauccugcggacccaggagagcgaaugugugugccacaacggcguuugucccguggucuucacagacgggucugcuaccggaccugccgauacccgcaucuacuacuuuaaggagggcaagauucuuaaaugggagucccugacagggacggcuaagcacaucgaagagugcagcugcuauggagaaagaaccggcauuacauguaccugccgggacaauuggcagggcucuaaccgccccgugauccaaauugauccuguggccaugacacauaccagccaguacaucuguucccccguccucacggacaauccgagaccuaacgaucccaauguugggaaaugcaacgacccuuaucccggaaauaacaacaauggcgugaagggguucucuuaccuggauggagugaacacauggcuuggccggaccaucagcaccgcguccagaagcggguaugagaugcugaaaguccccaaugcccucacagacgaccgcucuaagccuauucagggacagaccaucgugcugaacacagauugguccggcuacagcggcucuuuuauggacuauugggcugaaggggauuguuaccgggccugcuucuacguugagcugauuagaggacgcccgaaggaggacaaagugugguggacguccaauagcaucgucuccauguguucuagcaccgaauuucucggccaauggaacuggcccgauggggcuaagauugaguauuuccuguga

SEQ ID NO: 215769 - RNA, 1413 nt, Artificial Sequence
  derived and/or modified CDS sequence (opt5) from neuraminidase__InfluenzaA__AGQ81948
augaaccccaaucagaagauccugugcaccagcgccacagcuauuaucauuggcgccaucgcggugcucauugggaucgcuaaccugggacuuaauaucggccugcaccucaaaccuuccuguaacugcucucauagccaaccggagacgaccaauacaucccagaccauuaucaacaauuacuauaacgaaacaaauauuacccagaucucuaacacaaauauucagauggaggaaagaaccagccggggguucaacaaucugacgaagggacuuuguaccaucaacuccuggcacauuuacggcaaagacaaugccauccgcaucggggagucuagcgauguccugguuacaagagaacccuauguguccugcgacccugaugagugucgguuuuacgcccucagccaaggaaccacaauucgcggcaagcauucuaacggcaccauccacgacagaucccaguaucgggcucugauuagcuggccccugucuuccccucccacgguguacaacagccgcgucgagugcaucggguggucuuccacaagcugucaugauggaaaauccagaaugucuauuugcaucagcggcccuaauaacaaugccuccgcugugguuugguauaaccggcgcccgguggccgaaaucaauaccugggcgagaaacauucuccggacacaggagagcgaaugugucugccacaauggggugugucccguuguguucaccgacggaucugccaccggcccugcugauacacgcaucuacuacuuuaaggaggggcggauucugaagugggagucccuuacgggaaccgccaaacacaucgaagagugcagcugcuauggcgaaagaacaggcauuaccuguacaugccgcgacaacuggcaggggucuaauagacccgucauccaaaucgauccuguggcuaugacccauacgagccaguacauuuguucccccgugcugacagacaacccgcggccuaaugaucccaacaucggaaagugcaaugacccuuaucccggcaacaauaacaacggggucaaaggauucucuuaccucgauggcgccaauaccuggcuggggagaaccauuagcacagcgucccgcagcggauaugagaugcuuaagguucccaacgcccugaccgacgaccggucuaaaccuauccagggccagacaauugugcucaauacggauugguccggcuacagcgggucuuuuauggacuauugggcugaaggagaguguuacagagccugcuucuacguggagcugauccgcggccggccgaaggaagauaaggucugguggaccuccaacagcauuguguccauguguucuagcacagaguuucuggggcaauggaauuggcccgacggagcuaaaaucgaauauuuccucuga

SEQ ID NO: 215770 - RNA, 1413 nt, Artificial Sequence
  derived and/or modified CDS sequence (opt5) from neuraminidase__InfluenzaA__AGQ81951
augaaccccaaucagaagauccugugcaccagcgccacagcuauugugaucggcacgauugccguccucaucgggguugcgaaccugggacuuaauauuggccugcaccucaaaccuggguguaacugcucccaaucucagccggaggcuaccaauacaagccagaccaucaucaacaauuacuauaacgaaacaaauauuacccagaucuccaacacaaauauucaaauggaggaaagagccaaccggggauucaauaaccugaccaagggccuuuguacgaucaauucuuggcauauuuacgggaaagacaacgccgugcgcaucggagagaacagcgaugugcuggucaccagagaacccuauguguccugcgacccugaugagugucgguuuuacgcucucucucagggcacaaccauucgcggcaagcacagcaaugggacaauccaugacagaucccaguaucgggcccugaucagcuggccccugucuuccccucccaccguuuacaacagccgcguggagugcauuggauggucuuccacgagcugucacgauggcaaaucuagaauguccaucugcauuagcgggccuaauaacaaugcuuccgccgucgugugguauaaccggcgcccgguugcggaaaucaauacaugggccagaaacauucuccggacccaggagucugaaugugugugccauaauggagucugucccgugguguucacagacggcagcgcuaccgggccugccgauacccgcgucuacuacuuuagagagggaaagauccugaagugggagucccuuacaggcacggcuaaacacaucgaagagugcagcugcuauggcgaacggaccgggauuacauguaccugccgcgacaacuggcaaggaucuaauagacccguuauccagauugauccuguggccaugacacacaccucccaguacaucuguagccccgugcugacggacaacccgcggccuaaugaucccaacgucggcaagugcaaugacccuuaucccgggaacaacaauaacggagugaaaggcuucucuuaccucgaugggguuaauacauggcugggaagaaccauuagcaccgcgucccgcucuggcuaugagaugcuuaaggugcccaacgcccugacagacgaccggagcaaaccuauccagggccaaaccaucguccucaauacagauugguccggguacagcggaucuuuuauggacuauugggcugaaggcgauuguuacagagccugcuucuacguggagcugauucgcgggcggccgaaggaggacaagguuugguggacguccaacagcaucgugucuauguguuccagcaccgaauuucugggacaguggaauuggcccgauggcgcuaaaauugaguauuuccucuga

SEQ ID NO: 215771 - RNA, 1413 nt, Artificial Sequence
  derived and/or modified CDS sequence (opt5) from neuraminidase__InfluenzaA__AGQ81952
augaaccccaaucagaagauccugugcaccagcgccacagcuauugugaucggcacgauugccguccucaucgggguugcgaaccugggacuuaauauuggccugcaccucaaaccuggguguaacugcucccauucucaaccggaggcuaccaauacaagccagaccaucaucaacaauuacuauaacgaaacaaauauuacccagaucuccaacacaaauauucagauggaggaaagagccaaccggggauucaauaaccugaccaagggccuuuguacgaucaauucuuggcacauuuacgggaaagacaacgccgugcgcaucggagagaacagcgaugugcuggucaccagagaacccuauguguccugcgacccugaugagugucgguuuuacgcucucucucaaggcacaaccauucgcggcaagcauagcaaugggacaauccacgacagaucccaguaucgggcccugaucagcuggccccugucuuccccucccaccguuuacaacagccgcguggagugcauuggauggucuuccacgagcugucaugauggcaaaucuagaauguccaucugcauuagcgggccuaauaacaaugcuuccgccgucgugugguauaaccggcgcccgguugcggaaaucaauacaugggccagaaacauucuccggacccaggagucugaaugugugugccacaauggagucugucccgugguguucacagacggcagcgcuaccgggccugccgauacccgcgucuacuacuuuagagagggaaagauccugaagugggagucccuuacaggcacggcuaaacacaucgaagagugcagcugcuauggcgaacggaccgggauuacauguaccugccgcgacaacuggcagggaucuaauagacccguuauccaaauugauccuguggccaugacacauaccucccaguacaucuguagccccgugcugacggacaacccgcggccuaaugaucccaacgucggcaagugcaaugacccuuaucccgggaacaacaauaacggagugaaaggcuucucuuaccucgaugggguuaauacauggcugggaagaaccauuagcaccgcgucccgcucuggcuaugagaugcuuaaggugcccaacgcccugacagacgaccggagcaaaccuauccagggccagaccaucguccucaauacagauugguccggguacagcggaucuuuuauggacuauugggcugaaggcgauuguuacagagccugcuucuacguggagcugauucgcgggcggccgaaggaggacaagguuugguggacguccaacagcaucgugucuauguguuccagcaccgaauuucugggacaauggaauuggcccgauggcgcuaaaauugaguauuuccucuga

SEQ ID NO: 215772 - RNA, 1413 nt, Artificial Sequence
  derived and/or modified CDS sequence (opt5) from neuraminidase__InfluenzaA__AGQ81954
augaaccccaaucagaagauccugugcaccagcgccacagcuauugugaucggcacgauugccguccucaucgggguugcgaaccugggacuuaauauuggccugcaccucaaaccuuccuguaacugcucucauagccaaccggaggcuaccaauacaucccagaccaucaucaacaauuacuauaacgaaacaaauauuacccagaucucuaacacaaauauucagauggaggaaagagccagccggggguucaacaaucugaccaagggacuuuguacgaucaacuccuggcacauuuacggcaaagacaaugccgugcgcaucggggagaacucugaugugcuggucaccagagaacccuaugugagcugcgacccugaugagugucgguuuuacgcucucucccaaggaacaaccauucgcggcaagcauagcaacggcacaauccacgacagaucucaguaucgggcccugaucuccuggccccugagcucuccucccaccguuuacaauucccgcguggagugcauuggguggagcucuacguccugucaugauggaaaaagcagaauguccaucugcauuucuggcccuaacaauaacgcuagcgccgucgugugguauaaucggcgcccgguugcggaaaucaacacaugggccagaaauauucuccggacccaggaguccgaaugugugugccacaacggggucugucccgugguguucacagacggaagcgcuaccggcccugccgauacccgcgucuacuacuuuaaggaggggaagauccugaaaugggagucucuuacaggaacggcuaagcacaucgaagagugcuccugcuauggcgaaagaaccggcauuacauguaccugccgggacaauuggcaggggagcaaccgccccguuauccaaauugauccuguggccaugacacauaccucucaguacaucuguagccccgugcugacggacaauccgagaccuaacgaucccaaugucggaaaaugcaacgacccuuaucccggcaauaacaacaauggggugaagggauucuccuaccucgauggcguuaacacauggcuggggcggaccauuucuaccgcgagcagauccggauaugagaugcuuaaagugcccaaugcccugacagacgaccgcagcaagccuauccagggccagaccaucguccucaacacagauuggucuggcuacuccgggagcuuuauggacuauugggcugaaggagauuguuaccgggccugcuucuacguggagcugauuagaggccgcccgaaggaggacaaaguuugguggacgucuaauuccaucgugagcauguguuccucuaccgaauuucuggggcaauggaacuggcccgauggagcuaagauugaguauuuccucuga

SEQ ID NO: 215773 - RNA, 1413 nt, Artificial Sequence
  derived and/or modified CDS sequence (opt5) from neuraminidase__InfluenzaA__AGQ81956
augaaccccaaucagaagauccugugcaccagcgccacagcuauugugaucggcacgauugccguccucaucgggguugcgaaccugggacuuaauauuggccugcaccucaaaccuuccuguaacugcucucauagccaaccggaggcuaccaauacaucccagaccaucaucaacaauuacuauaacgaaacaaauauuacccagaucucuaacacaaauauucagauggaggaaagagccagccggggguucaacaaucugaccaagggacuuuguacgaucaacuccuggcacauuuacggcaaagacaaugccgugcgcaucggggagaacucugaugugcuggucaccagagaacccuaugugagcugcgacccugaugagugucgguuuuacgcucucucccaaggaacaaccauucgcggcaagcauagcaacggcacaauccacgacagaucucaguaucgggcccugaucuccuggccccugagcucuccucccaccguuuacaauucccgcguggagugcauuggguggagcucuacguccugucaugauggaaaaagcagaauguccaucugcauuucuggcccuaacaauaacgcuagcgccaucgucugguauaaucggcgcccgguggcggaaauuaacacaugggccagaaauauccuccggacccaggaguccgaauguguuugccacaacggggugugucccgucguguucacagacggaagcgcuaccggcccugccgauacccgcguguacuacuuuaaggaggggaagauccugaaaugggagucucuuacaggaacggcuaagcacauugaagagugcuccugcuauggcgaaagaaccggcaucacauguaccugccgggacaauuggcaggggagcaaccgccccgucauucaaaucgauccuguugccaugacacauaccucucaguacauuuguagccccgugcugacggacaauccgagaccuaacgaucccaaugugggaaaaugcaacgacccuuaucccggcaauaacaacaauggggucaagggauucuccuaccucgauggcgugaacacauggcuggggcggaccaucucuaccgcgagcagauccggauaugagaugcuuaaaguucccaaugcccugacagacgaccgcagcaagccuauccagggccagaccauugugcucaacacagauuggucuggcuacuccgggagcuuuauggacuauugggcugaaggagauuguuaccgggccugcuucuacgucgagcugaucagaggccgcccgaaggaggacaaagugugguggacgucuaauuccauuguuagcauguguuccucuaccgaauuucuggggcaauggaacuggcccgauggagcuaagaucgaguauuuccucuga

SEQ ID NO: 215774 - RNA, 1413 nt, Artificial Sequence
  derived and/or modified CDS sequence (opt5) from neuraminidase__InfluenzaA__AGQ81957
augaaccccaaucagaagauccugugcaccagcgccacagcuauugugaucggcacgauugccguccucaucgggauugcgaaccugggacuuaauaucggccugcaccucaaaccuuccuguaacugcucucauagccaaccggaggcuaccaauacaucccagaucauuaucaacaauuacuauaacgaaaccaauauuacacagguuucuaacaccaauauccagauggaggaaagagccagccggggguucaacaaucugacaaagggacuuuguaccauuaacuccuggcacaucuacggcaaagacaaugccgugcgcauuggggagaacucugaugugcuggucacgagagaacccuaugugagcugcgacccugaugagugucgguuuuacgcucucucccaaggaaccacaauccgcggcaagcauagcaacggcaccauccacgacagaucucaguaucgggcccugauuuccuggccccugagcucuccucccacaguuuacaauucccgcguggagugcaucggguggagcucuaccuccugucaugauggaaaaagcagaauguccauuugcaucucuggcccuaacaauaacgcuagcgccgucgugugguauaaucggcgcccgguugcggaaauuaacacgugggccagaaauauccuccggacacaggaguccgaaugugugugccacaacggggucugucccgugguguucaccgacggaagcgcuacaggcccugccgauacccgcaucuacuacuuuaaggaggggaagauucugaaaugggagucucuuaccggaacagcuaagcacaucgaagagugcuccugcuauggcgaaagaacgggcauuaccuguacaugccgggacaauuggcaggggagcaaccgccccgucauccaaauugauccuguugccaugacccauacaucucaguacaucuguagccccgugcugaccgacaauccgagaccuaacgaucccaaugugggaaaaugcaacgacccuuaucccggcaauaacaacaauggggucaagggauucuccuaccucgauggcgugaacacguggcuggggcggacaaucucuaccgcgagcagauccggauaugagaugcuuaaaguucccaaugcccugaccgacgaccgcagcaagccugugcagggccagacaauuguccucaacaccgauuggucuggcuacuccgggagcuuuauggacuauugggcugaaggagauuguuaccgggccugcuucuacguggagcugaucagaggccgcccgaaggaggacaaaguuugguggacaucuaauuccauugugagcauguguuccucuacggaauuucuggggcaauggaacuggcccgauggagcuaagaucgaguauuuccucuga

SEQ ID NO: 215775 - RNA, 1413 nt, Artificial Sequence; identical to SEQ ID NO: 215757
  derived and/or modified CDS sequence (opt5) from neuraminidase__InfluenzaA__AGQ81958

SEQ ID NO: 215776 - RNA, 1413 nt, Artificial Sequence; identical to SEQ ID NO: 215757
  derived and/or modified CDS sequence (opt5) from neuraminidase__InfluenzaA__AGQ81959

SEQ ID NO: 215777 - RNA, 1413 nt, Artificial Sequence
  derived and/or modified CDS sequence (opt5) from neuraminidase__InfluenzaA__AGQ81960
augaaccccaaucagaagauccugugcaccagcgccacagcuauugugaucggcacgauugccguccucaucgggauugcgaaccugggacuuaauaucggccugcaccucaaaccuaacuguaauugcuccagaucucaaccggagaccacaaacaccagccagacaaucauuaauaacuacuauaaugaaaccaacaucacacagauuuccaauaccaacauccagauggaggaacgggcuucucgcgacuucaauaaccugacgaaggggcuuuguaccauuaauagcuggcauaucuacggaaaagauaacgccguuagaauuggcgagaacuccgacgugcuggugacacgggaacccuaugucucuugcgauccuaaugagugucgcuuuuacgcccucagccaagggaccacaaucagaggaaagcacuccaacggcaccauccaugaccggagccaguaucgcgcucugauuucuuggccccuguccagcccucccacgguguacaauucuagaguugagugcaucggcugguccagcacaucuugucacgaugggaaaucccggaugagcauuugcaucuccggaccuaacaauaacgccucugcuguggucugguauaaucgcagaccgguggccgaaauuaacaccugggcgcggaauauccuccgcacacaggagagcgaauguguuugccauaacggcgugugucccgucguguucaccgacggguccgccaccggaccugcugauacaagaaucuacuacuuuaaggagggcaagauucugaaaugggagagccuuacggggaccgccaagcacaucgaagagugcucuugcuauggagaacggacagagauuaccuguacaugccgcgacaauuggcagggcuccaacagacccgugauccaaauugauccugucgcuaugacccacacgagccaguacaucuguucucccguucugacagacaauccgcggccuaacgaucccaaugugggcaaaugcaacgacccuuaucccgggaacaauaacaauggagugaagggcuucagcuaccucgauggggucaacaccuggcugggaagaaccaucuccacagccucucgcagcggcuaugaaaugcuuaaagugcccaaugcgcugaccgacgaccgguccaagccuauucaggggcagacaaucguucucaacacggauuggagcggauacucuggcuccuuuauggacuauugggccgagggcgauuguuacagagcuugcuucuacguggagcugauucgcgggcggccgaaggaagacaaagucugguggaccagcaauucuaucguguccauguguagcuccacagaguuucugggacaaugggauuggcccgacggcgccaagauugaauauuuccucuga

SEQ ID NO: 215778 - RNA, 1413 nt, Artificial Sequence; identical to SEQ ID NO: 215770
  derived and/or modified CDS sequence (opt5) from neuraminidase__InfluenzaA__AGQ81961

SEQ ID NO: 215779 - RNA, 1413 nt, Artificial Sequence; identical to SEQ ID NO: 215770
  derived and/or modified CDS sequence (opt5) from neuraminidase__InfluenzaA__AGQ81962

SEQ ID NO: 215780 - RNA, 1413 nt, Artificial Sequence
  derived and/or modified CDS sequence (opt5) from neuraminidase__InfluenzaA__AGQ81963
augaaccccaaucagaagauccugugcaccagcgccacagcuauugugaucggcacgauugccguccucaucgggauugcgaaccugggacuuaauaucggccugcaccucaaaccuuccuguaacugcucucauagccaaccggaggaaaccaauacaucccagaccaucauuaacaauuacuauaacgagacaaauaucacccagauuucuaacacaaauauccagauggaagagagagcuagccggggguucaacaaucugaccaagggacuuuguacgauuaacuccuggcacaucuacggcaaagacaaugccguucgcauuggggaaaacucugaugugcuggugaccagagagcccuaugucagcugcgacccuaacgagugucgguuuuacgcccucucccaaggaacaaccauccgcggcaagcauagcaauggcacaauccacgauagaucucaguaucgggcucugauuuccuggccccugagcucuccucccaccguguacaacucccgcguugaaugcaucggguggagcucuacguccugucaugacggaaaaagcagaauguccgugugcauuucuggcccuaaugauaacgccagcgcugucgugugguauaaucggcgcccgguugccgagaucaacacaugggcgagaaauauucuccggacccaggaauccgagugugugugccacaacggggucugucccgugguguucacagacggaagcgccaccggcccugcucacacccgcaucuacuacuuuaaggaggggaagauccugaaaugggaaucucuuacaggaacggccaagcauauugaggaaugcuccugcuauggcgagagaaccggcaucacauguaccugccgggauaauuggcaggggagcaaccgccccgucauucaaaucgacccuguugcuaugacacacaccucucaguacauuuguagccccgugcugacggauaauccgagaccuaacgaccccaaugugggaaaaugcaacgauccuuaucccggcaauaacaacaauggggucaagggauucuccuaccucgacggcgugaacacauggcuggggcggaccaucucuaccgccagcagauccggauaugaaaugcuuaaaguucccaaugcgcugacagaugaccgcagcaagccuauccagggccagaccauugugcucaacacagacuggucuggcuacuccgggagcuuuauggauuauuggacggagggagacuguuaccgggccugcuucuacgucgagcugaucagaggccgcccgaaggaagauaaagugugguggaccucuaauuccauuguuagcauguguuccucuacagaguuucuggggcaaugggacuggcccgauggagcuaagaucgaauauuuccucuga

SEQ ID NO: 215781 - RNA, 1413 nt, Artificial Sequence
  derived and/or modified CDS sequence (opt5) from neuraminidase__InfluenzaA__AGQ81964
augaaccccaaucagaagauccugugcaccagcgccacagcuauugugaucggcacgauugccguccucaucgggauugcgaaccugggacuuaauaucggccugcaccucaaaccuuccuguaacugcucucauagcaagccggaggaaaccaaugcuucccaaacaaucauuaacaauuacuauaacgagaccaauaucacacagauuucuaacaccaauauccagauggaagagagagccagccggggguucaacaaucugacaaaaggacuuuguaccauuaacuccuggcacaucuacggcaaggacaaugccguucgcauuggggaaucuagcgaugugcuggugacgagagagcccuaugucuccugcgacccugaugagugucgguuuuacgcucucagccagggaaccacaauccgcggcaaacauucuaacggcaccauccacgacagaucccaauaucgggcccugauuagcuggccccugucuuccccucccacaguguacaacagccgcguugaaugcaucggguggucuuccaccagcugucaugauggaaaguccagaaugucuauuugcaucagcggcccuaauaacaaugcuuccgccguggucugguauaaccggcgcccgguggcggagauuaauacgugggccagaaacauccuccggacacaggaaagcgaguguguuugccacaauggggugugucccgucguguucaccgacggaucugcuacaggcccugccgauacccgcaucuacuacuuuaaggaggggaaaauucugaagugggaaucccuuaccggaacagcuaaacacaucgaggaaugcagcugcuauggcgagagaacgggcauuaccuguacaugccgggacaacuggcaggggucuaaucgccccgugauccagauugauccugucgccaugacccauacaagccaauacaucuguucccccguucugaccgacaacccgagaccuaaugaucccaacgugggaaagugcaaugacccuuaucccggcaacaauaacaacggggugaaaggauucucuuaccucgauggcgucaauacguggcuggggcggacaaccagcaccacauccagaagcggauaugaaaugcuuaaggugcccaacgcgcugaccgacgaccgcucuaagccuauccagggccagacaauuguucucaauacggauugguccggcuacagcgggucuuuuauggacuauugggccgagggagauuguuaccgggcuugcuucuacguggagcugaucagaggccgcccgaaagaagacaaggucugguggaccuccaacagcauuguguccauguguucuagcacagaguuucuggggcaguggaauuggcccgauggagccaaaaucgaauauuuccucuga

SEQ ID NO: 215782 - RNA, 1413 nt, Artificial Sequence
  derived and/or modified CDS sequence (opt5) from neuraminidase__InfluenzaA__AGQ81966
augaaccccaaucagagaauccugugcaccagcgccacagcuauugugaucggcacgauugccguccucaucgggguugcgaaccugggacuuaauauuggccugcaccucaagccuggguguaacugcucccauucucaaccggaggcuaccaauacaagccagaccaucaucaacaauuacuauaacgaaacaaauauuacccagaucuccaacacaaauauucagauggaggaacgggccaaccgcggauucaauaaccugaccaaaggccuuuguacgaucaauucuuggcacauuuacgggaaggacaacgccgugagaaucggagagaacagcgaugugcuggucacccgggaacccuauguguccugcgacccugaugagugucgcuuuuacgcucucucucaaggcacaaccauuagaggcaaacauagcaaugggacaauccacgaccggucccaguaucgcgcccugaucagcuggccccugucuuccccucccaccguuuacaacagcagaguggagugcauuggauggucuuccacgagcugucaugauggcaagucucggauguccaucugcauuagcgggccuaauaacaaugcuuccgccgucgugugguauaaccgcagaccgguugcggaaaucaauacaugggcccggaacauucuccgcacccaggagucugaaugugugugccacaauggagucugucccgugguguucacagacggcagcgcuaccgggccugccgauaccagagucuacuacuuucgggagggaaaaauccugaagugggagucccuuacaggcacggcuaagcacaucgaagagugcagcugcuauggcgaacgcaccgggauuacauguaccugcagagacaacuggcagggaucuaaucggcccguuauccaaauugauccuguggccaugacacauaccucccaguacaucuguagccccgugcugacggacaacccgagaccuaaugaucccaacgucggcaaaugcaaugacccuuaucccgggaacaacaauaacggagugaagggcuucucuuaccucgaugggguuaauacauggcugggacgcaccauuagcaccgcgucccggucuggcuaugagaugcuuaaagugcccaacgcccugacagacgacagaagcaagccuauccagggccagaccaucguccucaauacagauugguccggguacagcggaucuuuuauggacuauugggcugaaggcgauuguuaccgcgccugcuucuacguggagcugauucgggggagaccgaaagaggacaagguuugguggacguccaacagcaucgugucuauguguuccagcaccgaauuucugggacaauggaauuggcccgauggcgcuaagauugaguauuuccucuga

SEQ ID NO: 215783 - RNA, 1413 nt, Artificial Sequence
  derived and/or modified CDS sequence (opt5) from neuraminidase__InfluenzaA__AGQ81967
augaaccccaaucagaagauccugugcaccagcgccacagcuauugugaucggcauuaucgccguccucauugggaucgcgaaccugggacuuaauaucggccugcaccucaaaccuuccuguaacugcucucauagccaaccggaggcuacgaaugccucccagaccauuaucaacaauuacuauaacgaaacaaauauuacccagaucucuaacacaaauauucagauggaggaaagagccagccggggguucaacaaucugaccaagggacuuuguacaaucaacuccuggcacauuuacggcaaagacaaugcuguucgcaucggggagaacucugaugugcuggugaccagagaacccuaugucagcugcgacccugaugagugucgguuuuacgcccucucccaaggaacgaccauccgcggcaagcauagcaacggcacaauucacgacagaucucaguaucgggcucugaucuccuggccccugagcucuccucccaccguguacaauucccgcguugagugcauuggguggagcucuacauccugucaugauggaaaaagcagaauguccaucugcauuucuggcccuaacaauaacgccagcgcgguggucugguauaaucggcgcccgguggccgaaaucaacaccugggcuagaaauauccuccggacgcaggaguccgaauguguuugccacaacggggugugucccgucguguucacagacggaagcgccaccggcccugcugagacacgcauuuacuacuuuaaggaggggaagauccugaaaugggaaucucuuaccggaaccgccaagcacauugaggaaugcuccugcuauggcgagagaacaggcaucacguguaccugccgggauaauuggcaggggagcaaccgccccgugauucaaaucgacccugucgcgaugacacauaccucucaguacaucuguagccccguucugacagauaauccgagaccuaacgaccccaaugugggaaaaugcaacgauccuuaucccggcaauaacaacaauggggugaagggauucuccuaccucgacggcgucaacaccuggcuggggcggacgauuucuacagccagcagauccggauaugaaaugcuuaaagugcccaaugcucugaccgaugaccgcagcaagccuauccagggccagauuaucguucucaacaccgacuggucuggcuacuccgggagcuuuauggauuauugggccgagggagacuguuaccgggcuugcuucuacguggagcugauuagaggccgcccgaaggaagauaaagucugguggacaucuaauuccaucgugagcauguguuccucuaccgaguuucuggggcaauggaacuggcccgacggagccaagauugaauauuuccucuga

SEQ ID NO: 215784 - RNA, 1413 nt, Artificial Sequence
  derived and/or modified CDS sequence (opt5) from neuraminidase__InfluenzaA__AGQ81968
augaaccccaaucagaagauccugugcaccagcgccacagcuauugugaucggcauuaucgccguccucauugggaucgcgaaccugggacuuaauaucggccugcaccucaaaccuuccuguaacugcucucauagccaaccggaggcuacgaaugccucccagaccauuaucaacaauuacuauaacgaaacaaauauuacccagaucucuaacacaaauauucagauggaggaaagagccagccggggguucaacaaucugaccaagggacuuuguacaaucaacuccuggcacauuuacggcaaagacaaugcuguucgcaucggggagaacucugauauccuggugaccagagaacccuaugugagcugcgacccugaugagugucgguuuuacgcccucucccaaggaacgaccauucgcggcaagcauagcaacggcacaauccacgacagaucucaguaucggucccugauuagcuggccccugucuuccccucccaccgucuacaauagccgcguggagugcaucggguggucuuccacaagcugucaugauggaaaauccagaaugucuauuugcaucagcggcccuaacaauaacgcuuccgccguugugugguauaaucggcgcccggucgcggaaaucaacaccugggccagaaauauucuccggacgcaggagagcgaaugugugugccacaacgggguuugucccguggucuucacagacggaucugcuaccggcccugccgagacacgcaucuacuacuuuaaggaggggaagauucugaaaugggaaucccuuaccggaaccgcuaagcacaucgaggaaugcagcugcuauggcgagagaacaggcauuacguguaccugccgggauaauuggcaggggucuaaccgccccgugauccaaaucgacccuguggccaugacacauaccagccaguacauuuguucccccguccugacagauaauccgagaccuaacgaccccaauguuggaaaaugcaacgauccuuaucccggcaauaacaacaauggggugaagggauucucuuaccucgacggcgugaacaccuggcuggggcggacgaucagcacagcguccagaagcggauaugaaaugcuuaaaguccccaaugcccugaccgaugaccgcucuaagccuauucagggccagaccaucgugcucaacacagacugguccggcuacagcgggucuuuuauugauuauugggcugagggagacuguuaccgggccugcuucuacguugagcugaucagaggccgcccgaaggaagauaaagugugguggaccuccaauagcauugucuccauguguucuagcacagaguuucuggggcaauggaacuggcccgacggagcuaagaucgaauauuuccucuga

SEQ ID NO: 215785 - RNA, 1413 nt, Artificial Sequence
  derived and/or modified CDS sequence (opt5) from neuraminidase__InfluenzaA__AGQ81969
augaaccccaaucagaagauccugugcaccagcgccacagcuauugugaucggcauuaucgccguccucauugggaucgcgaaccugggacuuaauaucggccugcaccucaaaccuuccuguaacugcucucauagccaaccggaggaaacgaaugcuucccagaccauuaucaacaauuacuauaacgagacaaauauuacccagaucucuaacacaaauauucagauggaagagagagccagccggggguucaacaaucugaccaagggacuuuguacaaucaacuccuggcacauuuacggcaaagacaaugccguucgcaucggggaaaacucugaugugcuggugaccagagagcccuaugucagcugcgacccugaugagugucgguuuuacgcucucucccaaggaacgaccauccgcggcaagcauagcaacggcacaauucacgacagaucucaguaucgggcccugaucuccuggccccugagcucuccucccaccguguacaauucccgcguugaaugcauuggguggagcucuacauccugucaugauggaaaaagcagaauguccaucugcauuucuggcccuaacaauaacgcuagcgccguggucugguauaaucggcgcccgguggcggagaucaacaccugggccagaaauauccuccggacgcaggaauccgaguguguuugccacaacggggugugucccgucguguucacagacggaagcgcuaccggcccugccgagacacgcauuuacuacuuuaaggaagggaagauccugaaaugggagucucuuaccggaaccgcuaagcacauugaagagugcuccugcuauggcgaaagaacaggcaucacguguaccugccgggauaauuggcaggggagcaaccgccccgugauucaaaucgacccugucgccaugacacauaccucucaguacaucuguagccccguucugacagauaauccgagaccuaacgaccccaaugugggaaaaugcaacgauccuuaucccggcaauaacaacaauggggugaagggauucuccuaccucgacggcgucaacaccuggcuggggcggacgauuucuacagcgagcagauccggauaugagaugcuuaaagugcccaaugcccugaccgaugaccgcagcaagccuauccagggccagauuaucguucucaacaccgacuggucuggcuacuccgggagcuuuauggauuauugggcugagggagacuguuaccgggccugcuucuacguggaacugauuagaggccgcccgaaggaggauaaagucugguggacaucuaauuccaucgugagcauguguuccucuaccgaauuucuggggcaauggaacuggcccgacggagcuaagauugaguauuuccucuga

SEQ ID NO: 215786 - RNA, 1413 nt, Artificial Sequence
  derived and/or modified CDS sequence (opt5) from neuraminidase__InfluenzaA__AGQ81970
augaaccccaaucagaagauccugugcaccagcgccacagcuauugugaucggcacgauugccguccucaucgggauugcgaaccugggacuuaauaucggccugcaccucaaaccuuccuguaacugcucucauagccaaccggaggaaaccaaugcuucccagacaaucauuaacaauuacuauaacgagaccaauaucacacagauuucuaacaccaauauccagauggaagagagagccagccggggguucaacaaucugacaaagggacuuuguaccauuaacuccuggcacaucuacggcaaagacaaugccguucgcauuggggaaaacucugaugugcuggugacgagagagcccuaugucagcugcgacccugaugagugucgguuuuacgcucucucccaaggaaccacaauccgcggcaagcauagcaacggcaccauccacgacagaucucaguaucgggcccugauuuccuggccccugagcucuccucccacaguguacaauucccgcguugaaugcaucggguggagcucuaccuccugucaugauggaaaaagcagaauguccauuugcaucucuggcccuaacaauaacgcuagcgccguggucugguauaauaagcggccgguggcggagauuaacacgugggcccgcaauauccucagaacacaggaauccgaguguguuugccacaacggggugugucccgucguguucaccgacggaagcgcuacaggcccugccgauacccggaucuacuacuuuaaggaggggaaaauucugaagugggaaccccuuaccggaacagcuaaacacaucgaggaaugcucuugcuauggcgagcgcacgggcauuaccuguacaugcagagacaauuggcagggguccaaccggccugugauccaaauugaucccgucgccaugacccauacaagccaguacaucuguucuccgguucugaccgacaauccucgccccaacgauccuaaugugggaaagugcaacgaccccuaucccggcaauagcaacaacggggugaaaggauucuccuaccucgauggcgucaauacguggcuggggagaacaaucucuaccgcgagccgguccggauaugaaaugcuuaaggugccuaacgcccugaccgacgacagaagcaagccgauucagggccagacaaucguucucaauaccgauuggucuggcuacuccgggagcuuuauggacuauugggcugagggagauuguuaccgcgccugcuucuacguggagcugauucggggcagacccaaagaagacaaggucugguggacaucuaacuccaucgugagcauguguuccucuacggaguuucuggggcaauggaauuggccugauggagcuaaaauugaauauuuccucuga

SEQ ID NO: 215787 - RNA, 1413 nt, Artificial Sequence
  derived and/or modified CDS sequence (opt5) from neuraminidase__InfluenzaA__AGQ81971
augaaccccaaucagaagauccugugcaccagcgccacagcuauuaucauuggcgccaucgcggugcucauugggaucgcuaaccugggacuuaauaucggccugcaccucaaaccuuccuguaacugcucucauagccaaccggagacgaccaauacaucccagaccauuaucaacaauuacuauaacgaaacaaauauuacccagaucucuaacacaaauauucagauggaggaaagaaccagccggggguucaacaaucugacgaagggacuuuguaccaucaacuccuggcacauuuacggcaaagacaaugccguccgcaucggggagucuagcgauguucuggugacaagagaacccuauguguccugcgacccugaugagugucgguuuuacgcccucagccaaggaaccacaauccgcggcaagcauucuaacggcaccauucacgacagaucccaguaucgggcucugaucagcuggccccugucuuccccucccacggucuacagcucucgcguggagugcauugggugguccagcacauccugucaugauggaaaaucuagaaugagcaucugcauuuccggcccuaacaauaacgccagcgcuguugugugguauaaucggcgcccggucgccgaaaucaacaccugggcgagaaauauccuccggacacaggagucugaaugugugugccacaacgggguuugucccguggucuucaccgacggauccgccaccggcccugcugauacacgcauuuacuacuuuaaggaggggaagauccugaaaugggagagccuuacgggaaccgccaagcacauugaagagugcucuugcuauggcgaaagaacaggcaucaccuguacaugccgggacaauuggcaggggagcaaccgccccgugauucaaaucgauccuguggcuaugacccauacgucccaguacaucuguucucccguccugacagacaauccgagaccuaacgaucccaauauuggaaaaugcaacgacccuuaucccggcaauaacaauaacgggguuaagggauucagcuaccucgauggcgccaacaccuggcuggggcggaccaucuccacagcgagcagaucuggauaugagaugcuuaaagugcccaaugcccugaccgacgaccgcuccaagccuauucagggccagacaaucgugcucaacacggauuggagcggcuacucuggguccuuuauggacuauugggcugaaggagauuguuaccgggccugcuucuacgucgagcugauuagaggccgcccgaaggaggacaaagugugguggaccagcaauuccaucguuucuauguguagcuccacagaauuucuggggcaauggaacuggcccgauggagcuaagauugaguauuuccucuga

SEQ ID NO: 215788 - RNA, 1413 nt, Artificial Sequence
  derived and/or modified CDS sequence (opt5) from neuraminidase__InfluenzaA__AGQ81972
augaaccccaaucagaagauccugugcaccagcgccacagcuauuaucauuggcgccaucgcggugcucauugggaucgcuaaccugggacuuaauaucggccugcaccucaaaccuuccuguaacugcucucauagccaaccggagacgaccaauacaucccagaccauuaucaacaauuacuauaacgaaacaaauauuacccagaucucuaacacaaauauucagauggaggaaagagccagccggggguucaacaaucugaccaagggacuuuguacgaucaacuccuggcacauuuacggcaaagacaaugccguccgcaucggggagucuagcgauguucuggugaccagagaacccuauguguccugcgacccugaugagugucgguuuuacgcucucagccaaggaacaaccauccgcggcaagcauucuaacggcacaauucacgacagaucccaguaucgggcccugaucagcuggccccugucuuccccucccaccgucuacaacagccgcguggagugcauuggguggucuuccacgagcugucaugauggaaaauccagaaugucuaucugcauuagcggcccuaauaacaaugcuuccgccguugugugguauaaccggcgcccggucgcggaaaucaauacaugggccagaaacauccuccggacccaggagagcgaaugugugugccacaaugggguuugucccguggucuucacagacggaucugcuaccggcccugccgauacccgcauuuacuacuuuaaggaggggaagauccugaaaugggagucccuuacaggaacggcuaagcacauugaagagugcagcugcuauggcgaaagaaccggcaucacauguaccugccgggacaacuggcaggggucuaaucgccccgugauucaaaucgauccuguggccaugacacauaccagccaguacaucuguucccccguccugacggacaacccgagaccuaaugaucccaacauuggaaaaugcaaugacccuuaucccggcaacaauaacaacgggguuaagggauucucuuaccucgauggcgcgaauacauggcuggggcggaccaucagcaccgccuccagaagcggauaugagaugcuuaaagugcccaacgcucugacagacgaccgcucuaagccuauucagggccagaccaucgugcucaauacagauugguccggcuacagcgggucuuuuauggacuauugggccgaaggagauuguuaccgggcuugcuucuacgucgagcugauuagaggccgcccgaaggaggacaaagugugguggacguccaacagcaucguuuccauguguucuagcaccgaauuucuggggcaauggaauuggcccgauggagccaagauugaguauuuccucuga

SEQ ID NO: 215789 - RNA, 1413 nt, Artificial Sequence
  derived and/or modified CDS sequence (opt5) from neuraminidase__InfluenzaA__AGQ81973
augaaccccaaucagaagauccugugcaccagcgccacagcuauuaucauuggcgccaucgcggugcucauugggaucgcuaaccugggacuuaauaucggccugcaccucaaaccuuccuguaacugcucucauagccaaccggagacgaccaauacaucccagaccauuaucaacaauuacuauaacgaaacaaauauuacccagaucucuaacacaaauauucagauggaggaaagaaccagccggggguucaacaaucugacgaagggacuuuguaccaucaacuccuggcacauuuacggcaaagacaaugccguccgcaucggggagucuagcgauguucuggugacaagagaacccuauguguccugcgacccugaugagugucgguuuuacgcccucagccaaggaaccacaauccgcggcaagcauucuaacggcaccauucacgacagaucccaguaucgggcucugaucagcuggccccugucuuccccucccacggucuacaacagccgcguggagugcauuggguggucuuccacaagcugucaugauggaaaauccagaaugucuaucugcauuagcggcccuaauaacaaugccuccgcuguugugugguauaaccggcgcccggucgccgaaaucaauaccugggcgagaaacauccuccggacacaggagagcgaaugugugugccacaaugggguuugucccguggucuucaccgacggaucugccaccggcccugcugauacacgcauuuacuacuuuaaggaggggaagauccugaaaugggagucccuuacgggaaccgccaagcacauugaagagugcagcugcuauggcgaaagaacaggcaucaccuguacaugccgggacaacuggcaggggucuaaucgccccgugauucaaaucgauccuguggcuaugacccauacgagccaguacaucuguucccccguccugacagacaacccgagaccuaaugaucccaacauuggaaaaugcaaugacccuuaucccggcaacaauaacaacgggguuaagggauucucuuaccucgauggcgccaauaccuggcuggggcggaccaucagcacagcguccagaagcggauaugagaugcuuaaagugcccaacgcccugaccgacgaccgcucuaagccuauucagggccagacaaucgugcucaauacggauugguccggcuacagcgggucuuuuauggacuauugggcugaaggagauuguuaccgggccugcuucuacgucgagcugauuagaggccgcccgaaggaggacaaagugugguggaccuccaacagcaucguuuccauguguucuagcacagaauuucuggggcaauggaauuggcccgauggagcuaagauugaguauuuccucuga

SEQ ID NO: 215790 - RNA, 1413 nt, Artificial Sequence; identical to SEQ ID NO: 215770
  derived and/or modified CDS sequence (opt5) from neuraminidase__InfluenzaA__AGQ81974

SEQ ID NO: 215791 - RNA, 1398 nt, Artificial Sequence
  derived and/or modified CDS sequence (opt5) from neuraminidase__InfluenzaA__AGQ81975
augaaccccaaucagaagauccugugcaccagcgccacagcuauuaucauuggcgccaucgcggugcucauugggaucgcuaaccugggacuuaauaucggccugcaccucaaaccuggguguaacugcucccauucucaaccggagacgaccaauacaagccagaccauuaucaacaauuacuauaacgaaacaaauauuaccaacauccagauggaggaaagaacaucccggaauuucaacaaucugaccaaguggcuuuguacgauuaacucuuggcacaucuacggaaaagacaaugccguccgcauuggcgagaacagcgauguucuggugaccagagaacccuauguguccugcgacccugaugagugucgguuuuacgcccucucucaggggacaaccauccgcggaaagcauagcaacggcacaauccacgacagaucccaauaucgggcucugauuagcuggccccugucuuccccucccaccgucuacaauagccgcguggagugcaucggcuggucuuccacgagcugucaugaugggaaaucuagaauguccauuugcaucagcggaccuaacaauaacgccuccgcuguugugugguauaaucggcgcccggucgccgaaauuaacacaugggcgagaaauauccuccggacccaggagucugaaugugugugccacaacggcguuugucccguggucuucacagacgggagcgccaccggaccugcugauacccgcaucuacuacuuuaaggagggcaagauucugaaaugggagucccuuacagggacggccaagcacaucgaagagugcagcugcuauggagaaagaaccggcauuacauguaccugccgggacaauuggcagggcucuaaccgccccgugauccagauugauccuguggcuaugacacauaccucccaauacaucuguagccccguccugacggacaauccgagaccugaugaccccaacaucgggaaaugcaaugauccuuaucccggaaacaauaacaacggcguuaagggguucucuuaccucgacggagccaauacauggcugggccggaccauuagcaccgcguccagaucuggguaugagaugcuuaaagugcccaacgcccugacagacgaucgcagcaagccuauccagggacagaccauugugcucaaugcugacugguccggcuacagcggcucuuuuauggauuauugggccgacggggauuguuaccgggcuugcuucuacgucgaacugaucagaggacgcccgaaggaggacaaagugugguggacauccaacagcauuguuucuauguguuccagcacggaguuucugggccaguggaauuggcccgauggggccaagaucgaauauuuccucuga

SEQ ID NO: 215792 - RNA, 1398 nt, Artificial Sequence
  derived and/or modified CDS sequence (opt5) from neuraminidase__InfluenzaA__AGQ81977
augaaccccaaucagaagauccugugcaccagcgccacagcuauuaucauuggcgccaucgcggugcucauugggaucgcuaaccugggacuuaauaucggccugcaccucaaaccuggguguaacugcucccauucucaaccggagacgaccaauacaagccagaccauuaucaacaauuacuauaacgaaacaaauauuaccaacauccagauggaggaaagaacaucccggaauuucaacaaucugaccaagggacuuuguacgauuaacucuuggcacaucuacggcaaagacaaugccguccgcauuggggagagcuccgauguucuggugaccagagaacccuaugugucuugcgacccugaugagugucgguuuuacgcccucagccagggaacaaccauccgcggcaagcauuccaacggcacaauccacgacagaagccaauaucgggcucugauuucuuggccccuguccagcccucccaccgucuacaacucucgcguggagugcaucgggugguccagcacgucuugucaugauggaaaauccagaaugagcauuugcaucuccggcccuaauaacaaugccucugcuguugugugguauaaccggcgcccggucgccgaaauuaauacaugggcgagaaacauccuccggacccaggagagcgaaugugugugccacaaugggguuugucccguggucuucacagacggauccgccaccggcccugcugauacccgcaucuacuacuuuaaggaggggaagauucugaaaugggagagccuuacaggaacggccaagcacaucgaagagugcucuugcuauggcgaaagaaccggcauuacauguaccugccgggacaacuggcagggguccaaucgccccgugauccagauugauccuguggcuaugacacauaccagccaauacaucuguucucccguccugacggacaacccgagaccugaugaccccaauaucggaaaaugcaacgauccuuaucccggcaauaacaauaacgggguuaagggauucagcuaccucgacggcgccaacacauggcuggggcggaccauuuccaccgcgucuagaagcggauaugagaugcuuaaagugcccaaugcccugacagacgaucgcuccaagccuauccagggccagaccauugugcucaacgcugacuggagcggcuacucuggguccuuuauggauuauugggccgacggagauuguuaccgggcuugcuucuacgucgaacugaucagaggccgcccgaaggaggacaaagugugguggacaagcaauucuauuguuuccauguguagcuccacggaguuucuggggcaguggaacuggcccgauggagccaagaucgaauauuuccucuga

SEQ ID NO: 215793 - RNA, 1398 nt, Artificial Sequence
  derived and/or modified CDS sequence (opt5) from neuraminidase__InfluenzaA__AGQ81979
augaaccccaaucagaagauccugugcaccagcgccacagcuauuaucauuggcgccaucgcggcucucauugggaucgccaaccugggacuuaauaucggccugcaccucaaaccuggguguaacugcucccauucucaaccggagacgaccaauacaagccagaccauuaucaacaauuacuauaacgaaacaaauauuaccaacauccagauggaggaaagaacaucccggaauuucaacaaucugaccaagggacuuuguacgauuaacucuuggcacaucuacggcaaagacaaugccgugcgcauuggggagagcuccgauguccugguuaccagagaacccuaugugucuugcgacccugaugagugucgguuuuacgcucucagccagggaacaaccauccgcggcaagcauuccaacggcacaauccacgacagaagccaauaucgggcccugauuucuuggccccuguccagcccucccaccguguacaacucucgcgucgagugcaucgggugguccagcacgucuugucaugauggaaaauccagaaugagcauuugcaucuccggcccuaauaacaaugcuucugccgugguuugguauaaccggcgcccgguggcggaaauuaauacaugggccagaaacauccuccggacccaggagagcgaaugugucugccacaauggggugugucccguuguguucacagacggauccgcuaccggcccugccgauacccgcaucuacuacuuuaaggaggggaagauucugaaaugggagagccuuacaggaacggcuaagcacaucgaagagugcucuugcuauggcgaaagaaccggcauuacauguaccugccgggacaacuggcagggguccaaucgccccgucauccagauugauccuguggccaugacacauaccagccaauacaucuguucucccgugcugacggacaacccgagaccugaugaccccaauaucggaaaaugcaacgauccuuaucccggcaauaacaauaacggggucaagggauucagcuaccucgacggcgcgaacacauggcuggggcggaccauuuccaccgccucuagaagcggauaugagaugcuuaaaguucccaaugcucugacagacgaucgcuccaagccuauccagggccagaccauugugcucaacgccgacuggagcggcuacucuggguccuuuauggauuauugggcugacggagauuguuaccgggccugcuucuacguggaacugaucagaggccgcccgaaggaggacaaagucugguggacaagcaauucuauuguguccauguguagcuccacggaguuucuggggcaguggaacuggcccgauggagccaagaucgaauauuuccucuga

SEQ ID NO: 215794 - RNA, 1398 nt, Artificial Sequence; identical to SEQ ID NO: 215792
  derived and/or modified CDS sequence (opt5) from neuraminidase__InfluenzaA__AGQ81980

SEQ ID NO: 215795 - RNA, 1350 nt, Artificial Sequence
  derived and/or modified CDS sequence (opt5) from neuraminidase__InfluenzaA__AGQ88501
augaaccccaaucagaagaucgugaccauuggcagcaucugcauggucauugggaucguuucccugaugcuccaaauuggaaacaugaucucuaucugggugagccacuccauucagacaggcaaucagcaucagacggagccuaucagaaacaccaauuuccugacagaaaacgccguggcuucugucgcccuuagcggaaauuccucucuguguccgauucgggggugggcggugcacagcaaagacaacuccauccgcauuggcagcaagggggauguuuuugugaucagagagcccuucauuucuugcuccaaucucgaaugucggaccuuuuuccugacacaaggagcccuucugaacgacaaacauagcaauggcaccgucaaggaucgcucuccucacagaacacucauguccugccccaucggcgaggcuccuagccccuacaacucucgguuugaauccguggccuggagcgcuuccgccugucaugacgggaucucuuggcugaccauuggaaucagcggcccugauaauggggcuguugccgugcugaaauauaacggaauuaucacggacaccauuaaguccuggcgcaauaacauccucagaacacaggagagcgagugcaccugugucaacggcucuugcuucacagugaugaccgaugggccguccaauggacaggcgagcuacaagaucuuuaaaauugaaaagggcaaaguggucaagucuguugagcugaacgcccccaauuaucacuacgaagaguguagcugcuauccugacgcuggcgagaucauuugugugugccgggauaacuggcacggguccaaucgccccugggugucuuucaaccagaaucuugaauaccaaaucggauauauuugcagcggcgucuuuggggacaacccuagacccaaugauggagagggcuccugugggccggugagcccuaacggagccuacggcguuaaaggcuucucuuuuaaguacgggaauggaguguggaucggccggacgaaguccacacauagccgcucuggguucgaaaugaucugggaccccaacggauggaccggcacagauuccgaguuuagcaugaaacaggacauugucgcuaucaccgacugguccggguauucuggcagcuucgugcagcacccugaacugaccggacucgauugcauuagacccuguuucuggguugagcugauccggggccgccccaaggaguccacaauuuggacgucugggagcuccaucagcuuuugcggagucaauucugacaccguguccuggagcuggccugauggcgccgaacuuccguucacaauugacaaauga

SEQ ID NO: 215796 - RNA, 1401 nt, Artificial Sequence; identical to SEQ ID NO: 215674
  derived and/or modified CDS sequence (opt5) from neuraminidase__InfluenzaA__AGR33906

SEQ ID NO: 215797 - RNA, 1401 nt, Artificial Sequence
  derived and/or modified CDS sequence (opt5) from neuraminidase__InfluenzaA__AGR33908
augaaccccaaucagaagaucaccgccauuggcagcgugucccugaucauugcuaucauuugccuccugaugcaaaucgccauccuuacaacgaccaugacacugcacuucagacagaacgaguguucuaauccuagcaacaaucaggucaugccgugcgaacccauuaucauugagcggaacaccguucaucucaauuccacaaccaucgaacgcgagauuuguccuaaaguggcggaauacaagaacuggucuaaaccccagugccaaaucacaggguuugcuccuuucagcaaggacaauuccauuagacugucugccggaggcgauaucugggugacccgggagcccuaugucagcuguuccccugacaaaugcuaccaguuugcccuugggcagggaacgacccugaagaacaagcacagcaauggcacaacccaugaucgcacaccgcacagaacccuccugaugaacgagcugggggugcccuuccaucucggaacgaaacagguuuguaucgcuuggucuuccagcucuugcuaugacggcaaggccuggcugcacauuugugugacaggcgaugacaaaaaugcuaccgccuccaucauuuacgaugggaugcuugucgacagcaucggaucuugguccaagaacauucugcggacacaagaaagcgagugcguguguaucaaugggaccugcgcgguugugaugaccgauggcuccgccucuggagaagcugacacacgcauccucuuuauuagagagggcaaaaucauuaacaucagcccucuguccgggagcgcccagcacgucgaggaaugcucuuguuauccccgguacccugaggugcgcugcguguguagagauaacuggaagggauccaaucggcccauuaucuauaucaacauggucgacuacagcauugaaucucgcuacguuugcagcggccuugugggcgauacgccgagaaaugacgacuccaccucuagcuccaacugucgggauccuaauaacgagcgcggggcucccggagugaagggcugggccuucgacgaugggaaugacgucuggaugggaagaacaaucaaaaacggcagccggucuggguaugaaaccuuuagagugauuaauggauggacaauggcgaacuccaagagccagaucaaucgccagguuauuguggauucugacaacugguccggcuacagcggcaucuucuccgucgaggggaaaaagugcauuaaucgguguuuuuauguggagcugaucagaggacgcccucaagaaccccggguuugguggaccucuaacagcaucauuguguucugcggcacguccgggacauacggaaccggcucuuggcccgauggggccgacaucaauuuuaugccuauuuga

SEQ ID NO: 215798 - RNA, 1401 nt, Artificial Sequence
  derived and/or modified CDS sequence (opt5) from neuraminidase__InfluenzaA__AGR33910
augaaccccaaucagaagaucauugccaucggcagcgugucccugaccauugcuaucauuugcuuccucaugcaaaucgccauccugacaacgaccaugacacuucacuuuaaacagaacgaguguucuaagccuagcaauaaccaggucguuccgugcgaacccauucugaucgagagaaauaccgugcaucucaacuccacaaccauugaaaaagagguguguccuaaggucgcggaauacaaaaauuggucuaagccccagugccaaaucacaggguucgcuccuuuuagcaaggacaacuccauucggcugucugccggaggcgauaucugggugacccgcgagcccuauguuagcuguuccuucgggaaaugcuaccaguuugcccuuggacagggcacgacccugaagaauaaacacagcaacgggacaacccaugacagaacaccucaccggacccuccugaugaaugagcugggagugccguuccaucucggcacgaagcaggucuguauugcuuggucuuccagcucuugcuaugauggcaaagccuggcugcacaucugugugacaggggacgauaagaacgcuaccgccuccaucauuuacgacggaaugcuuguugauagcaucggcucuugguccaagaauauucugcgcacacaagaaagcgagugcguguguaucaacgggaccugcgcggucgugaugaccgacggauccgccucuggcaaagcugauacacggauucucuuuaucagagaagggaagaucauuaauauccgcccccugagcggauccgcccagcacguggaggagugcagcuguuauccuagauaccccgaaguccggugcguuugucgcgacaacuggaaaggcucuaacagaccugugcuuuauauuaauauggcugauuacuccguggagagcucuuacgucugcagcggccuggugggggacacgccccggaacgaugacuccucuagcuccagcaauugucgcgacccgaacaaugaaagaggagccccuggcguuaaggggugggcguucgaugacggaaacgauguguggaugggccggaccauccgcaaugacucuagauccggguaugagacauuucgggucgugaacggauggaccacagccaauagcaaaucucagauuaacagacagguuaucguggauuccgaaaauuggagcggcuacuccggcaucuucucugucgaggggaagaacugcauuaaucgcuguuuuuauguggagcucauccggggaagaccccaagaaccucgcgucugguggaccagcaacuccauuaucguguucugcggcacgucugggacauacggaaccggcagcuggcccgacggggcuaauauuaacuuuaugcccaucuga

SEQ ID NO: 215799 - RNA, 1401 nt, Artificial Sequence
  derived and/or modified CDS sequence (opt5) from neuraminidase__InfluenzaA__AGR33911
augaaccccaaucagaagaucauugccaucggcagcgugucccugaccauugcuaucauuugcuuccucaugcaaaucgccauccugacaacgaccaugacacuucacuuuaaacagaacgaguguucuaauccuagcaacaaucaggucguuccgugcgaacccauucugaucgagagaaacaccgugcaucucaauuccacaaccauugaaaaggagguguguccuaaagucgcggaauacaagaacuggucuaaaccccagugccaaaucacaggguucgcuccuuuuagcaaggacaauuccauucggcugucugccggaggcgauaucugggugacccgcgagcccuauguuagcuguucccuugggaagugcuaccaguucgcccugggacagggcacgacccucaaaaacaaucacagcaacgggacaacccaugacagaacaccucaccggacccugcugaugaaugagcucggagugccguuucaucugggcacgaagcaggucuguauugcuuggucuuccagcucuugcuaugauggcaaagccuggcuucacaucugugugacaggggacgauaagaacgcuaccgccuccaucauuuacgacggaaugcugguugauagcaucggcucuugguccaaaaauauucuccgcacacaagaaagcgagugcguguguaucaacgggaccugcgcggucgugaugaccgacggauccgccucuggcaaggcugauacacggauucuguucauccgggaagggaagaucauuaacaucagcccccuuuccggaagcgcccagcacguggaggagugcucuuguuauccucgcuaccccgaagucagaugcguuugucgggacaauuggaaaggcuccaaccgcccugugcuguauauuaauauggcugauuacagcaucgagucuagcuacgugugcuccggccucgucggggacacgcccagaaacgaugacucuagcuccagcucuaauugucgggacccgaacaaugaacgcggagccccuggcgugaaggggugggcguuugaugacggaaacgauguuuggaugggcagaaccauucggaauaacucccgcagcggguaugagacauucagaguggucaauggauggaccacagccaacucuaaaucccagaucaauagacaggugaucguugacagcgaaaacugguccggcuacucuggcauuuuuagcguggaggggaagaauugcaucaacagauguuucuaugucgagcugauucgcggacggccccaagaaccuagagugugguggaccuccaacucuaucauugucuuuugcggcacgagcgggacauacggaaccggcuccuggcccgauggggcuaauaucaacuucaugcccauuuga

SEQ ID NO: 215800 - RNA, 1356 nt, Artificial Sequence; identical to SEQ ID NO: 215715
  derived and/or modified CDS sequence (opt5) from neuraminidase__InfluenzaA__AGR33912

SEQ ID NO: 215801 - RNA, 1356 nt, Artificial Sequence; identical to SEQ ID NO: 215745
  derived and/or modified CDS sequence (opt5) from neuraminidase__InfluenzaA__AGR33913

SEQ ID NO: 215802 - RNA, 1356 nt, Artificial Sequence; identical to SEQ ID NO: 215715
  derived and/or modified CDS sequence (opt5) from neuraminidase__InfluenzaA__AGR33915

SEQ ID NO: 215803 - RNA, 1356 nt, Artificial Sequence
  derived and/or modified CDS sequence (opt5) from neuraminidase__InfluenzaA__AGR33916
augaaccccaaucagaagcuguucgccagcuccggcguggcuaucgcccucucuguccugaaccuucugauugggcucagcaauguuggacugaacgugucccuucaccugaaagagaccggcccuaagcaagaagagaaucucacaugcaugacgaccaaagaaacagagcuggggaccccgucuuaccugcuccugaacaagagccuuuguaauguggaaggaugggucgugaucgcgaaagacaacgcuguuagauuuggcgaguccgagcagauuaucauuacacgggaacccuaugugucuugcgauccuaauggguguaagauguacgcccugcaucagggaaccacaauccgcaacaagcacagcaauggcaccauccaugacagaacggccuuccggggccucauuuccacaccccuggggaccccucccaccgucagcaacucugauuuuaucugcgugggaugguccagcacaaccugucacgacggcauugggcgcaugacgaucugcauucagggaaauaacgauaaugcuacagccaccguuuauuacaacagacggcuuacaaccaccaucaaaacaugggcucgcaacauucugagaacgcaagagucugaaugugugugccauaauggcaccugugccgucgugaugacagacggguccgcgagcucucaggcccacaccaaggugauguauuuccacaaaggacucgucguuaaggaggaggcucugaaaggcuccgccaagcauaucgaagagugcagcuguuacggccacaaccagaaggugacaugcgugugccgggauaauuggcagggggcuaaccgcccuaucauugaaaucgacaugaauacccuggagcauacguccagauaugucuguacaggcauucucaccgauaccucucggccgggagacaaacccacaggggauugcagcaacccuaucaccggaucccccggcgccccuggggugaagggauuuggcuuccugaauggcgacaacacauggcuugggcgcacgauuagccccagaucucgguccggauuugaaaugcugaaaaucccgaaugcgggcaucgauccuaacagccgcauugccgagagacaagagaucguugacaauucuaacuggagcggguacuccggaucuuucauugacuacuggaaugauaacagcgaauguuauaaucccugcuuuuacguggagcucauccggggcagaccugaagaggcuaaguaugucugguggaccuccaacagccugauugcccuuugugggucucccuuccccgugggcuccggcagcuuuccugacggagcucagauccaguacuucucuuga

SEQ ID NO: 215804 - RNA, 1356 nt, Artificial Sequence; identical to SEQ ID NO: 215745
  derived and/or modified CDS sequence (opt5) from neuraminidase__InfluenzaA__AGR33917

SEQ ID NO: 215805 - RNA, 1356 nt, Artificial Sequence; identical to SEQ ID NO: 215715
  derived and/or modified CDS sequence (opt5) from neuraminidase__InfluenzaA__AGR33918

SEQ ID NO: 215806 - RNA, 1398 nt, Artificial Sequence; identical to SEQ ID NO: 215792
  derived and/or modified CDS sequence (opt5) from neuraminidase__InfluenzaA__AGR33919

SEQ ID NO: 215807 - RNA, 1413 nt, Artificial Sequence
  derived and/or modified CDS sequence (opt5) from neuraminidase__InfluenzaA__AGR45094
augaaccccaaucagaagaucauuaccaucggcagcauuuccauggccaucgggauuaucucucugauccuccaaauuggaaacaucauuagcaucugggcuucccacucuauucagacaggcagccagaaucauacggggaucugcaaccagagaauuaucaccuacgaaaauuccacaugggugaaccaaaccuaugucaauaucaacaauacaaacguuguggccggaaaagacaagaccucugugacacuggcgggcaauagcucccuuuguccuauucgggggugggcuaucuacaccaaagauaacagcauucgcaucggaucuaagggcgacgucuucgugauuagagagccguuuaucuccugcagccaccuggagugucggacguucuuucucacccagggcgcccugcuuaaugauaaacauucuaacgggacaguuaaggaccgcucccccuauagagcccugaugagcugcccucucggagaagcucccucuccuuacaauucccgguucgagagcguggccugguccgcuucugccugucacgauggcaugggguggcugaccaucggaauuagcggccccgacaacggggcggucgccgugcugaaguauaacggaaucauuacagaaaccaucaaauccuggaagaaacgcauucucagaacgcaggagagcgagugcguuugugugaauggcucuugcuuuacaaucaugaccgauggcccuuccaacgggccggcuagcuaccggaucuucaagauugaaaaaggaaagaucacaaagucuauugagcuggacgcccccaauuaucauuacgaagaguguagcugcuacccugauaccggcaccgucaugugugugugccgcgacaacuggcacggguccaauagacccugggugucuuuuaaccagaaucuugauuaucaaaucggauacauuugcagcggcgucuucggggacaacccucggcccaaagauggagagggcuccuguaauccgguuacaguggacggcgcugacggggugaagggauuuagcuaucgcuacggcaacggggucuggaucggaagaacgaaaucuaauuccagccggaagggcuucgaaaugauuugggauccuaacggguggaccgacacagauucugacuuuuccgugaaacaggauguugugcccaugaccgacuggagcggcuauuccggaucuuucguccagcacccugagcugacaggccucgauugcaugcgccccuguuuuuggguggaacugaucagagggcggcccagagagaauaccacgaucuggacaagcggauccucuauuagcuucugcggcguuaacuccgacaccgccaauuggagcuggccugaugacgcggaacuuccgcugaccaucgauaaguga

SEQ ID NO: 215808 - RNA, 1413 nt, Artificial Sequence; identical to SEQ ID NO: 211002
  derived and/or modified CDS sequence (opt5) from neuraminidase__InfluenzaA__AGR49780

SEQ ID NO: 215809 - RNA, 1410 nt, Artificial Sequence
  derived and/or modified CDS sequence (opt5) from neuraminidase__InfluenzaA__AGR49804
augaaccccaaucagaagaucauuaccaucggcagcgugugcaugacaauugggauggccaaccugauccuccaaauuggaaauaucaucuccauuuggaucucucacagcauucagcugggcaaccagaaucagaucgagacguguaaccaauccgucauuaccuacgaaaauaacacauggguuaaucagaccuaugugaacaucucuaauacaaacuucgcugccgggcagagcguggucuccgugaaacuuaccggaaauucuagccugugcccuguuuccggcugggcgauuuacagcaaggacaacucugugagaaucggguccaaaggagaugucuuugugauccgggagccguucauuagcuguucuccccucgaaugccgcacauuuuuccugacccagggcgcccuucugaaugacaagcauuccaacggcacgaucaaagauagaagcccuuaucggacccucaugucuugucccauuggggagguuccuucccccuacaacagccgcuuugaauccguggcuuggucugccagcgcuugccacgacggaaucaauuggcugacaauuggcaucuccgggccugauaacggagccgucgcugugcugaaguauaauggcaucauuaccgacacaaucaagagcuggagaaacaauauucuccggacccaagagucugagugugccugcgugaacggguccuguuucacggucaugacagauggaccgagcaauggccaggcgucuuacaaaaucuuucgcauugaaaagggcaaaaucguuaagagcguggagaugaacgcccccaauuaucauuacgaagagugcuccuguuacccugacucuagcgagauuaccugcgugugcagagauaacuggcacggguccaaucggcccugggucagcuucaaccagaaucuggaauaucagaucggauacaucuguucuggcauuuuuggggacaacccucgccccaaugauaaaacaggauccugcggcccggugagcucuaacggggcuaacggaguuaagggcuucuccuuuaaguauggcaaugggguguggaucggaagaaccaaaagcauuuccucucggaacggcuucgagaugaucugggacccuaauggguggaccggaacagauaacaauuuuagcauuaagcaagacaucgucggcaucaacgaaugguccggguacucuggcagcuucgugcagcaucccgagcuuacgggacuggacuguauucgcccuugcuucuggguugaacucaucagaggccggcccaaagagaauaccauuuggacauccgggagcucuaucuccuuuuguggagugaacagcgauaccgucggcuggucuuggcccgacggggccgagcugccuuucacaauugauaaguga

SEQ ID NO: 215810 - RNA, 1413 nt, Artificial Sequence; identical to SEQ ID NO: 211002
  derived and/or modified CDS sequence (opt5) from neuraminidase__InfluenzaA__AGR49820

SEQ ID NO: 215811 - RNA, 1410 nt, Artificial Sequence; identical to SEQ ID NO: 208162
  derived and/or modified CDS sequence (opt5) from neuraminidase__InfluenzaA__AGR49832

SEQ ID NO: 215812 - RNA, 1413 nt, Artificial Sequence; identical to SEQ ID NO: 211002
  derived and/or modified CDS sequence (opt5) from neuraminidase__InfluenzaA__AGR49844

SEQ ID NO: 215813 - RNA, 1413 nt, Artificial Sequence; identical to SEQ ID NO: 211002
  derived and/or modified CDS sequence (opt5) from neuraminidase__InfluenzaA__AGR49856

SEQ ID NO: 215814 - RNA, 1413 nt, Artificial Sequence; identical to SEQ ID NO: 211002
  derived and/or modified CDS sequence (opt5) from neuraminidase__InfluenzaA__AGR49868

SEQ ID NO: 215815 - RNA, 1410 nt, Artificial Sequence; identical to SEQ ID NO: 208800
  derived and/or modified CDS sequence (opt5) from neuraminidase__InfluenzaA__AGR49880

SEQ ID NO: 215816 - RNA, 1410 nt, Artificial Sequence; identical to SEQ ID NO: 210556
  derived and/or modified CDS sequence (opt5) from neuraminidase__InfluenzaA__AGR49891

SEQ ID NO: 215817 - RNA, 1410 nt, Artificial Sequence
  derived and/or modified CDS sequence (opt5) from neuraminidase__InfluenzaA__AGR49903
augaaccccaaucagaagaucauuaccaucggcagcgugucccugacaauuucuacgaucugcuucuuuaugcaaauugccauccucaucaccacagucacccugcacuucaaacaguacgaguuuaacagcccuccgaauaaccagguuaugcuuugugaacccacaauuaucgagagaaauauuaccgaaaucguguaucugacaaacaccacgauugagaaggaaaucugcccuaaacucgcugaguaccggaauugguccaagccccagugugacauuaccggguucgccccuuuuucuaaagauaacagcauccgccuguccgcgggaggcgacaucugggugacaagagagcccuaugucucuugcgauccugacaaguguuaccaauucgcucuugggcagggaaccacacugaauaacgugcauagcaaugauaccguucacgaccggacgccguaucgcacacuccugaugaacgaacugggcgugcccuuucaucucgggaccaagcaggucugcauugccugguccagcagcuccugucacgauggaaaagccuggcugcaugugugcaucacaggcgacgauaagaaugcuaccgccagcuucauuuacaacggcagacuuguugacucuaucguguccuggagcaaagagauucugcggacccaggaaucugagugugucugcaucaaugggacauguacgguggugaugaccgauggauccgcuagcggcaaggccgacacaaaaauccucuuuauugaggaagggaagaucguccacaccuccacacugucuggaagcgcgcaacacguugaggaaugcuccugcuauccucgcuaccccggcgugagaugugugugccgggauaacuggaaggggagcaaccgcccuauugucgacaucaauauuaaagaccauucuaucguguccagcuacguuuguucuggacuugugggcgauacccccagaaagaacgacagcuccucuagcggccacugccuggauccgaauaacgaggaagggggacauggcgucaaagggugggccuucgacgauggaaaugacguguggaugggccggacgaucuccgagaagucucgccucggguaugagacauuuaaaguuauugaaggauggucuaacccuaaguccaaacugcagaucaauagacaggugauugucgaucggggcaaccgcagcggcuacucugggaucuucuccguggagggaaagagcuguauuaauagaugcuuuuaugucgaacugauccggggcagaaaggaggaaaccgaggugcucuggaccuccaacucuauuguuguguucugugggacaagcggaaccuacggcacaggguccuggcccgacggcgcugauaucaaucugaugccuaucuga

SEQ ID NO: 215818 - RNA, 1410 nt, Artificial Sequence; identical to SEQ ID NO: 208162
  derived and/or modified CDS sequence (opt5) from neuraminidase__InfluenzaA__AGR49915

SEQ ID NO: 215819 - RNA, 1410 nt, Artificial Sequence; identical to SEQ ID NO: 208162
  derived and/or modified CDS sequence (opt5) from neuraminidase__InfluenzaA__AGR49927

SEQ ID NO: 215820 - RNA, 1410 nt, Artificial Sequence
  derived and/or modified CDS sequence (opt5) from neuraminidase__InfluenzaA__AGR49939
augaaccccaauaagaaaaucauuaccaucggcagcgugucccugacaauuucuacgaucugcuucuuuaugcagauugccauccucaucaccacagucacccugcacuucaagcaauacgaguuuaacagcccuccgaauaaccagguuaugcuuugugaacccacaauuaucgagagaaauauuaccgaaaucguguaucugacaaacaccacgauugagaaagaaaucugcccuaagcucgcugaguaccggaauugguccaaaccccagugugacauuaccggguucgccccuuuuucuaaggauaacagcauccgccuguccgcgggaggcgacaucugggugacaagagagcccuaugucucuugcgauccugacaaguguuaccaguucgcucuugggcaaggaaccacacugaauaacgugcauagcaaugauaccguucgggaccgcacgccguauagaacacuccugaugaacgaacugggcgugcccuuucaccucgggaccaaacaggucugcauugccugguccucuagcuccugucaugauggaaaggccuggcugcacgugugcaucacaggcgacgauaaaaaugcuaccgccagcuucauuuacaacggccggcuuguugacucuaucguguccuggagcaaggagauucugcgcacccaggaaucugagugugucugcaucaaugggacauguacgguggugaugaccgauggauccgcuagcggcaaagccgacacaaagauccucuuuauugaggaagggaagaucguccauaccuccacacugucuggaagcgcgcagcacguugaggaaugcuccugcuauccuagauaccccggcgugcggugugugugccgcgauaacuggaaagggagcaacagaccuauugucgacaucaauauuaaggaccacucuaucguguccagcuacguuuguucuggacuugugggcgauacgccccggaaaaacgacagcuccucuagcggccauugccuggauccgaauaacgaggaagggggacacggcgucaaggggugggccuucgacgauggaaaugacguguggaugggccgcaccaucuccgagaaaagcagacucggguaugagacauuuaagguuauugaaggauggucuaacccuaaauccaagcugcaaaucaaucgccaggugauugucgaucggggcaacagaagcggcuacucugggaucuucuccguggagggaaagagcuguauuaaucggugcuuuuaugucgaacugaucagaggccgcaaagaggaaaccgaggugcucuggaccuccaacucuauuguuguguucugugggacaagcggaaccuacggcacaggguccuggcccgacggcgcugauaucaaucugaugccuaucuga

SEQ ID NO: 215821 - RNA, 1410 nt, Artificial Sequence; identical to SEQ ID NO: 208757
  derived and/or modified CDS sequence (opt5) from neuraminidase__InfluenzaA__AGR49951

SEQ ID NO: 215822 - RNA, 1410 nt, Artificial Sequence
  derived and/or modified CDS sequence (opt5) from neuraminidase__InfluenzaA__AGR49963
augaaccccaauaagaaaaucauuaccaucggcagcgugucccugacaauuucuacgaucugcuucuuuaugcagauugccauccucaucaccacagucacccugcacuucaagcaauacgaguuuaacagcccuccgaauaaccagguuaugcuuugugaacccacaauuaucgagagaaauauuaccgaaaucguguaucugacaaacaccacgauugagaaagaaaucugcccuaagcucgcugaguaccggaauugguccaaaccccagugugacauuaccggguucgccccuuuuucuaaggauaacagcauccgccuguccgcgggaggcgacaucugggugacaagagagcccuaugucucuugcgauccugacaaguguuaccaguucgcucuugggcaaggaaccacacugaauaacgugcauagcaaugauaccguucgggaccgcacgccguauagaacacuccugaugaacgaacugggcgugcccuuucaccucgggaccaaacaggucugcauugccugguccucuagcuccugucaugauggaaaggccuggcugcacgugugcaucacaggcgacgauaaaaaugcuaccgccagcuucauuuacaacggccggcuuguugacucuaucguguccuggagcaaggagauucugcgcacccaggaaucugagugugucugcaucaaugggacauguacgguggugaugaccgauggauccgcuagcggcaaagccgacacaaagauccucuuuauugaggaagggaagaucguccauaccuccacacugucuggaagcgcgcagcacguugaggaaugcuccugcuauccuagauaccccggcgugcggugugugugccgcgauaacuggaaagggagcaacagaccuauugucgacaucaauauuaaggaccacucuaucguguccagcuacguuuguucuggacuugugggcgauacgccccggaaaaacgacagcuccucuagcggccauugccuggauccgaauaacgaggaagggggacacggcgucaaggggugggccuucgacgauggaaaugacguguggaugggccgcaccaucuccaaaaagagcagacucggguaugagacauuuaaaguuauugagggauggucuaacccuaaguccaagcugcaaaucaaucgccaggugauugucgaucggggcaacagaagcggcuacucugggaucuucuccguggaaggaaaaagcuguauuaaucggugcuuuuaugucgagcugaucagaggccgcaaggaagagaccgaagugcucuggaccuccaacucuauuguuguguucugugggacaagcggaaccuacggcacaggguccuggcccgacggcgcugauaucaaucugaugccuaucuga

SEQ ID NO: 215823 - RNA, 1410 nt, Artificial Sequence; identical to SEQ ID NO: 208800
  derived and/or modified CDS sequence (opt5) from neuraminidase__InfluenzaA__AGR49975

SEQ ID NO: 215824 - RNA, 1413 nt, Artificial Sequence; identical to SEQ ID NO: 211002
  derived and/or modified CDS sequence (opt5) from neuraminidase__InfluenzaA__AGR49986

SEQ ID NO: 215825 - RNA, 1413 nt, Artificial Sequence; identical to SEQ ID NO: 211002
  derived and/or modified CDS sequence (opt5) from neuraminidase__InfluenzaA__AGR49998

SEQ ID NO: 215826 - RNA, 1410 nt, Artificial Sequence; identical to SEQ ID NO: 208800
  derived and/or modified CDS sequence (opt5) from neuraminidase__InfluenzaA__AGR50010

SEQ ID NO: 215827 - RNA, 1410 nt, Artificial Sequence; identical to SEQ ID NO: 208800
  derived and/or modified CDS sequence (opt5) from neuraminidase__InfluenzaA__AGR50021

SEQ ID NO: 215828 - RNA, 1410 nt, Artificial Sequence; identical to SEQ ID NO: 208810
  derived and/or modified CDS sequence (opt5) from neuraminidase__InfluenzaA__AGR50032

SEQ ID NO: 215829 - RNA, 1410 nt, Artificial Sequence
  derived and/or modified CDS sequence (opt5) from neuraminidase__InfluenzaA__AGR50043
augaaccccaaucagaagaucauuaccaucggcagcgugucccugacaauuucuacgaucugcuucuuuaugcaaauugccauccucaucaccacagucacccugcacuucaaacaguacgaguuuaacagcccuccgaauaaccagguuaugcuuugugaacccacaauuaucgagagaaauauuaccgaaaucguguaucugacaaacaccacgauugagaaggaaaucugcccuaaacucgcugaguaccggaauugguccaagccccagugugacauuaccggguucgccccuuuuucuaaagauaacagcauccgccuguccgcgggaggcgacaucugggugacaagagagcccuaugucucuugcgauccugacaaguguuaccaauucgcucuugggcagggaaccacacugaauaacgugcauagcaauaacaccguucgggaucgcacgccguauagaacacuccugaugaaugaacugggcgugcccuuucaccucgggaccaagcaggucugcauugccugguccucuagcuccugucaugacggaaaagccuggcugcacgugugcaucacaggcgaugacaagaacgcuaccgccagcuucauuuacaauggccggcuuguugauucuguggucuccuggagcaaagacauccugcgcacccaggagucugaaugugugugcauuaacgggacauguacgguggucaugaccgauggauccgcuagcggcaaggccgacacaaaaauccucuuuaucgaggaggggaagauuguucauaccuccacacugucuggaagcgcgcaacacguggaagagugcuccugcuauccuagauaccccggcgugcggugugucugccgcgauaacuggaaggggagcaauagaccuaucguggacauuaacaucaaagaccacucuauuguuuccagcuacguguguucuggacuugucggcgauacgccccggaagaaugacagcuccucuagcucccauugccuggauccgaacaaugaagagggcgggcacggagugaaaggcugggccuucgacgaugggaacgacguuuggaugggacgcaccaucagcgaaaagucuagacucggcuaugagacauuuaaagugaucgaggggugguccaauccuaagagcaaacugcagauuaaccggcaggucaucguggaucgcggaaauagaucuggcuacuccggcauuuucagcgucgaagggaaguccuguaucaaccggugcuuuuauguggagcugauuagaggacgcaaggaagagaccgaaguucucuggaccucuaauagcaucguggucuucuguggcacauccgggaccuacggaacaggcucuuggcccgacggggcugaucugaaccuuaugccuauuuga

SEQ ID NO: 215830 - RNA, 1410 nt, Artificial Sequence; identical to SEQ ID NO: 208800
  derived and/or modified CDS sequence (opt5) from neuraminidase__InfluenzaA__AGR50055

SEQ ID NO: 215831 - RNA, 1410 nt, Artificial Sequence
  derived and/or modified CDS sequence (opt5) from neuraminidase__InfluenzaA__AGR50066
augaaccccaaucagaagaucauuaccaucggcagcgugugcaugacaauugggauggccaaccugauccuccaaauuggaaauaucaucuccauuuggaucucucacagcauucagcugggcaaccagaaucagaucgagacguguaaccaauccgucauuaccuacgaaaauaacacauggguuaaucagaccuaugugaacaucucuaauacaaacuucgcugccgggcagagcguggucuccgugaaacuugcgggaaauucuagccugugcccuguuuccggcugggcuauuuacagcaaggacaacucugugagaaucggguccaaaggagaugucuuugugauccgggagccguucauuagcuguucuccccucgaaugccgcaccuuuuuccugacacagggcgcccuucugaaugacaagcauuccaacggcaccaucaaagauagaagcccuuaucggacgcucaugucuugucccauuggggagguuccuucccccuacaacagccgcuuugaauccguggccuggucugcuagcgccugccacgacggaaucaauuggcugaccauuggcaucuccgggccugauaacggagcugucgccgugcugaaguauaauggcaucauuacagacaccaucaagagcuggagaaacaauauucuccggacacaagagucugagugugcgugcgugaacggguccuguuucaccgucaugacggauggaccgagcaauggccaggccucuuacaaaaucuuuaagauugaaaaaggcaagaucguuaaaagcguggagaugaacgcucccaauuaucauuacgaagagugcuccuguuacccugacucuagcgagaucacaugcgugugccgcgauaacuggcacggguccaauagacccugggucagcuucaaccagaaucuggaauaucagauuggauacaucuguucuggcauuuuuggggacaacccucggcccaaugauaagaccggauccugcggcccggugagcucuaacggggccaacggaguuaagggcuucuccuuuaaauauggcaaugggguguggaucggacgcacaaagagcauuuccucuagaaacggcuucgagaugaucugggacccuaauggguggaccggaaccgauaacaauuuuagcauuaaacaagacaucgucggcaucaacgaaugguccggguacucuggcagcuucgugcagcaucccgagcuuacaggacuggacuguauucggccuugcuucuggguugaacucauccgcggcagacccaaggagaauacgauuuggaccuccgggagcucuaucuccuuuuguggagugaacagcgauacagucggcuggucuuggcccgacggggcugagcugccuuucaccauugauaaauga

SEQ ID NO: 215832 - RNA, 1410 nt, Artificial Sequence; identical to SEQ ID NO: 208800
  derived and/or modified CDS sequence (opt5) from neuraminidase__InfluenzaA__AGR50077

SEQ ID NO: 215833 - RNA, 1410 nt, Artificial Sequence; identical to SEQ ID NO: 208800
  derived and/or modified CDS sequence (opt5) from neuraminidase__InfluenzaA__AGR50088

SEQ ID NO: 215834 - RNA, 1410 nt, Artificial Sequence; identical to SEQ ID NO: 208800
  derived and/or modified CDS sequence (opt5) from neuraminidase__InfluenzaA__AGR50099

SEQ ID NO: 215835 - RNA, 1410 nt, Artificial Sequence; identical to SEQ ID NO: 208800
  derived and/or modified CDS sequence (opt5) from neuraminidase__InfluenzaA__AGR50110

SEQ ID NO: 215836 - RNA, 1410 nt, Artificial Sequence
  derived and/or modified CDS sequence (opt5) from neuraminidase__InfluenzaA__AGR50121
augaaccccaaucagaagaucauuaccaucggcagcgugugcaugacaauugggauggccaaccugauccuccaaauuggaaauaucaucuccauuuggaucucucacagcauucagcugggcaaccagaaucagaucgagacguguaaccaauccgucauuaccuacgaaaauaacacauggguuaaucagaccuaugugaacaucucuaauacaaacuucgcugccgggcagagcguggucuccgugaaacuugcgggaaauucuagccugugcccuguuuccggcugggcuauuuacagcaaggacaacucugugagaaucggguccaaaggagaugucuuugugauccgggagccguucauuagcuguucuccccucgaaugccgcaccuuuuuccugacacagggcgcccuucugaaugacaagcauuccaacggcaccaucaaagauagaagcccuuaucggacgcucaugucuugucccauuggggagguuccuucccccuacaacagccgcuuugaauccguggccuggucugcuagcgccugccacgacggaaucaauuggcugaccauuggcaucuccgggccugauaacggagcugucgccgugcugaaguauaauggcaucauuacagacaccaucaagagcuggagaaacaauauucuccggacacaagagucugagugugcgugcgugaacggguccuguuucaccgucaugacggauggaccgagcaauggccaggccucuuacaaaaucuuucgcauugaaaagggcaaaaucguuaagagcguggagaugaacgcucccaauuaucauuacgaagagugcuccuguuacccugacucuagcgagaucacaugcgugugcagagauaacuggcacggguccaaucggcccugggucagcuucaaccagaaucuggaauaucagauuggauacaucuguucuggcauuuuuggggacaacccucgccccaaugauaaaaccggauccugcggcccggugccuagcaacggggccaacggaguuaagggcuucucuuuuaaguauggcaaugggguguggaucggaagaacaaaauccauuagcucccggaacggcuucgagaugaucugggaccccaauggguggaccggaaccgauaacaauuuuucuauuaagcaagacaucgucggcaucaacgaauggagcggguacuccggcucuuucgugcagcauccugagcuuacaggacuggacuguauucgccccugcuucuggguugaacucaucagaggccggcccaaagagaauacgauuuggaccagcggguccagcaucucuuuuuguggagugaacuccgauacagucggcuggagcuggccugacggggcugagcugccguucaccauugauaaguga

SEQ ID NO: 215837 - RNA, 1410 nt, Artificial Sequence
  derived and/or modified CDS sequence (opt5) from neuraminidase__InfluenzaA__AGR50132
augaaccccaaucagaagaucauuaccaucggcagcgugugcaugacaauugggauggccaaccugauccuccaaauuggaaauaucaucuccauuuggaucucucacagcauucagcugggcaaccagaaucagaucgagacguguaaccaauccgucauuaccuacgaaaauaacacauggguuaaucagaccuaugugaacaucucuaauacaaacuucgcugccgggcagagcguggucuccgugaaacuugcgggaaauucuagccugugcccuguuuccggcugggcuauuuacagcaaggacaacucugugagaaucggguccaaaggagaugucuuugugauccgggagccguucauuagcuguucuccccucgaaugccgcaccuuuuuccugacacagggcgcccuucugaaugacaagcauuccaacggcaccaucaaagauagaagcccuuaucggacgcucaugucuugucccauuggggagguuccuucccccuacaacagccgcuuugaauccguggccuggucugcuagcgccugccacgacggaaucaauuggcugaccauuggcaucuccgggccugauaacggagcugucgccgugcugaaguauaauggcaucauuacagacaccaucaagagcuggagaaacaauauucuccggacacaagagucugagugugcgugcgccaacggguccuguuucaccgugaugacggauggaccgagcaauggccaggcuucuuacaaaaucuuucgcauugaaaagggcaaaaucgucaagagcguugagaugaacgcccccaauuaucauuacgaagagugcuccuguuacccugacucuagcgagaucacaugcgugugcagagauaacuggcacggguccaaucggcccugggugagcuucaaccagaaucuggaauaucagauuggauacaucuguucuggcauuuuuggggacaacccucgccccaaugauaaaaccggauccugcggcccggucagcucuaacggggcuaacggagugaagggcuucuccuuuaaguauggcaaugggguuuggaucggaagaacaaaaagcauuuccucucggaacggcuucgagaugaucugggacccuaauggguggaccggaaccgauaacaauuuuagcauuaagcaagacaucgugggcaucaacgaaugguccggguacucuggcagcuucguccagcaucccgagcuuacaggacuggacuguauucgcccuugcuucuggguggaacucaucagaggccggcccaaagagaauacgauuuggaccuccgggagcucuaucuccuuuuguggaguuaacagcgauacagugggcuggucuuggcccgacggggccgagcugccuuucaccauugauaaguga

SEQ ID NO: 215838 - RNA, 1410 nt, Artificial Sequence; identical to SEQ ID NO: 208800
  derived and/or modified CDS sequence (opt5) from neuraminidase__InfluenzaA__AGR50143

SEQ ID NO: 215839 - RNA, 1410 nt, Artificial Sequence; identical to SEQ ID NO: 208800
  derived and/or modified CDS sequence (opt5) from neuraminidase__InfluenzaA__AGR50154

SEQ ID NO: 215840 - RNA, 1413 nt, Artificial Sequence; identical to SEQ ID NO: 211002
  derived and/or modified CDS sequence (opt5) from neuraminidase__InfluenzaA__AGR50165

SEQ ID NO: 215841 - RNA, 1410 nt, Artificial Sequence; identical to SEQ ID NO: 208800
  derived and/or modified CDS sequence (opt5) from neuraminidase__InfluenzaA__AGR50177

SEQ ID NO: 215842 - RNA, 1410 nt, Artificial Sequence; identical to SEQ ID NO: 208800
  derived and/or modified CDS sequence (opt5) from neuraminidase__InfluenzaA__AGR50188

SEQ ID NO: 215843 - RNA, 1410 nt, Artificial Sequence; identical to SEQ ID NO: 208800
  derived and/or modified CDS sequence (opt5) from neuraminidase__InfluenzaA__AGR50199

SEQ ID NO: 215844 - RNA, 1410 nt, Artificial Sequence; identical to SEQ ID NO: 208800
  derived and/or modified CDS sequence (opt5) from neuraminidase__InfluenzaA__AGR50210

SEQ ID NO: 215845 - RNA, 1410 nt, Artificial Sequence; identical to SEQ ID NO: 208800
  derived and/or modified CDS sequence (opt5) from neuraminidase__InfluenzaA__AGR50221

SEQ ID NO: 215846 - RNA, 1410 nt, Artificial Sequence
  derived and/or modified CDS sequence (opt5) from neuraminidase__InfluenzaA__AGR50232
augaaccccaaucagaagaucauuaccaucggcagcgugugcaugacaauugggauggccaaccugauccuccaaauuggaaauaucaucuccauuuggaucucucacagcauucagcugggcaaccagaaucagaucgagacguguaaccaauccgucauuaccuacgaaaauaacacauggguuaaucagaccuaugugaacaucucuaauacaaacuucgcugccgggcagagcguggucuccgugaaacuugcgggaaauucuagccugugcccuguuuccggcugggcuauuuacagcaaggacaacucugugagaaucggguccaaaggagaugucuuugugauccgggagccguucauuagcuguucuccccucgaaugccgcaccuuuuuccugacacagggcgcccuucugaaugacaagcauuccaacggcaccaucaaagauagaagcccuuaucggacgcucaugucuugucccauuggggagguuccuucccccuacaacagccgcuuugaauccguggccuggucugcuagcgccugccacgacggaaucaauuggcugaccauuggcaucuccgggccugauaacggagcugucgccgugcugaaguauaauggcaucauuacagacaccaucaagagcuggagaaacaauauucuccggacacaagagucugagugugcgugcgugaacggguccuguuucaccgucaugacggauggaccgaauaacggccaggccagcuacaaaaucuuucgcauugaaaagggcaaaaucguuaagucuguggagaugaaugcucccaacuaucauuacgaagagugcagcuguuacccugacuccucugagaucacaugcgugugcagagauaauuggcacgggagcaaccggcccugggucuccuucaaucagaaccuggaauaucagauuggauacaucuguagcggcauuuuuggggacaauccucgccccaacgauaaaaccggaucuugcggcccgguguccagcaacggggccaauggaguuaagggcuucucuuuuaaguauggcaacgggguguggaucggaagaacaaaauccauuagcucccggaauggcuucgagaugaucugggacccuaacggguggaccggaaccgauaauaacuuuucuauuaagcaagacaucgucggcaucaaugaauggagcggguacuccggcucuuucgugcagcaucccgagcuuacaggacuggacuguauucgcccuugcuucuggguugaacucaucagaggccggcccaaagagaacacgauuuggaccagcggguccagcaucucuuuuuguggagucaauuccgauacagugggcuggagcuggcccgacggggcugagcugccuuucaccauugauaaguga

SEQ ID NO: 215847 - RNA, 1410 nt, Artificial Sequence; identical to SEQ ID NO: 208800
  derived and/or modified CDS sequence (opt5) from neuraminidase__InfluenzaA__AGR50243

SEQ ID NO: 215848 - RNA, 1410 nt, Artificial Sequence; identical to SEQ ID NO: 208800
  derived and/or modified CDS sequence (opt5) from neuraminidase__InfluenzaA__AGR50254

SEQ ID NO: 215849 - RNA, 1410 nt, Artificial Sequence; identical to SEQ ID NO: 208800
  derived and/or modified CDS sequence (opt5) from neuraminidase__InfluenzaA__AGR50265

SEQ ID NO: 215850 - RNA, 1410 nt, Artificial Sequence
  derived and/or modified CDS sequence (opt5) from neuraminidase__InfluenzaA__AGR50276
augaaccccaaucagaagaucauuaccaucggcagcgugugcaugacaauugggauggccaaccugauccuccaaauuggaaauaucaucuccauuuggaucucucacagcauucagcugggcaaccagaaucagaucgagacguguaaccaauccgucauuaccuacgaaaauaacacauggguuaaucagaccuaugugaacaucucuaauacaaacuucgcugccgagcagagcguggucuccgugaaacuugcgggaaauucuagccugugcccuguuuccgggugggcuauuuacagcaaggacaacucugugagaaucggcuccaaaggggaugucuuugugauccgggaaccguucauuagcuguucuccccucgagugccgcaccuuuuuccugacacagggagcccuucugaaugacaagcauuccaacggcaccaucaaagauagaagcccuuaucggacgcucaugucuugucccauuggcgaaguuccuucccccuacaacagccgcuuugaguccguggccuggucugcuagcgccugccacgacgggaucaauuggcugaccauuggaaucuccggcccugauaacggggcugucgccgugcugaaguauaauggaaucauuacagacaccaucaagagcuggagaaacaauauucuccggacacaagagucugaaugugcgugcgugaacggcuccuguuucaccgucaugacggaugggccgagcaauggacaggccucuuacaaaaucuuucgcauugagaagggcaaaaucguuaagagcguggaaaugaacgcucccaauuaucauuacgaggagugcuccuguuacccugacucuagcgaaaucacaugcgugugcagagauaacuggcacggcuccaaucggcccugggucagcuucaaccagaaucuggaguaucagauuggguacaucuguucuggaauuuuuggcgacaacccucgccccaaugauaaaaccggguccugcggaccggugagcucuaacggcgccaacgggguuaagggauucuccuuuaaguauggcaauggcguguggaucgggagaacaaaaagcauuuccucucggaacggauucgaaaugaucugggacccuaauggcuggaccgggaccgauaacaauuuuagcauuaagcaagacaucgucggaaucaacgagugguccggcuacucugggagcuucgugcagcaucccgaacuuacaggccuggacuguauucgcccuugcuucuggguugagcucaucagaggacggcccaaagagaauacgauuuggaccuccggcagcucuaucuccuuuuguggggugaacagcgauacagucggauggucuuggcccgacggcgcugaacugccuuucaccauugauaaguga

SEQ ID NO: 215851 - RNA, 1410 nt, Artificial Sequence; identical to SEQ ID NO: 208800
  derived and/or modified CDS sequence (opt5) from neuraminidase__InfluenzaA__AGR50287

SEQ ID NO: 215852 - RNA, 1410 nt, Artificial Sequence
  derived and/or modified CDS sequence (opt5) from neuraminidase__InfluenzaA__AGR50298
augaaccccaaucagaagaucauuaccaucggcagcgugugcaugacaauugggauggccaaccugauccuccaaauuggaaauacgaucuccaucuggauuucucacagcauccagccuggcaaccagaaucagauugagaccuguaaccaauccgucaucacauacgaaaauaacaccuggguuaaucagacauaugugaacauuucuaauaccaacuucgcugccgggcagagcguggucuccgugaaacuggcgggaaauucuagccuuugcccgguuuccggcugggcuaucuacagcaaggacaacucuauuagaaucggguccaaaggagauguguuugucauccgggagcccuucauuagcuguucuccucuggaaugccgcacauuuuuccucacccagggcgcccugcuuaaugacaagcauuccaacggcacgaucaaagauagaagccccuaucggacccugaugucuuguccuauuggggaggugcccuccccuuacaacagccgcuuugaauccguugccuggucugcuagcgccugccacgacggaaucaauuggcucacaauuggcaucuccgggccggauaacggagcuguggccguccugaaguauaauggcaucauuaccgacacaaucaagagcuggagaaacaauauucugcggacccaagagucugagugugcgugcgugaacggguccuguuucacggugaugacagauggacccagcgacggccaggccucuuacaaaaucuuucgcauugaaaagggcaaaaucgucaagagcguugagaugaaugcuccuaacuaucauuacgaagagugcuccuguuaccccgauucuagcgagauuaccugcgugugcagagacaauuggcacggguccaaccggccuugggugagcuucaaucagaaccucgaauaucagaucggauacaucuguucuggcauuuuuggggauaauccccgcccgaacgacaaaacaggauccugcggcccugucagcucuaauggggccaacggagugaagggcuucuccuuuaaguauggcaacgggguuuggaucggaagaaccaaaagcauuuccucucggaauggcuucgagaugaucugggaucccaacggguggaccggaacagacaauaacuuuagcauuaagcaagacaucgugggcaucaaugaaugguccggguacucuggcagcuucguccagcauccugagcugacgggacuugauuguauucgccccugcuucuggguggaacugaucagaggccggcccaaagagaacaccauuuggacauccgggagcucuaucuccuuuuguggaguuaauagcgacaccgugggcuggucuuggccugauggggcugagcucccguucacaauugacaaguga

SEQ ID NO: 215853 - RNA, 1410 nt, Artificial Sequence; identical to SEQ ID NO: 208800
  derived and/or modified CDS sequence (opt5) from neuraminidase__InfluenzaA__AGR50309

SEQ ID NO: 215854 - RNA, 1410 nt, Artificial Sequence; identical to SEQ ID NO: 208800
  derived and/or modified CDS sequence (opt5) from neuraminidase__InfluenzaA__AGR50320

SEQ ID NO: 215855 - RNA, 1410 nt, Artificial Sequence; identical to SEQ ID NO: 208800
  derived and/or modified CDS sequence (opt5) from neuraminidase__InfluenzaA__AGR50331

SEQ ID NO: 215856 - RNA, 1410 nt, Artificial Sequence
  derived and/or modified CDS sequence (opt5) from neuraminidase__InfluenzaA__AGR50342
augaaccccaaucagaagaucauuaccaucggcagcgugugcaugacaauugggauggccaaccugauccuccaaauuggaaauaucaucuccauuuggaucucucacagcauucagcugggcaaccagaaucagaucgagacguguaaccaauccgucauuaccuacgaaaauaacacauggguuaaucagaccuaugugaacaucucuaauacaaacuucgcugccgggcagagcgugauuuccgucaaacuugcgggaaauucuagccugugcccuguguccggcugggcuaucuacagcaaggacaacucuguuagaaucggguccaaaggagauguguuugucauucgggagccguucaucagcuguucuccccucgaaugccgcaccuuuuuccugacacagggcgcccuucugaaugacaagcauuccaacggcaccauuaaagauagaagcccuuaucggacgcucaugucuugucccaucggggaggugccuucccccuacaacagccgcuuugaauccguugccuggucugcuagcgccugccacgacggaauuaauuggcugaccaucggcaucuccgggccugauaacggagcuguggccguccugaaguauaauggcauuaucacagacaccauuaagagcuggagaaacaauauccuccggacacaagagucugagugugcgugcgugaacggguccuguuucaccgugaugacggauggaccgagcaauggccaggccucuuacaaaauuuuucgcaucgaaaagggcaaaaucgucaagagcguugagaugaacgcucccaauuaucauuacgaagagugcuccuguuacccugacucuagcgagauuacaugcgugugcagagauaacuggcacggguccaaucggcccugggugagcuucaaccagaaucuggaauaucagaucggauacauuuguucuggcaucuuuggggacaacccucgccccaaugauaaaaccggauccugcggcccggucagcucuaacggggccaacggagugaagggcuucuccuuuaaguauggcaaugggguuuggauuggaagaacaaaaagcaucuccucucggaacggcuucgagaugauuugggacccuaauggguggaccggaaccgauaacaauuuuagcaucaagcaagacaucgugggcauuaacgaaugguccggguacucuggcagcuucguccagcaucccgagcuuacaggacuggacuguauccgcccuugcuucuggguggaacucauuagaggccggcccaaagagaauacgaucuggaccuccgggagcucuauuuccuuuuguggaguuaacagcgauacagugggcuggucuuggcccgacggggcugagcugccuuucaccaucgauaaguga

SEQ ID NO: 215857 - RNA, 1410 nt, Artificial Sequence; identical to SEQ ID NO: 208800
  derived and/or modified CDS sequence (opt5) from neuraminidase__InfluenzaA__AGR50353

SEQ ID NO: 215858 - RNA, 1413 nt, Artificial Sequence; identical to SEQ ID NO: 211002
  derived and/or modified CDS sequence (opt5) from neuraminidase__InfluenzaA__AGR50364

SEQ ID NO: 215859 - RNA, 1410 nt, Artificial Sequence
  derived and/or modified CDS sequence (opt5) from neuraminidase__InfluenzaA__AGR55170
augaaccccaaucagaagaucauuaccaucggcagcgugucccugacaauuucuacgaucugcuucuuuaugcaaauugccauccucaucaccacagucacccugcacuucaaacaguacgaguuuaacagcccuccgaauaaccagguuaugcuuugugaacccacaauuaucgagagaaauauuaccgaaaucguguaucugacaaacaccacgauugagaaggaaaucugcccuaaacucgcugaguaccggaauugguccaagccccagugugacauuaccggguucgccccuuuuucuaaagauaacagcauccgccuguccgcgggaggcgacaucugggugacaagagagcccuaugucucuugcgauccugacaaguguuaccaauucgcucuugggcagggaaccacacugaauaacgugcauagcaaugauaccguucgggaccgcacgccguauagaacacuccugaugaacgaacugggcgugcccuuucaccucgggaccaagcaggucugcauugccugguccucuagcuccugucaugauggaaaagccuggcugcacgugugcaucacaggcgacgauaagaaugcuaccgccagcuucauuuacaacggccggcuuguugacucuaucguguccuggagcaaagagauucugcgcacccaggaaucugagugugucugcaucaaugggacauguacgguggugaugaccgauggauccgcuagcggcaaggccgacacaaaaauccucuuuauugaggaagggaagaucguccauaccuccacacugucuggaagcgcgcaacacguugaggaaugcuccugcuauccuagauaccccggcgugcggugugugugccgcgauaacuggaaggggagcaacagaccuauugucgacaucaauauuaaagaccacucuaucguguccagcuacguuuguucuggacuugugggcgauacgccccggaagaacgacagcuccucuagcucccauugccuggauccgaauaacgaggaaggcgggcacggagucaaaggcugggccuucgacgaugggaaugacguguggaugggacgcaccaucagcgagaagucuagacucggcuaugagacauuuaaaguuauugaagggugguccaacccuaauagcaagcugcagaucaaccggcagauuaucguggaucgcggaaauagaucuggcuacuccggcauuuucagcgucgaggggaaauccuguaucaaccggugcuuuuauguggaacugauuagaggacgcaaggaggaaaccgagguccucuggaccucuaauagcaucgugguuuucuguggcacauccgggaccuacggaacaggcucuuggcccgacggggcugauaucaaccugaugccuauuuga

SEQ ID NO: 215860 - RNA, 1410 nt, Artificial Sequence; identical to SEQ ID NO: 206217
  derived and/or modified CDS sequence (opt5) from neuraminidase__InfluenzaA__AGR55180

SEQ ID NO: 215861 - RNA, 1410 nt, Artificial Sequence; identical to SEQ ID NO: 206217
  derived and/or modified CDS sequence (opt5) from neuraminidase__InfluenzaA__AGR55181

SEQ ID NO: 215862 - RNA, 1410 nt, Artificial Sequence; identical to SEQ ID NO: 206217
  derived and/or modified CDS sequence (opt5) from neuraminidase__InfluenzaA__AGR55183

SEQ ID NO: 215863 - RNA, 1410 nt, Artificial Sequence
  derived and/or modified CDS sequence (opt5) from neuraminidase__InfluenzaA__AGR55184
augaaccccaaucagaagaucauuaccaucggcagcgugucccugacaauugccacgaucugcuuccucaugcaaauugcuauccuggucaccacaguuacccuucacuuuaaacagcaugaguguaacucuccuccgaagaaucaggugaugcugugcgaacccacaaucauugagagaaacaucaccgaaauuguguaccucacaaauaccacgaucgagaaagaaauuuguccuaagcuggccgaguaucggaacuggagcaaaccccagugcaauaucaccggguucgcgccuuuuuccaaggacaacucuauucgccuuagcgcuggaggcgauaucugggucacaagagagcccuacguguccugugacccugauaagugcuaucaauucgcccuggggcagggaaccacacucaauaacggccacucuaaugacaccguucaugaucggacgccguaccgcacacugcugaugaacgaacucggggugcccuuucaccugggaaccagacaggucuguaucgccuggagcuccagcucuugccaugacggcaaggcuuggcuucacguguguguuacaggcgaugacaaaaaugccaccgcuuccuucauuuauaacgggcggcugguggauagcaucggaucuugguccaaaaagauucuccgcacccaggagagcgaaugcgucuguaucaauggcacaugcacgguggugaugaccgacgggucugccuccggaaaagcggauacaaagauucuguuuaucgaggagggcaagaucguccacauuagcacccuuuccgggucugcccaacauguugaagagugcagcuguuacccuagauaucccggagugcggugcgugugucgcgacaacuggaaaggcuccaacagaccuaucgucgauauuaaugugaaggacuacagcaucguuucuuccuacgugugcagcggccuggucggggacacaccccggaaaaacgauucuuucagcuccucucacugucucgacccgaauaacgaagagggaggccauggggugaagggaugggcuuuugaugacggcaaugauguuuggauggggcgcaccauuagcgaaaaacugagauccggauaugagacguucaaggugaucgagggcuggagcaaaccuaacucuaagcugcagaucaaucggcaggucauuguggaacgcggcaacagauccggguacagcggaaucuuuucugucgagggcaaguccugcauuaaucgguguuucuauguggaacucaucagagggcgcaaagaggaaacagagguuugguggaccagcaacuccauuguggucuuuugcggaaccucuggcacauacgggaccggcagcuggcccgacggagccgauaucaaucugaugccuauuuga

SEQ ID NO: 215864 - RNA, 1410 nt, Artificial Sequence
  derived and/or modified CDS sequence (opt5) from neuraminidase__InfluenzaA__AGR55185
augaaccccaaucagaagaucauuaccaucggcagcgugucccugacaauugccacgaucugcuuccucaugcaaauugcuauccuggucaccacaguuacccuucacuuuaaacagcaugaguguaacucuccuccgaagaaucaggugaugcugugcgaacccacaaucauugagagaaacaucaccgaaauuguguaccucacaaauaccacgaucgagaaagaaauuuguccuaagcuggccgaguaucggaacuggagcaaaccccagugcaauaucaccggguucgcgccuuuuuccaaggacaacucuauucgccuuagcgcuggaggcgauaucugggucacaagagagcccuacguguccugugacccugauaagugcuaucaauucgcccuggggcagggaaccacacucaauaacggccacucuaaugacaccguucaugaucggacgccguaccgcacacugcugaugaacgaacucggggugcccuuucaccugggaaccagacaggucuguaucgccuggagcuccagcucuugccaugacggcaaggcuuggcuucacguguguguuacaggcgaugacaaaaaugccaccgcuuccuucauuuauaacgggcggcugguggauagcaucggaucuugguccaaaaagauucuccgcacccaggagagcgaaugcgucuguaucaauggcacaugcacgguggugaugaccgacgggucugccuccggaaaagcggauacaaagauucuguuuaucgaggagggcaagaucguccacauuagcacccuuuccgggucugcccaacauguugaagagugcagcuguuacccuagauaucccggagugcggugcgugugucgcgacaacuggaaaggcuccaacagaccuaucgucgauauuaaugugaaggacuacagcaucguuucuuccuacgugugcagcggccuggucggggacacaccccggaaaaacgauucuuucagcuccucucacugucucgacccgaauaacgaagagggaggccauggggugaagggaugggcuuuugaugacggcaaugauguuuggauggggcgcaccauuagcgaaaaacugagauccggauaugagacguucaaggugaucgagggcuggagcaaaccuaacucuaagcugcagaucaaucggcaggucauuguggaacgcggcaacagauccggguacagcggaaucuuuucugucgagggcaaguccugcauuaaucgguguuucuauguggaacucaucagagggcgcaaagaggaaacagagguuugguggaccagcaacuccauuguggucuuuugcggaaccucucggacauacggcaccgggagcuggcccgacggcgccgauaucaaucugaugccuauuuga

SEQ ID NO: 215865 - RNA, 1410 nt, Artificial Sequence
  derived and/or modified CDS sequence (opt5) from neuraminidase__InfluenzaA__AGR55186
augaaccccaaucagaagaucauuaccaucggcagcgugucccugacaauuucuacgaucugcuucuuuaugcaaauugccauccucaucaccacagucacccugcacuucaaacaguacgaguuuaacagcccuccgaauaaccagguuaugcuuugugaacccacaauuaucgagagaaauauuaccgaaaucguguaucugacaaacaccacgauugagaaggaaaucugcccuaaacucgcugaguaccggaauugguccaagccccagugugacauuaccggguucgccccuuuuucuaaagauaacagcauccgccuguccgcgggaggcgacaucugggugacaagagagcccuaugucucuugcgauccugacaaguguuaccaauucgcucuugggcagggaaccacacugaauaacgugcauagcaaugauaccguucacgaccggacgccguaucgcacacuccugaugaacgaacugggcgugcccuuucaucucgggaccaagcaggucugcauugccugguccucuagcuccugucacgauggaaaagccuggcugcaugugugcguuacaggcgacgauaagaaugcuaccgccagcuucaucuacaacggcagacuuguggacucuauugucuccuggagcaaaaagauccugcggacccaggagucugaaugugugugcauuaaugggacauguacgguggucaugaccgauggauccgcuagcggcaaagccgacacaaagauccucuuuaucgaggaggggaagauuguucacaccuccacacugucuggaagcgcgcaacacguggaagagugcuccugcuauccucgcuaccccggcgugagaugugucugccgggauaacuggaaagggagcaaccgcccuaucguggacauuaauaucaaggacuacucuauuguuuccagcuauguguguucuggacuugucggcgauacccccagaaagaacgacagcuccucuagcucccauugccuggaaccgaauaacgaggaaggcgggcacggagugaaaggcugggccuucgaugacgggaaugauguuuggaugggacggacgaucagcgagaaacuccgcucuggcuacgagacauuuaaggugaucgaagggugguccaacccuaauagcaaacugcagauuaacagacaggucaucguggaccggggaaaucgcucuggcuauuccggcauuuucagcgucgaggggaaguccuguaucaacagaugcuuuuacguggaacugauucggggaagaaagcaggagaccgaaguucucuggaccucuaauagcaucguggucuucuguggcacauccgggaccuauggaacaggcucuuggcccgauggggcugacauuaaccugaugccuaucuga

SEQ ID NO: 215866 - RNA, 1410 nt, Artificial Sequence; identical to SEQ ID NO: 206217
  derived and/or modified CDS sequence (opt5) from neuraminidase__InfluenzaA__AGR55187

SEQ ID NO: 215867 - RNA, 1410 nt, Artificial Sequence; identical to SEQ ID NO: 206786
  derived and/or modified CDS sequence (opt5) from neuraminidase__InfluenzaA__AGR55192

SEQ ID NO: 215868 - RNA, 1410 nt, Artificial Sequence
  derived and/or modified CDS sequence (opt5) from neuraminidase__InfluenzaA__AGR55195
augaaccccaaucagaagaucauuaccaucggcagcgugucccugacaauuucuacgaucugcuucuuuaugcaaauugccauccucaucaccacagucacccugcacuucaaacaguacgaguuuaacagcccuccgaauaaccagguuaugcuuugugaacccacaauuaucgagagaaauauuaccgaaaucguguaucugacaaacaccacgauugagaaggaaaucugcccuaaacucgcugaguaccggaauugguccaagccccagugugacauuaccggguucgccccuuuuucuaaagauaacagcauccgccuguccgcgggaggcgacaucugggugacaagagagcccuaugucucuugcgauccugacaaguguuaccaauucgcucuugggcagggaaccacacugaauaacgugcauagcaaugauaccguucacgaccggacgccguaucgcacacuccugaugaacgaacugggcgugcccuuucaucucgggaccaagcaggucugcauugccugguccucuagcuccugucacgauggaaaagccuggcugcaugugugcguuacaggcgacgauaagaaugcuaccgccagcuucaucuacaacggcagacuuguggacucuauugucuccuggagcaaagagauccugcggacccaggaaucugagugugugugcauuaaugggacauguacgguggucaugaccgauggauccgcuagcggcaaggccgacacaaaaauccucuuuaucgaggaagggaagauuguucacaccuccacacugucuggaagcgcgcaacacguggaggaaugcuccugcuauccucgcuaccccggcgugagaugugucugccgggaucauuggaaggggagcaaccgcccuaucguggacauuaacaucaaagacuacucuauuguuuccagcuauguguguucuggacuugucggcgauacccccagaaagaaugacagcuccucuagcucccacugccuggauccgaacaaugaggaaggcgggcauggagugaaaggcugggccuucgacgaugggaacgacguuuggaugggacggacgaucagcgagaagcuccgccugggcuacgagacauuuaaagugaucgaaggguggucuaauccuaacuccaagcugcagauuaauagacaggucaucguggaucggggaaaccgcagcggcuauucuggcauuuucuccgucgaggggaaaagcuguaucaauagaugcuuuuacguggaacucauucggggaagaaaggaggaaaccgagguucuguggaccuccaacucuaucguggucuucuguggcacaagcgggaccuauggaacaggcuccuggcccgacggggcugauauuaaucuuaugccuaucuga

SEQ ID NO: 215869 - RNA, 1410 nt, Artificial Sequence
  derived and/or modified CDS sequence (opt5) from neuraminidase__InfluenzaA__AGR55204
augaaccccaaucagaagaucauuaccaucggcagcgugucccugacaauuucuacgaucugcuucuuuaugcaaauugccauccucaucaccacagucacccugcacuucaaacaguacgaguuuaacagcccuccgaauaaccagguuaugcuuugugaacccacaauuaucgagagaaauauuaccgaaaucguguaucugacaaacaccacgauugagaaggaaaucugcccuaaacucgcugaguaccggaauugguccaagccccagugugacauuaccggguucgccccuuuuucuaaagauaacagcauccgccuguccgcgggaggcgacaucugggugacaagagagcccuaugucucuugcgauccugacaaguguuaccaauucgcucuugggcagggaaccacacugaauaacgugcauagcaaugauaccguucgggaccgcacgccguauagaacacuccugaugaacgaacugggcgugcccuuucaccucgggaccaagcaggucugcauugccugguccucuagcuccugucaugauggaaaagccuggcugcacgugugcaucacaggcgacgauaagaaugcuaccgccagcuucauuuacaacggccggcuuguugacucuaucguguccuggagcaaagagauucugcgcacccaggaaucugagugugucugcaucaaugggacauguacgguggugaugaccgauggauccgcuagcggcgaggccgacacaaagauccucuuuauugaagaggggaaaaucguccauaccuccacacugucuggaagcgcgcaacacguugaagagugcuccugcuauccuagauaccccggcgugcggugugugugccgcgauaacuggaaggggagcaacagaccuauugucgacaucaauauuaaggaccacucuaucguguccagcuacguuuguucuggacuugugggcgauacgccccggaaaaacgacagcuccucuagcucccauugccuggauccgaauaacgaagagggcgggcacggagucaagggcugggccuucgacgaugggaaugacguguggaugggacgcaccaucagcgagaaaucuagacucggcuaugaaacauuuaagguuauugaggggugguccaacccuaaaagcaagcugcagaucaaucgccaggugauugucgaucggggaaacagaucuggcuacuccggcaucuucagcguggaagggaaauccuguauuaaucggugcuuuuaugucgagcugaucagaggacgcaaggaagagaccgaggugcucuggaccucuaacagcauuguuguguucuguggcacaucccggaccuacgggacaggaucuuggcccgacggcgcugauaucaaucugaugccuaucuga

SEQ ID NO: 215870 - RNA, 1410 nt, Artificial Sequence
  derived and/or modified CDS sequence (opt5) from neuraminidase__InfluenzaA__AGR55218
augaaccccaaucagaagaucauuaccaucggcagcgugucccugacaauuucuacgaucugcuucuuuaugcaaauugccauccucaucaccacagucacccugcacuucaaacaguacgaguuuaacagcccuccgaauaaccagguugugcuuugugaacccacaauuaucgagagaaauauuaccgaaaucguguaucugacaaacaccacgauugagaaggaaaucugcccuaaacucgcugaguaccggaauugguccaagccccagugugacauuaccggguucgccccuuuuucuaaagauaacagcauccgccuguccgcgggaggcgacaucugggucacaagagagcccuaugugucuugcgauccugacaaguguuaccaauucgcucuugggcagggaaccacacugaauaacguucauagcaauaacaccgugcgggaucgcacgccguauagaacacuccugaugaaugaacugggcguccccuuucaccucgggaccaaacaggugugcauugccugguccucuagcuccugucaugacggaaaggccuggcugcacguuugcaucacaggcgaugacaagaacgcuaccgccagcuucauuuacaauggccggcuuguggauucuaucgucuccuggagcaaagagauucugcgcacccaggaaucugagugugugugcaucaacgggacauguacgguggucaugaccgacggauccgcuagcggcaaggccgauacaaaaauccucuuuauugaggaagggaagaucguucauaccuccacacugucuggaagcgcgcaacacguggaggaaugcuccugcuauccuagauaccccggcgugcggugugucugccgcgacaacuggaaggggagcaauagaccuauuguggauaucaacauuaaagaccacucuaucguuuccagcuacguguguucuggacuugucggcgacacgccccggaagaaugauagcuccucuagcucccauugccuggacccgaacaaugaggaaggcgggcacggagugaaaggcugggccuucgaugacgggaacgauguuuggaugggacgcaccaucagcgagaagucuagacucggcuaugagacauuuaaagugauugaagggugguccaauccuaagagcaaacugcagaucaaccggcaggucauuguggaccgcggaaauagaucuggcuacuccggcaucuucagcgucgaggggaaguccuguauuaaccggugcuuuuauguggaacugaucagaggacgcaaggaggaaaccgagguucucuggaccucuaauagcauuguggucuucuguggcacauccgggaccuacggaacaggcucuuggcccgauggggcugacaucaaccugaugccuaucuga

SEQ ID NO: 215871 - RNA, 1410 nt, Artificial Sequence; identical to SEQ ID NO: 215461
  derived and/or modified CDS sequence (opt5) from neuraminidase__InfluenzaA__AGT18726

SEQ ID NO: 215872 - RNA, 1410 nt, Artificial Sequence
  derived and/or modified CDS sequence (opt5) from neuraminidase__InfluenzaA__AGT18727
augaaccccaaucagaagaucauuaccaucggcagcgugugcaugacaauugggauggccaaccugauccuccaaauuggaaauaucaucuccauuuggaucucucacagcauucagcugggcucccagaaccagaucgagacguguaaucaaucugucauuaccuacgaaaacaauacauggguuaaccagaccuaugugaauaucagcaacacaaauuucgcugccgggcaguccguggucucugugaaacuugcgggaaacagcucccugugcccuguuagcggcugggcuauuuacucuaaggacaauuccgugagaaucgggagcaaaggagaugucuuugugauccgggagccguucauuucuuguagcccccucgaaugccgcaccuuuuuccugacacagggcgcccuucugaacgacaagcauuccaauggcaccaucaaagauagaucuccuuaucggacgcucauguccugucccauuggggagguuccuagccccuacaacucccgcuuugaaucuguggccuggagcgcuuccgccugccacgacggaaucaacuggcugaccauuggcaucagcgggccugauucuggagcugucgccgugcugaaguauaauggcaucauuacagacaccaucaaguccuggagaaacaauauucuccggacacaagagagcgagugugcgugcgugaacgggucuuguuucaccaucaugacggauggaccgagcgacggccaggccuccuacaaaauuuuucgcaucgaaaagggcaaaaucgucaagucuguugagaugaaugcucccaacuaucauuacgaagagugcagcuguuacccugauuccagcgagauuacaugcgugugcagagacaauuggcacgggucuaaccggcccuggguguccuucaaucagaaccuggaauaucagaucggauacauuuguagcggcaucuuuggggauaauccucgccccaacgacaaaaccggaucuugcggcccggucuccagcaauggggccaacggagugaagggcuucuccuuuaaguauggcaaugggguuuggauuggaagaacaaaaucuaucagcucccggaagggcuucgagaugauuugggauccuaacggguggucuggaaccgacaacaauuuuagcaucaaacaagacaucgugggcauuaacgaaugguccggguacagcggcucuuucguccagcaucccgagcuuaccggacuggauuguauccgcccuugcuucuggguggaacucauuagaggccggcccaaggagaauacaaucuggacguccgggagcucuauuuccuuuuguggaguuaacagcgacaccgugggcuggucuuggcccgauggggcugagcugccuuucacaaucgacaaauga

SEQ ID NO: 215873 - RNA, 1410 nt, Artificial Sequence; identical to SEQ ID NO: 215461
  derived and/or modified CDS sequence (opt5) from neuraminidase__InfluenzaA__AGT18728

SEQ ID NO: 215874 - RNA, 1410 nt, Artificial Sequence
  derived and/or modified CDS sequence (opt5) from neuraminidase__InfluenzaA__AGT18729
augaaccccaaucagaagaucauuaccaucggccaagugugcaugacaauugggauggccaaccugauccuccagauuggaaauaucaucagcauuuggaucucccacucuauucagcugggcagccagaaccaaaucgagacguguaaucaguccgucauuaccuacgaaaacaauacauggguuaaccagaccuaugugaauaucucuaacacaaauuucgcugccgggcagagcguggucuccgugaaacuugcgggaaacucuagccugugcccuguuuccggcugggcuauuuacagcaaggacaauucugugagaaucggguccaaaggagaugucuuugugauccgggagccguucauuagcuguucuccccucgaaugccgcaccuuuuuccugacacaaggcgcccuucugaacgacaagcauuccaauggcaccaucaaagauagaagcccuuaucggacgcucaugucuugucccauuggggagguuccuucccccuacaacagccgcuuugaauccguggccuggucugcuagcgccugccacgacggaaucaacuggcugaccauuggcaucuccgggccugauagcggagcugucgccgugcugaaguauaauggcaucauuacagacaccaucaagucuuggagaaacaauauucuccggacacaggaguccgagugugcgugcgugaacgggagcuguuucaccaucaugacggauggaccgucugacggccaggccagcuacaaaauuuuucgcaucgaaaagggcaaaaucgucaaguccguugagaugaaugcucccaacuaucauuacgaagagugcucuuguuacccugauagcuccgagauuacaugcgugugcagagacaauuggcacgggagcaaccggcccugggugucuuucaaucagaaccuggaauaucaaaucggauacauuuguuccggcaucuuuggggauaauccucgccccaacgacaaaaccggaagcugcggcccggucucuuccaauggggccaacggagugaagggcuucagcuuuaaguauggcaaugggguuuggauuggaagaacaaaauccaucucuagccggaagggcuucgagaugauuugggauccuaacggguggaccggaaccgacaacaauuuuuccaucaaacaggacaucgugggcauuaacgaauggucuggguacagcggcuccuucguccagcaucccgagcuuacaggacuggauuguauccgcccuugcuucuggguggaacucauuagaggccggcccaaggagaauacgaucuggaccagcgggucuuccauuagcuuuuguggaguuaacucugacacagugggcugguccuggcccgauggggcugagcugccuuucaccaucgacaaauga

SEQ ID NO: 215875 - RNA, 1410 nt, Artificial Sequence
  derived and/or modified CDS sequence (opt5) from neuraminidase__InfluenzaA__AGT18730
augaaccccaaucagaagaucauuaccaucggcagcgugugcaugacaauugggauggccaaccugauccuccaaauuggaaauaucaucuccauuuggaucucucacagcauucagcugggcaaccagucccagaucgagacguguaaucaaucugucauuaccuacgaaaacaauacauggguuaaccagaccuaugugaauaucagcaacacaaauuucgcugccgggcaguccguggucucugugaaacuugcgggaaacagcucccugugcccuguuagcggcugggcuauuuacucuaaggacaauuccgugagaaucgggagcaaaggagaugucuuugugauccgggagccguucauuucuuguagcccccucgaaugccgcaccuuuuuccugacacagggcgcccuucugaacgacaagcauuccaauggcaccaucaaagauagaucuccuuaucggacgcucauguccugucccauuggggagguuccuagccccuacaacucccgcuuugaaucuguggccuggagcgcuuccgccugccacgacggaaucaacuggcugaccauuggcaucagcgggccugauucuggagcugucgccgugcugaaguauaauggcaucauuacagacaccaucaaguccuggagaaacaauauucuccggacacaagagagcgagugugcgugcgugaacgggucuuguuucaccaucaugacggauggaccgagcgacggccaggccuccuacaaaauuuuucgcaucgaaaagggcaaaaucgucaagucuguugagauuaaugcucccaacuaucauuacgaagagugcagcuguuacccugauuccagcgagaucacaugcgugugcagagacaauuggcacgggucuaaccggcccuggguguccuucaaucagaaccuggaauaucagauuggauacaucuguagcggcauuuuuggggauaauccucgccccaacgacaaaaccggaucuugcggcccggucuccagcaauggggccaacggagugaagggcuucuccuuuaaguauggcaaugggguuuggaucggaagaacaaaaucuauuagcucccggaagggcuucgagaugaucugggauccuaacggguggaccggaaccgacaacaauuuuucuaucaaacaagacauugugggcaucaacgaauggagcggguacuccggcagcuucguccagcaucccgagcuuacaggacuggauuguauucgcccuugcuucuggguggaacucaucagaggccggcccaaggagaauacgauuuggaccucuggguccagcaucucuuuuuguggaguuaacuccgacacagugggcuggagcuggcccgauggggcugagcugccuuucaccaucgacaaauga

SEQ ID NO: 215876 - RNA, 1410 nt, Artificial Sequence; identical to SEQ ID NO: 215461
  derived and/or modified CDS sequence (opt5) from neuraminidase__InfluenzaA__AGT18731

SEQ ID NO: 215877 - RNA, 1410 nt, Artificial Sequence
  derived and/or modified CDS sequence (opt5) from neuraminidase__InfluenzaA__AGT18732
augaaccccaaucagaagaucauuaccaucggcagcgugugcaugacaauugggauggccaaccugauccuccaaauuggaaauaucaucuccauuuggaucucucacagcauucagcugggcaaccagucccagaucgagacguguaaucaaucugucauuaccuacgaaaacaauacauggguuaaccagaccuaugugaauaucagcaacacaaauuucgcugccgggcaguccguggucucugugaaacuugcgggaaacagcucccugugcccuguuagcggcugggcuauuuacucuaaggacaauuccgugagaaucgggagcaaaggagaugucuuugugauccgggagccguucauuucuuguagcccccucgaaugccgcaccuuuuuccugacacagggcgcccuucugaacgacaagcauuccaauggcaccaucaaagauagaucuccuuaucggacgcucauguccugucccauuggggagguuccuagccccuacaacucccgcuuugaaucuguggccuggagcgcuuccgccugccacgacggaaucaacuggcugaccauuggcaucagcgggccugauucuggagcugucgccgugcugaaguauaauggcaucauuacagacaccaucaaguccuggagaaacaauauucuccggacacaagagagcgagugugcgugcgugaacgggucuuguuucaccaucaugacggauggaccgagcgacggccaggccuccuacaaaauuuuucgcaucgaaaagggcaaaaucgucaagucuguugagaugaaugcucccaacuaucauuacgaagagugcagcuguuacccugauuccagcgagauuacaugcgugugcagagacaauuggcacgggucuaaccggcccuggguguccuucaaucagaaccuggaauaucagaucggauacauuuguagcggcaucuuuggggauaauccucgccccaacgacaaaaccggaucuugcggcccggucuccagcaauggggccaacggagugaagggcuucuccuuuaaguauggcaaugggguuuggauuggaagaacaaaaucuaucagcucccggaagggcuucgagaugauuugggauccuaacggguggaccggaaccgacaacaauuuuucuaucaaacaagacaucgugggcauuaacgaauggagcggguacuccggcagcuucguccagcaucccgagcuuacaggacuggauuguauccgcccuugcuucuggguggaacucauuagaggccggcccaaggagaauacgaucuggacccgcgggucuuccauuagcuuuuguggaguuaacucugacacagugggcugguccuggcccgauggggcugagcugccuuucaccaucgacaaauga

SEQ ID NO: 215878 - RNA, 1410 nt, Artificial Sequence
  derived and/or modified CDS sequence (opt5) from neuraminidase__InfluenzaA__AGT18733
augaaccccaaucagaagaucauuaccaucggcagcgugugcaugacaauugggauggccaaccugauccuccaaauuggaaauaucaucuccauuuggaucucucacagcauucagcugggcaaccagucccagaucgagacguguaaucaaucugucauuaccuacgaaaacaauacauggguuaaccagaccuaugugaauaucagcaacacaaauuucgcugccgggcaguccguggucucugugaaacuugcgggaaacagcucccugugcccuguuagcggcugggcuauuuacucuaaggacaauuccgugagaaucgggagcaaaggagaugucuuugugauccgggagccguucauuucuuguagcccccucgaaugccgcaccuuuuuccugacacagggcgcccuucugaacgacaagcauuccaauggcaccaucaaagauagaucuccuuaucggacgcucauguccugucccauuggggagguuccuagccccuacaacucccgcuuugaaucuguggccuggagcgcuuccgccugccacgacggaaucaacuggcugaccauuggcaucagcgggccugauucuggagcugucgccgugcugaaguauaauggcaucauuacagacaccaucaaguccuggagaaacaauauucuccggacacaagagagcgagugugcgugcgugaacgggucuuguuucaccaucaugacggauggaccgagcgacggccaggccuccuacaaaauuuuucgcaucgaaaagggcaaaaucgucaagucuguugagaugaaugcucccaacuaucauuacgaagagugcagcuguuacccugauuccagcgagucuacaugcgugugcagagacaauuggcacggguccaaccggcccugggugagcuucaaucagaaccuggaauaucagauuggauacaucuguucuggcauuuuuggggauaauccucgccccaacgacaaaaccggauccugcggcccggucagcuccaauggggccaacggagugaagggcuucucuuuuaaguauggcaaugggguuuggaucggaagaacaaaaagcauuuccucucggaagggcuucgagaugaucugggauccuaacggguggaccggaaccgacaacaauuuuagcauuaaacaagacaucgugggcaucaacgaaugguccggguacagcggcucuuucguccagcaucccgagcuuacaggacuggauuguauucgcccuugcuucuggguggaacucaucagaggccggcccaaggagaauacgauuuggaccuccgggagcucucgcuccuuuuguggaguuaacagcgacacagugggcuggucuuggcccgauggggcugagcugccuuucaccaucgacaaauga

SEQ ID NO: 215879 - RNA, 1410 nt, Artificial Sequence
  derived and/or modified CDS sequence (opt5) from neuraminidase__InfluenzaA__AGT18762
augaaccccaaucagaagaucauuaccaucggcagcgugucccugacaauuucuacgaucugcuucuuuaugcaaauugccauccucaucaccacagucacccugcacuucaaacaguacgaguuuaacagcccuccgaauaaccagguuacacuuugugaacccauuaucauugagagaaauaucaccgaaauuguguaucugacaaacaccacgaucgagaaggaaauuugcccuaaacccgcugaguaccggaauugguccaagccucagugugggaucaccggauucgcccccuuuucuaaagacaacagcauccgccucuccgcgggcggggauauuugggugacaagagagccuuaugucucuugcgacccggauaaguguuaccaauucgcucugggacagggcaccacacuuaauaacgugcauagcaauaacaccguucgggaccgcacgcccuauagaacacugcucaugaaugaacugggggugccuuuucaccugggaaccaagcaggucugcaucgccugguccucuagcuccugucaugauggcaaagccuggcuccacgugugcauuacaggcgacgauaagaacgcuaccgccagcuucaucuacaaugggcggcugguugacucuguggucuccuggagcaaagagauucuucgcacccaggaaucugagugugugugcaucaacggaacauguacgguggucaugaccgauggcuccgcuagcgggaaggccgacacaaaaauccuguuuauugaggaaggaaagaucguucauaccuccacacucucuggcagcgcgcaacacguggaggaaugcuccugcuaucccagauacccuggggugcggugugucugccgcgauaacuggaagggaagcaauagacccauuguggacaucaacauuaaagaucacucuaucguuuccagcuacguguguucuggccuggucggcgacaccccgcggaagaaugacagcuccucuagcucccauugccuugauccuaacaaugaggaagggggacacggcgugaaagggugggccuucgacgauggaaacgacguuuggaugggccgcacgaucaaugagacaagcagacugggguaugagaccuuuaaggugauugaaggauggucuaaccccaaauccaagcuccagaucaaucggcaggucauuguggaucgcggcgacagaagcggcuacucugggaucuucuccgucgagggaaaaagcuguauuaaccggugcuuuuauguggaacugaucagaggccgcaaggaggaaaccgagguucuguggacauccaauucuauuguggucuucugugggaccagcggaacauacggcacgggguccuggccugauggcgcugaccucaaccugaugcccaucuga

SEQ ID NO: 215880 - RNA, 1410 nt, Artificial Sequence
  derived and/or modified CDS sequence (opt5) from neuraminidase__InfluenzaA__AGT18764
augaaccccaaucagaugaucauuaccaucggcagcgugucccugacaucuagcacgauuugcuucuuuaugcaaaccgccuccuucaucacaaccgucacacuccacauuaagcagcaugaguuucacucuccuccgaacaaucagguuaugcugugugaacccaccaucaucgagagaaacauuacagaaaucguguaccuuaccaauacgaccauugagaaagaaaucugcccuaagcuggcugaguaucggaacuggagcaaaccccagugugacauuacaggguucgccccuuuuuccaaggauaauucuauccgccucagcgcgggaggcgacauuugggugaccagagagcccuacgucuccugcgauccugacaaauguuaucaauucgcucuggggcagggaacaacccuuaacaaugugcauagcaacaauacgguucgggaucgcacaccguacagaacccugcucaugaacgaacugggcgugcccuuucaccuggggacaaagcaggucugcaucgccuggucuuccagcucuugucaugacggaaaggccuggcuccacgugugcaucaccggcgaugacaaaaaugcuaccgccuccuucauuuauaacggcaagcugguugauagcguggucucuugguccaaagagauccuucggacacaggaaagcgagugugugugcauuaaugggacguguaccguggucaugacagacggauccgcuucuggcaaggccgauaccaaaauccuguuuauugaggaagggaagaucguucacacaagcacccucuccggaagcgcgcaacauguggaggaaugcucuugcuacccucgcuaucccggcgugagaugugucugccgggacaacuggaagggguccaaccgcccuaucguggauauuaauaugaaagaccacagcaucguuucuagcuacguguguuccggacuggucggcgacacgcccagaaagaacgaucggucuagcaauucccauugccuugacccgaacaaugaggaaggcgggcacggagugaaaggcugggccuucgaugacgggaacgauguuuggaugggacgcacaauuaaugagaccagcagacugggcuacgagaccuuuaaggugaucgaaggguggucuaacccuaaauccaagcuccagauuaaucggcaggucaucguggaccgcggaaacagaagcggcuauucuggcaucuucuccgucgaggggaaaagcuguauuaaucggugcuuuuacguggaacugaucagaggacgcaaggaggaaacagagguucuguggaccuccaacucuauuguggucuucuguggcacaagcgggacguauggaaccggcuccuggcccgauggggcugaccucaaucugaugccuaucuga

SEQ ID NO: 215881 - RNA, 1410 nt, Artificial Sequence
  derived and/or modified CDS sequence (opt5) from neuraminidase__InfluenzaA__AGT18765
augaaccccaaucagaagaucauuaccaucggcagcgugucccugacaauuucuacgaucugcuucuuuaugcaaauugccauccucaucaccacagucacccugcacuucaaacagcaugaguuucacagcccuccgaacaaucagguuaugcuuugugaacccacaauuaucgagagaaacauuaccgaaaucguguaccugacaaauaccacgauugagaaggaaaucugcccuaaacucgcugaguaucggaacugguccaagccccagugugacauuaccggguucgccccuuuuucuaaagauaauagcauccgccuguccgcgggaggcgacaucugggugacaagagagcccuacgucucuugcgauccugacaaguguuaucaauucgcucuugggcagggaaccacacugaacaaugugcauagcaacaauaccguucgggaucgcacgccguacagaacacuccugaugaacgaacugggcgugcccuuucaccucgggaccaagcaggucugcauugccugguccucuagcuccugucaugacggaaaagccuggcugcacgugugcaucacaggcgaugacaagaaugcuaccgccagcuucauuuauaacggccggcuuguugauucuguggucuccuggagcaaagagauccugcgcacccaggaaucugagugugugugcauuaaugggacauguacgguggucaugaccgacggauccgcuagcggcaaggccgauacaaaaauccucuuuaucgaggaagggaagauuguucacaccuccacacugucuggaagcgcgcaacauguggaggaaugcuccugcuacccuagauaucccggcgugcggugugucugccgcgacaacuggaaggggagcaacagaccuaucguggauauuaauaugaaagaccacucuaucguuuccagcuacguguguucuggacuugucggcgacacgccccggaagaacgaucgcagcuccaauucucauugccuggacccgaacaaugaggaaggcgggcacggagugaaaggcugggccuucgaugacgggaacgauguuuggaugggaagaaccauuaaugagacaagccggcucggcuacgagaccuuuaaggugaucgaagggugguccaacccuaaaagcaagcugcagaucaaucgccaggucauuguggacagaggaaaccggucuggcuauuccggcaucuucagcgucgaggggaaaucuuguauuaauagaugcuuuuacguggaacugauccgcggacggaaggaggaaaccgagguucucuggacauccaacagcauuguggucuucuguggcaccuccgggacauauggaacgggcucuuggcccgauggggcugaccugaaucuuaugccuaucuga

SEQ ID NO: 215882 - RNA, 1410 nt, Artificial Sequence
  derived and/or modified CDS sequence (opt5) from neuraminidase__InfluenzaA__AGT18766
augaaccccaaucagaagaucauuaccaucggcagcgugucccugacaauuucuacgaucugccucuucaugcaaauugccauccugaucaccacagucacccuucacuuuaaacagcaugaguuccacagcccuccgaacaaucagguuaugcugugugaacccacaauuaucgagagaaacauuaccgaaaucguguaccucacaaauaccacgauugagaaggaaaucugcccuaaacuggcugaguaucggaacugguccaagccccagugugacauuaccggguuugccccuuucucuaaagauaauagcauccgccuuuccgcgggaggcgacaucugggugacaagagagcccuacgucucuugcgauccugacaaguguuaucaauuugcucuggggcagggaaccacacucaacaaugugcauagcaacaauaccguucgggaucgcacgccguacagaacacugcugaugaacgaacucggcgugcccuuccaccuggggaccaagcaggucugcauugccugguccucuagcuccugucaugacggaaaagccuggcuucacgugugcaucacaggcgaugacaagaaugcuaccgccagcuuuauuuauaacggccggcugguugauucuguggucuccuggagcaaagagauccuccgcacccaggaaucugagugugugugcauuaaugggacauguacgguggucaugaccgacggauccgcuagcggcaaggccgauacaaaaauccuguucaucgaggaagggaagauuguucacaccuccacacuuucuggaagcgcgcaacauguggaggaaugcuccugcuacccuagauaucccggcgugcggugugucugccgcgacaacuggaaggggagcaacagaccuaucguggauauuaauaugaaagaccacucuaucguuuccagcuacguguguucuggacuggucggcgacacgccccggaagaacgaucgcagcuccaauucucauugccucgacccgaacaaugaggaaggcgggcacggagugaaaggcugggccuuugaugacgggaacgauguuuggaugggaagaaccauuaaugagacaagccggcugggcuacgagaccuucaaggugaucgaagggugguccaacccuaaaagcaagcugcagaucaaucgccaggucauuguggacagaggaaaccggucuggcuauuccggcaucuuuagcgucgaggggaaaucuuguauuaauagaugcuucuacguggaacucauccgcggacggaaggaggaaaccgagguucuguggacauccaacagcauuguggucuuuuguggcaccuccgggacauauggaacgggcucuuggcccgauggggcugaccuuaaucugaagccuaucuga

SEQ ID NO: 215883 - RNA, 1410 nt, Artificial Sequence
  derived and/or modified CDS sequence (opt5) from neuraminidase__InfluenzaA__AGT18767
augaaccccaaucagaagaucauuaccaucggcagcgugucccugacaauuucuacgaucugcuucuuuaugcaaaccgccagccucauuacaaccgucacacugcacuucaaacagcaugaguuucacuccccuccgaacaaucagguuaugcuuugugaacccaccaucaucgagagaaacauuacagaaaucguguaccugaccaauacgaccauugagaaggaaaucugcccuaaacucgcugaguaucggaacuggucuaagccccagugugacauuacaggguucgccccuuuuagcaaagauaauuccauccgccugucugcgggaggcgacauuugggugaccagagagcccuacgucagcugcgauccugacaaguguuaucaauucgcucuugggcagggaacaacccugaacaaugugcauuccaacaauacgguucgggaucgcacaccguacagaacccuccugaugaacgaacugggcgugcccuuucaccucgggacaaagcaggucugcaucgccuggucuagcuccagcugucaugacggaaaagccuggcugcacgugugcaucaccggcgaugacaagaaugcuaccgccucuuucauuuauaacggccggcuuguugauuccguggucagcuggucuaaagagauccugcgcacacaggaauccgagugugugugcauuaaugggacguguaccguggucaugacagacggaagcgcuuccggcaaggccgauaccaaaauccucuuuauugaggaagggaagaucguucacacaucuacccugagcggauccgcgcaacauguggaggaaugcagcugcuacccuagauaucccggcgugcggugugucugccgcgacaacuggaaggggucuaacagaccuaucguggauauuaauaugaaagaccacuccaucguuagcucuuacguguguagcggacuugucggcgacacgccccggaagaacgaucgcuccucuaauagccauugccuggacccgaacaaugaggaaggcgggcacggagugaaaggcugggccuucgaugacgggaacgauguuuggaugggaagaacaauuaaugagaccucccggcucggcuacgagaccuuuaaggugaucgaaggguggagcaacccuaaaucuaagcugcagauuaaucgccaggucaucguggacagaggaaaccgguccggcuauagcggcaucuucucugucgaggggaaauccuguauuaauagaugcuuuuacguggaacugauccgcggacggaaggaggaaacagagguucucuggaccagcaacuccauuguggucuucuguggcacaucugggacguauggaaccggcagcuggcccgauggggcugaccugaaucuuaugccuaucuga

SEQ ID NO: 215884 - RNA, 1410 nt, Artificial Sequence
  derived and/or modified CDS sequence (opt5) from neuraminidase__InfluenzaA__AGT18768
augaaccccaaucagaagaucauuaccaucggcagcgugucccugacaauuucuacgaucugcuucuuuaugcaaaccgccagcuucauuacaaccgucacacuccacuuuaaacaguacgaguucaacuccccuccgaauaaccagguuaugcugugugaacccaccaucaucgagagaaauauuacagaaaucguguaucuuaccaacacgaccauugagaaggaaaucugcccuaaacuggcugaguaccggaauuggucuaagccccagugugacauuacaggguuugccccuuucagcaaagauaacuccauccgccucucugcgggaggcgacauuugggugaccagagagcccuaugucagcugcgauccugacaaguguuaccaauuugcucuggggcagggaacaacccuuaauaacgugcauuccaauaacacgguucgggaucgcacaccguauagaacccugcucaugaaugaacugggcgugcccuuccaccuggggacaaagcaggucugcaucgccuggucuagcuccagcugucaugacggaaaagccuggcuccacgugugcaucaccggcgaugacaagaacgcuaccgccucuuuuauuuacaauggccggcugguugauuccguggucagcuggucuaaagagauccuucgcacacaggaauccgagugugugugcauuaacgggacguguaccguggucaugacagacggaagcgcuuccggcaaggccgauaccaaaauccuguucauugaggaagggaagaucguucauacaucuacccucagcggauccgcgcaacacguggaggaaugcagcugcuauccuagauaccccggcgugcggugugucugccgcgacaacuggaaggggucuaauagaccuaucguggauauuaacaugaaagaccacuccaucguuagcucuuacguguguagcggacuggucggcgacacgccccggaagaaugaucgcuccucuaacagccauugccuugacccgaauaacgaggaaggcgggcacggagugaaaggcugggccuuugaugacgggaaugauguuuggaugggaagaacaauuaacgagaccucccggcugggcuaugagaccuucaaggugaucgaaggguggagcaauccuaaaucuaagcuccagauuaaccgccaggucaucguggacagaggaaaucgguccggcuacagcggcaucuuuucugucgaggggaaauccuguauuaacagaugcuucuauguggaacugauccgcggacggaaggaggaaacagagguucuguggaccagcaauuccauuguggucuucuguggcacaucugggacguacggaaccggcagcuggcccgauggggcugaccucaaccugaugccuaucuga

SEQ ID NO: 215885 - RNA, 1410 nt, Artificial Sequence; identical to SEQ ID NO: 214218
  derived and/or modified CDS sequence (opt5) from neuraminidase__InfluenzaA__AGT18769

SEQ ID NO: 215886 - RNA, 1410 nt, Artificial Sequence
  derived and/or modified CDS sequence (opt5) from neuraminidase__InfluenzaA__AGT18770
augaaccccaaucagaagaucauuaccaucggcagcgugucccugacaauuucuacgaucugcuucuuuaugcaaauugccauccucaucaccacagucacccugcacuucaaacaguacgaguuuaacagcccuccgaauaacaagguuaugcuuugugaacccacaauuaucgagagaaauauuaccgaaaucguguaucugacaaacaccacgauugagaaagaaaucugcccuaagcccgcugaguaccggaauugguccaaaccucagugugggauuaccggauucgcccccuuuucuaaggacaacagcauccgccucuccgcgggcggggauaucugggugacaagagagccuuaugucucuugcgacccggauaaguguuaccaguucgcucugggacaaggcaccacacuuaauaacgugcauagcaauaacaccguucgggaccgcacgcccuauagaacacugcucaugaaugaacugggggugccuuuucaccugggaaccaaacaggucugcauugccugguccucuagcuccugucaugauggcaaggccuggcuccacgugugcaucacaggcgacgauaaaaacgcuaccgccagcuucauuuacaaugggcggcugguugacucuguggucuccuggagcaaggagauccuucgcacccaggaaucugagugugugugcauuaacggaacauguacgguggucaugaccgauggcuccgcuagcgggaaagccgacacaaagauccuguuuaucgaggaaggaaagauuguucauaccuccacacucucuggcagcgcgcagcacguggaggaaugcuccugcuaucccagauacccuggggugcggugugucugccgcgauaacuggaaaggaagcaauagacccaucguggacauuaacaucaaggaucacucuauuguuuccagcuacguguguucuggccuggucggcgacaccccgcggaaaaaugacagcuccucuagcucccauugccuugauccuaacaaugaggaagggggacacggcgugaaggggugggccuucgacgauggaaacgacguuuggaugggccgcacgaucaaugagacaagcagacugggguaugagaccuuuaaagugaucgaaggauggucuaaccccaaguccaaacuccaaauuaaucggcaggucaucguggaucgcggcgacagaagcggcuacucugggauuuucuccgucgagggaaagagcuguaucaaccggugcuuuuauguggaacugauuagaggccgcaaggaggaaaccgagguucuguggacauccaauucuaucguggucuucugugggaccagcggaacauacggcacgggguccuggccugauggcgcugaccucaaccugaugcccauuuga

SEQ ID NO: 215887 - RNA, 1410 nt, Artificial Sequence
  derived and/or modified CDS sequence (opt5) from neuraminidase__InfluenzaA__AGT18771
augaaccccaaucagaagaucauuaccaucggcagcgugucccugacaauuucuacgaucugcuucuuuaugcaaauugccauccucaucaccacagucacccugcacuucaaacaguacaaguuuaacagcccuccgaauaaccagguuaugcuuugugagcccacaauuaucgaaagaaauauuaccgagaucguguaucugacaaacaccacgauugaaaaagagaucugcccuaagcccgcugaauaccggaauugguccaaaccucagugugggauuaccggauucgcccccuuuucuaaggacaacagcauccgccucuccgcgggcggggauaucugggugacaagagagccuuaugucucuugcgacccggauaaguguuaccaauucgcucugggacagggcaccacacuuaauaacgugcauagcaauaacaccguucgggaccgcacgcccuauagaacacugcucaugaaugagcugggggugccuuuucaccugggaaccaaacaggucugcauugccugguccucuagcuccugucaugauggcaaggccuggcuccacgugugcaucacaggcgacgauaaaaacgcuaccgccagcuucauuuacaaugggcggcugguugacucuguggucuccuggagcaaggaaauccuucgcacccaggagucugaaugugugugcauuaacggaacauguacgguggucaugaccgauggcuccgcuagcgggaaagccgacacaaagauccuguuuaucgaggagggaaagauuguucauaccuccacacucucuggcagcgcgcaacacguggaagagugcuccugcuaucccagauacccuggggugcggugugucugccgcgauaacuggaaaggaagcaauagacccaucguggacauuaacaucaaggaucacucuauuguuuccagcuacguguguucuggccuggucggcgacaccccgcggaaaaaugacagcuccucuagcucccauugccuugauccuaacaaugaagaagggggacacggcgugaaggggugggccuucgacgauggaaacgacguuuggaugggccgcacgaucaaugagacaagcagacugggguaugagaccuuuaaagugaucgagggauggucuaaccccaaguccaaacuccagauuaaucggcaggucaucguggaucgcggcgacagaagcggcuacucugggauuuucuccgucgaaggaaagagcuguaucaaccggugcuuuuauguggagcugauuagaggccgcaaggaagagaccgaaguucuguggacauccaauucuaucguggucuucugugggaccagcggaacauacggcacgggguccuggccugauggcgcugaccucaaccugaugcccauuuga

SEQ ID NO: 215888 - RNA, 1410 nt, Artificial Sequence; identical to SEQ ID NO: 214218
  derived and/or modified CDS sequence (opt5) from neuraminidase__InfluenzaA__AGT18772

SEQ ID NO: 215889 - RNA, 1410 nt, Artificial Sequence
  derived and/or modified CDS sequence (opt5) from neuraminidase__InfluenzaA__AGT37104
augaaccccaaucagaagaucauuaccaucggcagcgugucccugacaauugccacgaucugccuccugaugcaaauugcuauccuugucaccacaguuacccugcacuucaaacaguacgaguguucuagcccuccgaacaaucaggugaugcccugcgaaccuacaaucauugagagaaacaucaccaagauuguguaucucacaaauaccacgaucgaacgggaggccugucccgaacuggcggaguaccgccauugguccaaaccucagugcaagauuagaggguuugcucccuucucuaaagacaacagcauccggcuuuccgccggaggcgauauuugggucacccgcgagccuuaugugucuugugacccggggaagugcuaccaauuugcccugggacagggcacaacccucaauaacagacacagcaaugauacaguucaugaccggacccccuaucgcacgcugcugaugaacgaacucggggugccuuuccaccugggaacaaagcaggucuguaucgcuugguccuccucuuccugccaugauggcaaagccuggcuucacguguguaucaccggccacgacaagaaugcuacagccagcuuuauuuacgaugggagacugguugacucuaucggauccuggagccagaacauucuccggacccaagagucugaaugcguguguaucaaugggaccugcacagucgugaugacggauggcuccgcgagcggacgcgccgacaccaaaauuauguucguggaggagggcaagaucguccauaucagcccccuggcugggucugcccagcacguugaagagugcagcuguuauccuaaauaccccggagugagaugcgugugucgggauaacuggaagggcuccaaucgcccgauugucgacaucaacaugaaggauuacagcauugugucuuccuauguuugcagcggccuugugggggacacaccuagacggaacgacucuagcuccaccucuuacugucugaaucccaacaaugaagagggaggccauggggucaaaggaugggcuuuugaugacggcgaugacguguggauggggcgcacaaucagcgaaaagcucagacugggauaugagaccuucaaaguuauuggcggcugguccaagccuaacagcaaacugcagaucaauagacagguggucguggauaucucuaaccgguccggguacagcggaaucuuuucugucgagggcaaguccugcauuaaucgcuguuucuauguggaacucauucgggggagaaaacaagagaacgaaguuugguggacgagcaauuccaucguggucuuuugcggaacaucuggcaccuacgggaccggcagcuggcccgacggagccgauauuaaccugaugcccaucuga

SEQ ID NO: 215890 - RNA, 1410 nt, Artificial Sequence
  derived and/or modified CDS sequence (opt5) from neuraminidase__InfluenzaA__AGU69973
augaaccccaaucagaagaucauuaccaucggcagcgugucccugacaauugccacgaucugcuuccucaugcaaauugcuauccuggucaccacaguuacccuucacuuuaaacaguacgaguguaacucuccuccgaauaaccaggugaugcugugcgaacccacaaucauugagagaaauaucaccgaaauuguguaucucacaaacaccacgaucgagaaggaaauuuguccuaaacuggccgaguaccggaauuggagcaagccccagugcaacaucaccggguucgcgccuuuuuccaaagacaauucuauucgccuuagcgcuggaggcgauaucugggucacaagagagcccuauguguccugugacccugauaagugcuaccaauucgcccuggggcagggaaccacacucaacaauggccauucuaacgacaccguucacgaucggacgccguaucgcacacugcugaugaaugaacucggggugcccuuucaucugggaaccaagcaggucuguaucgccuggagcuccagcucuugccacgacggcaaggcuuggcuucauguguguguuacaggcgaugacgagaacgccaccgcuuccuucauuuacaaugggagacugguggauagcaucggaucuugguccaagaaaauucuccggacccaggaaagcgagugcgucuguaucaacggcacaugcacgguggugaugaccgacgggucugccuccggaaaggcggauacaaaaauucuguuuaucgaggaaggcaagaucguccacaccagcccucuuuccgggucugcccaacacguugaggaaugcagcuguuauccccgcuacccuggagugagaugcgugugucgggacaacuggaagggcuccaaucgccccauugucgauaucaacgugaaagacuacagcauuguuucuuccuaugugagaagcggccuggucggggacacaccgcggaagaaugauucuagcuccucuagccauugccucgacccuaacaaugaggaaggaggccacggggugaaaggaugggcuuucgaugacggcaacgauguuuggauggggcgcaccaucuccgagaaaagcagaucuggauacgagacguuuaaagugauugaaggcugguccaagcccaauagcaaacugcagaucaaccggcaggucaucguggaccgcggcaauagaucuggguauuccggaauuuucagcgucgagggcaaguccuguaucaaccggugcuuuuacguggaacugauuagagggggaaagcaggagacagaaguucucuggaccucuaauagcaucguggucuucuguggcaccuccgggacauauggcaccggaucuuggccugauggcgccgaccugaaccuuaugcccauuuga

SEQ ID NO: 215891 - RNA, 1410 nt, Artificial Sequence
  derived and/or modified CDS sequence (opt5) from neuraminidase__InfluenzaA__AGU92648
augaaccccaaucagaagaucauuaccaucggcagcgugugcaugacaauugggauggccaaccugauccuccaaauuggaaauaucaucuccauuuggaucucucacagcauucagcugagaaaccagucccagaucgagacguguaaucaaucugucauuaccuacgaaaacaauacauggguuaaccagaccuaugugaauaucagcaacacaaauuucgcugccggccaguccguggucucugugaaacuugcggggaacagcucccugugcccuguuagcggaugggcuauuuacucuaaggacaauuccauccggaucggcagcaaaggggauguguuugucauucgcgagccguucaucucuuguucuccccucgaaugcagaaccuuuuuccugacacagggagcccuucugaacgacaagcauagcaauggcaccauuaaagaucggucuccuuaucgcacgcucauguccugucccaucggcgaggugccuagccccuacaacuccagauuugaaucuguugccuggagcgcuuccgccugccacgacgggauuaacuggcugaccaucggaaucagcggcccugauaauggggcuguggccguccugaaguauaacggaauuaucacagacaccauuaagucuuggcggaauaacauccuccgcacacaagaguccgagugugcgugcgugaauggcagcuguuucaccauuaugacggaugggccgucugacggacaggccagcuacaaaaucuuuagaaucgaaaagggcaaaauugugaaguccgucgagaugaacgcucccaauuaucauuacgaagagugcucuuguuacccugauagcuccgagaucauuugcguuugccgggacaacuggcacggcagcaaucgccccugggugucuuucaaccagaaucuggaauaucagaucggguacauuuguuccggaaucuuuggcgauaacccuagacccaaugacaaaacagggagcugcggaccggugucuuccaacggcgccaauggggucaagggauucagcuuuaaguauggcaacggcguguggauugggcggaccaaauccaucucuagccgcaagggauucgagaugaucugggauccuaacggcuggacagggaccgacaauaacuuuuccauuaaacaagacaucguuggaauuaaugaauggucuggcuacagcggguccuucgugcagcaucccgagcuuaccggccuggauuguaucagaccuugcuucugggucgaacucauucggggacgccccaaggagaacacaaucuggacgagcggcuccuccaucagcuuuugugggguuaauucugacaccgugggaugguccuggcccgauggcgcugagcugccuuucacaauugacaaauga

SEQ ID NO: 215892 - RNA, 1410 nt, Artificial Sequence
  derived and/or modified CDS sequence (opt5) from neuraminidase__InfluenzaA__AGU92670
augaaccccaaucagaagaucauuaccaucggcagcgugugcaugacaauugggauggccaaccugauccuccaaauuggaaauaucaucuccauuuggaucucucacagcauucagcugagaaaccagucccagaucgagacguguaaucaaucugucauuaccuacgaaaacaauacauggguuaaccagaccuaugugaauaucagcaacacaaauuucgcugccggccaguccguggucucugugaaacuugcggggaacagcucccugugcccuguuagcggaugggcuauuuacucuaaggacaauuccauccggaucggcagcaaaggggauguguuugucauucgcgagccguucaucucuuguucuccccucgaaugcagaaccuuuuuccugacacagggagcccuucugaacgacaagcauagcaauggcaccauuaaagaucggucuccuuaucgcacgcucauguccugucccaucggcgaggugccuagccccuacaacuccagauuugaaucuguugccuggagcgcuuccgccugccacgacgggauuaacuggcugaccaucggaaucagcggcccugauaauggggcuguggccguccugaaguauaacggaauuaucacagacaccauuaagucuuggcggaauaacauccuccgcacacaagaguccgagugugcgugcgugaauggcagcuguuucaccauuaugacggaugggccgucugacggacaggccagcuacaaaaucuuuagaaucgaaaagggcaaaauugugaaguccgucgagaugaacgcucccaauuaucauuacgaagagugcucuuguuacccugauagcuccgagaucauuugcguuugccgggacaacuggcacggcagcaaucgccccugggugucuuucaaccagaaucuggaauaucagaucggguacauuuguuccggaaucuuuggcgauaacccuagacccgacgauaaaacagggagcugcggaccggugucuuccaauggcgccaacggggucaagggauucagcuuuaaguauggcaauggcguguggauugggcggaccaaauccaucucuagccgcaagggauucgagaugaucugggacccuaacggcuggacagggaccgacaacaauuuuuccauuaaacaagauaucguuggaauuaacgaauggucuggcuacagcggguccuucgugcagcaucccgagcuuaccggccuggacuguaucagaccuugcuucugggucgaacucauucggggacgccccaaggagaauacaaucuggacgagcggcuccuccaucagcuuuuguggggugaacucugauaccguuggaugguccuggcccgacggcgcugagcugccuuucacaauugauaaauga

SEQ ID NO: 215893 - RNA, 1410 nt, Artificial Sequence
  derived and/or modified CDS sequence (opt5) from neuraminidase__InfluenzaA__AGU92681
augaaccccaaucagaagaucauuaccaucggcagcgugugcaugacaauugggauggccaaccugauccuccaaauuggaaauaucaucuccauuuggaucucucacagcauucagcugagaaaccagucccagaucgagacguguaaucaaucugucauuaccuacgaaaacaauacauggguuaaccagaccuaugugaauaucagcaacacaaauuucgcugccggccaguccguggucucugugaaacuugcggggaacagcucccugugcccuguuagcggaugggcuaccuacucuaaggacaauuccauucggaucggcagcaaaggggauguguuugucauccgcgagccguucauuucuuguucuccccucgaaugcagaacauuuuuccugacccagggagcccuucugaacgacaagcauagcaauggcacgaucaaagaucggucuccuuaucgcacccucauguccugucccauuggcgaggugccuagccccuacaacuccagauuugaaucuguugccuggagcgcuuccgccugccacgacgggaucaacuggcugacaauuggaaucagcggcccugauaauggggcuguggccguccugaaguauaacggaaucauuaccgacacaaucaagucuuggcggaauaacauucuccgcacccaagaguccgagugugcgugcgugaauggcagcuguuucacgaucaugacagaugggccgucugacggacaggccagcuacaaaauuuuuagaaucgaaaagggcaaaaucgugaaguccgucgagaugaacgcucccaauuaucauuacgaagagugcucuuguuacccugauagcuccgagauuaucugcguuugccgggacaacuggcacggcagcaaucgccccugggugucuuucaaccagaaucuggaauaucagauuggguacaucuguuccggaauuuuuggcgauaacccuagacccaaugacaaaaccgggagcugcggaccggugucuuccaacggcgccaauggggucaagggauucagcuuuaaguauggcaacggcguguggaucgggcggacaaaauccauuucuagccgcaagggauucgagaugaucugggauccuaacggcuggaccgggaccgacaauaacuuuuccaucaaacaagacauuguuggaaucaaugaauggucuggcuacagcggguccuucgugcagcaucccgagcuuacaggccuggauuguauuagaccuugcuucugggucgaacucauccggggacgccccaaggagaacacgauuuggaccagcggcuccuccaucagcuuuugugggguuaauucugacacagugggaugguccuggcccgauggcgcugagcugccuuucaccaucgacaaauga

SEQ ID NO: 215894 - RNA, 1410 nt, Artificial Sequence
  derived and/or modified CDS sequence (opt5) from neuraminidase__InfluenzaA__AGU92692
augaaccccaaucagaagaucauuaccaucggcagcgugugcaugacaauugggauggccaaccugauccuccaaauuggaaauaucaucuccauuuggaucucucacagcauucagcugggcaaccagaaucagaucgagacguguaaccaauccgucauuaccuacgaaaauaacacauggguuaaucagaccuaugugaacaucucuaauacaaacuucgcugccgggcagagcguggucuccgugaaacuugcgggaaauucuagccugugcccuguuuccggcugggcuauuuacagcaaggacaacucugugagagucggguccaaaggagauguguuuguuauccgggagccguucaucagcuguucuccccucgaaugccgcaccuuuuuccugacacagggcgcccuucugaaugacaagcauuccaacggcaccauuaaagauagaagcccuuaucggacgcucaugucuugucccaucggggaggugccuucccccuacaacagccgcuuugaauccgucgccuggucugcuagcgccugccacgacggaauuaauuggcugaccaucggcauuuccgggccugauaacggagcuguggccgugcugaaguauaauggcaucaucacagacaccauuaagagcuggagaaacaauauccuccggacacaagagucugagugugcgugcgucaacggguccuguuucaccguuaugacggauggaccgagcaauggccaggccucuuacaaaauuuuucgcaucgaaaagggcaaaauugucaagagcguggagaugaacgcucccaauuaucauuacgaagagugcuccuguuacccugacucuagcgagaucacaugcgugugcagagauaacuggcacggguccaaucggcccugggugagcuucaaccagaaucuggaauaucagaucggauacauuuguucuggcaucuuuggggacaacccucgccccaaugauaaaaccggauccugcggcccgguuagcucuaacggggccaacggagugaagggcuucuccuuuaaguauggcaauggggucuggauuggaagaacaaaaagcaucuccucucggaacggcuucgagaugauuugggacccuaauggguggaccggaaccgauaacaauuuuagcaucaagcaagacauugugggcaucaacgaaugguccggguacucuggcagcuucauccagcaucccgagcuuacaggacuggacuguauucgcccuugcuucuggguugaacucaucagaggccggcccaaagagaauacgauuuggaccuccgggagcucuaucuccuuuuguggagugaacagcgauacagucggcuggucuuggcccgacggggcugagcugccuuucaccauugauaaguga

SEQ ID NO: 215895 - RNA, 1410 nt, Artificial Sequence; identical to SEQ ID NO: 215894
  derived and/or modified CDS sequence (opt5) from neuraminidase__InfluenzaA__AGU92703

SEQ ID NO: 215896 - RNA, 1410 nt, Artificial Sequence; identical to SEQ ID NO: 215894
  derived and/or modified CDS sequence (opt5) from neuraminidase__InfluenzaA__AGU92714

SEQ ID NO: 215897 - RNA, 1410 nt, Artificial Sequence; identical to SEQ ID NO: 215894
  derived and/or modified CDS sequence (opt5) from neuraminidase__InfluenzaA__AGU92725

SEQ ID NO: 215898 - RNA, 1410 nt, Artificial Sequence; identical to SEQ ID NO: 215894
  derived and/or modified CDS sequence (opt5) from neuraminidase__InfluenzaA__AGU92736

SEQ ID NO: 215899 - RNA, 1410 nt, Artificial Sequence; identical to SEQ ID NO: 215894
  derived and/or modified CDS sequence (opt5) from neuraminidase__InfluenzaA__AGU92747

SEQ ID NO: 215900 - RNA, 1410 nt, Artificial Sequence; identical to SEQ ID NO: 215894
  derived and/or modified CDS sequence (opt5) from neuraminidase__InfluenzaA__AGU92758

SEQ ID NO: 215901 - RNA, 1410 nt, Artificial Sequence; identical to SEQ ID NO: 215891
  derived and/or modified CDS sequence (opt5) from neuraminidase__InfluenzaA__AGU92769

SEQ ID NO: 215902 - RNA, 1410 nt, Artificial Sequence; identical to SEQ ID NO: 215891
  derived and/or modified CDS sequence (opt5) from neuraminidase__InfluenzaA__AGU92780

SEQ ID NO: 215903 - RNA, 1410 nt, Artificial Sequence
  derived and/or modified CDS sequence (opt5) from neuraminidase__InfluenzaA__AGU92791
augaaccccaaucagaagaucauuaccaucggcagcgugugcaugacaauugggauggccaaccugauccuccaaauuggaaauaucaucuccauuuggaucucucacagcauucagcugagaaaccagucccagaucgagacguguaaucaaucugucauuaccuacgaaaacaauacauggguuaaccagaccuaugugaauaucagcaacacaaauuucgcugccggccaguccguggucucugugaaacuugcggggaacagcucccugugcccuguuagcggaugggcuauuuacucuaaggacaauuccauccggaucggcagcaaaggggauguguuugucauucgcgagccguucaucucuuguucuccccucgaaugcagaaucuuuuuccugacccagggagcccuucugaacgacaagcauagcaauggcacaauuaaagaucggucuccuuaucgcacccucauguccugucccauuggcgaggugccuagccccuacaacuccagauuugaaucuguugccuggagcgcuuccgccugccacgacgggaucaacuggcugacgaucggaauuagcggcccugauaauggggcuguggccguccugaaguauaacggaaucauuaccgacacaaucaagucuuggcggaauaacauucuccgcacccaagaguccgagugugcgugcgugaauggcagcuguuucacaaucaugaccgaugggccgucugacggacaggccagcuacaaaaucuuuagaauugaaaagggcaaaaucgugaaguccgucgagaugaacgcucccaauuaucauuacgaagagugcucuuguuacccugauagcuccgagauuaucugcguuugccgggacaacuggcacggcagcaaucgccccugggugucuuucaaccagaaucuggaauaucagauuggguacaucuguuccggaauuuuuggcgauaacccuagacccaaugacaaaacggggagcugcggaccggugucuuccaacggcgccaauggggucaagggauucagcuuuaaguauggcaacggcguguggaucgggcggacaaaauccaucucuagccgcaagggauucgagaugauuugggauccuaacggcuggaccgggacagacaauaacuuuuccaucaaacaagacauuguuggaaucaaugaauggucuggcuacagcggguccuucgugcagcaucccgagcuuaccggccuggauuguauuagaccuugcuucugggucgaacucauccggggacgccccaaggagaacaccaucuggacaagcggcuccuccauuagcuuuugugggguuaauucugacacggugggaugguccuggcccgauggcgcugagcugccuuucaccaucgacaaauga

SEQ ID NO: 215904 - RNA, 1410 nt, Artificial Sequence; identical to SEQ ID NO: 215891
  derived and/or modified CDS sequence (opt5) from neuraminidase__InfluenzaA__AGU92802

SEQ ID NO: 215905 - RNA, 1410 nt, Artificial Sequence; identical to SEQ ID NO: 215891
  derived and/or modified CDS sequence (opt5) from neuraminidase__InfluenzaA__AGU92813

SEQ ID NO: 215906 - RNA, 1410 nt, Artificial Sequence; identical to SEQ ID NO: 215891
  derived and/or modified CDS sequence (opt5) from neuraminidase__InfluenzaA__AGU92824

SEQ ID NO: 215907 - RNA, 1410 nt, Artificial Sequence
  derived and/or modified CDS sequence (opt5) from neuraminidase__InfluenzaA__AGU92846
augaaccccaaucagaagaucauuaccaucggcagcgugugcaugacaauugggauggccaaccugauccuccaaauuggaaauaucaucuccauuuggaucucucacagcauucagcugggcaaccagaaucagaucgagacguguaaccaauccgucauuaccuacgaaaauaacacauggguuaaucagaccuaugugaacaucucuaauacaaacuucgcugccgggcagagcguggucuccgugaaacuugcgggaaauucuagccugugcccuguuuccggcugggcuauuuacagcaaggacaacucugugagagucggguccaaaggagauguguuuguuauccgggagccguucaucagcuguucuccccucgaaugccgcaccuuuuuccugacacagggcgcccuucugaaugacaagcauuccaacggcaccauuaaagauagaagcccuuaucggacgcucaugucuugucccaucggggaggugccuucccccuacaacagccgcuuugaauccgucgccuggucugcuagcgccugccacgacggaauuaauuggcugaccaucggcauuuccgggccugauaacggagcuguggccgugcugaaguauaauggcaucaucacagacaccauuaagagcuggagaaacaauauccuccggacacaagagucugagugugcgugcgucaacggguccuguuucaccguuaugacggauggaccgagcaauggccaggccucuuacaaaauuuuucgcaucgaaaagggcaaaauugucaagagcguggagaugaacgcucccaauuaucauuacgaagagugcuccuguuacccugacucuagcgagaucacaugcgugugcagagauaacuggcacggguccaaucggcccugggugagcuucaaccagaaucuggaauaucagaucggauacauuuguucuggcaucuuuggggacaacccucgccccaaugauaaaaccggauccugcggcccgguuagcucuaacggggccaacggagugaagggcuucgcuuuuaaguauggcaauggggucuggauuggaagaacaaaauccaucagcucccggaacggcuucgagaugauuugggacccuaauggguggaccggaaccgauaacaauuuuucuaucaagcaagacauugugggcaucaacgaauggagcggguacuccggcucuuucauccagcaucccgagcuuacaggacuggacuguauucgcccuugcuucuggguugaacucaucagaggccggcccaaagagaauacgauuuggaccagcggguccagcaucucuuuuuguggagugaacuccgauacagucggcuggagcuggcccgacggggccgagcugccuuucaccauugauaaguga

SEQ ID NO: 215908 - RNA, 1410 nt, Artificial Sequence
  derived and/or modified CDS sequence (opt5) from neuraminidase__InfluenzaA__AGU92868
augaaccccaaucagaagaucauuaccaucggcagcgugugcaugacaauugggauggccaaccugauccuccaaauuggaaauaucaucuccauuuggaucucucacagcauucagcugggcaaccagaaucagaucgagacguguaaccaauccgucauuaccuacgaaaauaacacauggguuaaucagaccuaugugaacaucucuaauacaaacuucgcugccgggcagagcguggucuccgugaaauuugcgggaaauucuagccuuugcccuguuuccggcugggcuauuuacagcaaggacaacucugugagagucggguccaaaggagauguguucguuauccgggagccguuuaucagcuguucuccccuggaaugccgcaccuucuuucucacacagggcgcccugcuuaaugacaagcauuccaacggcaccauuaaagauagaagcccuuaucggacgcugaugucuugucccaucggggaggugccuucccccuacaacagccgcuucgaauccgucgccuggucugcuagcgccugccacgacggaauuaauuggcucaccaucggcauuuccgggccugauaacggagcuguggccgugcugaaguauaauggcaucaucacagacaccauuaagagcuggagaaacaauauccugcggacacaagagucugagugugcgugcgucaacggguccuguuuuaccguuaugacggauggaccgagcaauggccaggccucuuacaaaauuuuccgcaucgaaaagggcaaaauugucaagagcguggagaugaacgcucccaauuaucauuacgaagagugcuccuguuacccugacucuagcgagaucacaugcgugugcagagauaacuggcacggguccaaucggcccugggugagcuuuaaccagaaucucgaauaucagaucggauacauuuguucuggcaucuucggggacaacccucgccccaaugauaaaaccggauccugcggcccgguuagcucuaacggggccaacggagugaagggcuuuuccuucaaguauggcaauggggucuggauuggaagaacaaaaagcaucuccucucggaacggcuuugagaugauuugggacccuaauggguggaccggaaccgauaacaauuucagcaucaagcaagacauugugggcaucaacgaaugguccggguacucuggcagcuucauccagcaucccgagcugacaggacuugacuguauucgcccuugcuuuuggguugaacugaucagaggccggcccaaagagaauacgauuuggaccuccgggagcucuaucuccuucuguggagugaacagcgauacagucggcuggucuuggcccgacggggcugagcucccuuuuaccauugauaaguga

SEQ ID NO: 215909 - RNA, 1410 nt, Artificial Sequence
  derived and/or modified CDS sequence (opt5) from neuraminidase__InfluenzaA__AGU92890
augaaccccaaucagaagaucauuaccaucggcagcgugugcaugacaauugggauggccaaccugauccuccaaauuggaaauaucaucuccauuuggaucucucacagcauucagcugggcaaccagaaucagaucgagacguguaaccaauccgucauuaccuacgaaaauaacacauggguuaaucagaccuaugugaacaucucuaauacaaacuucgcugccgggcagagcguggucuccgugaaacuugcgggaaauucuagccugugcccuguuuccggcugggcuauuuacagcaaggacaacucugugagagucggguccaaaggagauguguuuguuauccgggagccguucaucagcuguucuccccucgaaugccgcaccuuuuuccugacacagggcgcccuucugaaugacaagcauuccaacggcaccauuaaagauagaagcccuuaucggacgcucaugucuugucccaucggggaggugccuucccccuacaacagccgcuuugaauccgucgccuggucugcuagcgccugccacgacggaauuaauuggcugaccaucggcauuuccgggccugauaacggagcuguggccgugcugaaguauaauggcaucaucacagacaccauuaagagcuggagaaacaauauccuccggacacaagagucugagugugcgugcgucaacggguccuguuucaccguuaugacggauggaccgagcaauggccaggccucuuacaaaauuuuucgcaucgaaaagggcaaaauugucaagagcguggagaugaacgcucccaauuaucauuacgaagagugcuccuguuacccugacucuagcgagaucacaugcgugugcagagauaacuggcacggguccaaucggcccugggugagcuucaaccagaaucuggaauaucagaucggauacauuuguucuggcaucuuuggggacaacccucgccccaaugauaaaaccggauccugcggcccgguuagcucuaacggggccaacggagugaagggcuucuccuuuaaguauggcaauggggucuggauuggaagaacaaaaagcaucuccucucggaacggcuucgagaugauuugggacccuaauggguggaccgaaaccgauaacaauuuuagcaucaagcaagacauugugggaaucaacgagugguccggcuacucugggagcuucauccagcaucccgaacuuacaggccuggacuguauucgcccuugcuucuggguugagcucaucagaggacggcccaaagagaauacgauuuggaccuccggcagcucuaucuccuuuuguggggugaacagcgauacagucggauggucuuggcccgacggcgcugaacugccuuucaccauugauaaguga

SEQ ID NO: 215910 - RNA, 1410 nt, Artificial Sequence; identical to SEQ ID NO: 215891
  derived and/or modified CDS sequence (opt5) from neuraminidase__InfluenzaA__AGU92901

SEQ ID NO: 215911 - RNA, 1410 nt, Artificial Sequence; identical to SEQ ID NO: 215891
  derived and/or modified CDS sequence (opt5) from neuraminidase__InfluenzaA__AGU92912

SEQ ID NO: 215912 - RNA, 1410 nt, Artificial Sequence; identical to SEQ ID NO: 215891
  derived and/or modified CDS sequence (opt5) from neuraminidase__InfluenzaA__AGU92923

SEQ ID NO: 215913 - RNA, 1410 nt, Artificial Sequence; identical to SEQ ID NO: 215894
  derived and/or modified CDS sequence (opt5) from neuraminidase__InfluenzaA__AGU92934

SEQ ID NO: 215914 - RNA, 1410 nt, Artificial Sequence; identical to SEQ ID NO: 215894
  derived and/or modified CDS sequence (opt5) from neuraminidase__InfluenzaA__AGU92945

SEQ ID NO: 215915 - RNA, 1410 nt, Artificial Sequence; identical to SEQ ID NO: 215894
  derived and/or modified CDS sequence (opt5) from neuraminidase__InfluenzaA__AGU92956

SEQ ID NO: 215916 - RNA, 1410 nt, Artificial Sequence; identical to SEQ ID NO: 215891
  derived and/or modified CDS sequence (opt5) from neuraminidase__InfluenzaA__AGU92967

SEQ ID NO: 215917 - RNA, 1410 nt, Artificial Sequence; identical to SEQ ID NO: 215891
  derived and/or modified CDS sequence (opt5) from neuraminidase__InfluenzaA__AGU92978

SEQ ID NO: 215918 - RNA, 1410 nt, Artificial Sequence
  derived and/or modified CDS sequence (opt5) from neuraminidase__InfluenzaA__AGU92989
augaaccccaaucagaagaucauuaccaucggcagcgugugcaugacaauugggauggccaaccugauccuccaaauuggaaauaucaucuccauuuggaucucucacagcauucagcugggcaaccagaaucagaucgagacguguaaccaauccgucauuaccuacgaaaauaacacauggguuaaucagaccuaugugaacaucucuaauacaaacuucgcugccgggcagagcguggucuccgugaaacuugcgggaaauucuagccugugcccuguuuccggcugggcuauuuacagcaaggacaacucugugagagucggguccaaaggagauguguuuguuauccgggagccguucaucagcuguucuccccucgaaugccgcaccuuuuuccugacacagggcgcccuucugaaugacaagcauuccaacggcaccauuaaagauagaagcccuuaucggacgcucaugucuugucccaucggggaggugccuucccccuacaacagccgcuuugaauccgucgccuggucugcuagcgccugccacgacggaauuaauuggcugaccaucggcauuuccgggccugauaacggagcuguggccgugcugaaguauaauggcaucaucacagacaccauuaagagcuggagaaacaauauccuccggacacaagagucugagugugcgugcgucaacggguccuguuucaccguuaugacggauggaccgagcaauggccaggccucuuacaaaauuuuucgcaucgaaaagggcaaaauugucaagagcguggagaugaacgcucccaauuaucauuacgaagagugcuccuguuacccugacucuagcgagaucacaugcgugugcagagauaacuggcacggguccaaucggcccugggugagcuucaaccagaaucuggaauaucagaucggauacauuuguucuggcaucuuuggggacaacccucgccccaaugauaaaaccggauccugcggcccgguuagcucuaacggggccaacggagugaagggcuucuccuuuaaguauggcaauggggucuggauuggaagaacaaaaagcaucuccucucggaacggcuucgagaugauuugggacccuaauggguggaccggaaccgauaacaauuuuagcaucaagcaagacauugugggcaucaacgaaugguccggguacucuggcagcuucguucagcaucccgagcuuacaggacuggacuguauccgcccuugcuucuggguggaacucauuagaggccggcccaaagagaauacgaucuggaccuccgggagcucuauuuccuuuuguggagucaacagcgauacagugggcuggucuuggcccgacggggcugagcugccuuucaccaucgauaaguga

SEQ ID NO: 215919 - RNA, 1410 nt, Artificial Sequence; identical to SEQ ID NO: 215908
  derived and/or modified CDS sequence (opt5) from neuraminidase__InfluenzaA__AGU93000

SEQ ID NO: 215920 - RNA, 1410 nt, Artificial Sequence; identical to SEQ ID NO: 215909
  derived and/or modified CDS sequence (opt5) from neuraminidase__InfluenzaA__AGU93011

SEQ ID NO: 215921 - RNA, 1365 nt, Artificial Sequence; identical to SEQ ID NO: 212462
  derived and/or modified CDS sequence (opt5) from neuraminidase__InfluenzaA__AGU93022

SEQ ID NO: 215922 - RNA, 1410 nt, Artificial Sequence
  derived and/or modified CDS sequence (opt5) from neuraminidase__InfluenzaA__AGU93034
augaaccccacccagaagaucauuacaaucggcagcgugugcaugacgauugggauggccaaucugauccuccaaauuggaaacaucaucuccauuuggaucucucacagcauucagcugggcaaucagaaccagaucgagaccuguaaucaauccgucauuacauacgaaaacaauaccuggguuaaccagacauaugugaauaucucuaacaccaauuucgcugccgggcagagcguggcguccgucaaacuugcuggaaacucuagccugugcccuguguccggcugggccauuuacagcaaggacaauucuaucagaaucggguccaaaggagauguuuuugugauucgggagccguucaucagcuguucuccccucgaaugccgcacauuuuuccugacccagggcgcccuucugaacgacaagcauuccaauggcacgauuaaagauagaagcccuuaucggacccucaugucuugucccaucggggaggucccuucccccuacaacagccgcuuugaauccguggcuuggucugccagcgcuugccacgacggaauuaacuggcugacaaucggcaucuccgggccugauaauggagccguugcggugcugaaguauaacggcauuaucaccgacacaauuaagagcuggagaaauaacauccuccggacccaagagucugagugugccugcgucaauggguccuguuucacgauuaugacagauggaccgagcgacggccaggcuucuuacaaaaucuuucgcaucgaaaagggcaaaauugucaagagcguggagaugaacgcccccaauuaucauuacgaagagugcuccuguuacccugauucuagcgagauuaccugcgugugcagagacaacuggcacggguccaaucggcccuggguuagcuucaaccagaaucuggaauaucagaucggauacaucuguucuggcauuuuuggggauaacccucgccccaaugacaaaacaggauccugcggcccggugagcucuaacggggcuaauggagugaagggcuucuccuuuaaguauggcaacggggucuggaucggaagaaccaaaagcauuuccucucggaagggcuucgagaugaucugggauccuaacggguggaccggaacagacaauaacuuuagcaucaaacaagacauugugggcaucaaugaaugguccggguacucuggcagcuucguucagcaucccgagcuuacgggacuggauuguauucgcccuugcuucuggguggaacucaucagaggccggcccaaggagaacaccauuuggacauccgggagcucuaucuccuuuuguggagucaauagcgacaccgugggcuggucuuggcccgauggggccgagcugccuuucacaaucgacaaauga

SEQ ID NO: 215923 - RNA, 1410 nt, Artificial Sequence; identical to SEQ ID NO: 215230
  derived and/or modified CDS sequence (opt5) from neuraminidase__InfluenzaA__AGU93045

SEQ ID NO: 215924 - RNA, 1410 nt, Artificial Sequence; identical to SEQ ID NO: 215891
  derived and/or modified CDS sequence (opt5) from neuraminidase__InfluenzaA__AGU93056

SEQ ID NO: 215925 - RNA, 1410 nt, Artificial Sequence; identical to SEQ ID NO: 214218
  derived and/or modified CDS sequence (opt5) from neuraminidase__InfluenzaA__AGV98980

SEQ ID NO: 215926 - RNA, 1410 nt, Artificial Sequence; identical to SEQ ID NO: 214218
  derived and/or modified CDS sequence (opt5) from neuraminidase__InfluenzaA__AGV98993

SEQ ID NO: 215927 - RNA, 1410 nt, Artificial Sequence; identical to SEQ ID NO: 214218
  derived and/or modified CDS sequence (opt5) from neuraminidase__InfluenzaA__AGV99005

SEQ ID NO: 215928 - RNA, 1410 nt, Artificial Sequence; identical to SEQ ID NO: 214218
  derived and/or modified CDS sequence (opt5) from neuraminidase__InfluenzaA__AGV99017

SEQ ID NO: 215929 - RNA, 1410 nt, Artificial Sequence; identical to SEQ ID NO: 214218
  derived and/or modified CDS sequence (opt5) from neuraminidase__InfluenzaA__AGV99040

SEQ ID NO: 215930 - RNA, 1410 nt, Artificial Sequence
  derived and/or modified CDS sequence (opt5) from neuraminidase__InfluenzaA__AGV99052
augaaccccaaucagaagaucauuaccaucggcagcgugucccugacaauuucuacgaucugcuucuuuaugcaaauugccauccucaucaccacagucacccugcacuucaaacaguacgaguuuaacagcccuccgaauaaccagguuaugcuuugugaacccacaauuaucgagagaaauauuaccgaaaucguguaucugacaaacaccacgauugagaaggaaaucugcccuaaacccgcugaguaccggaauugguccaagccucagugugggauuaccggauucgcccccuuuucuaaagacaacagcauccgccucuccgcgggcggggauaucugggugacaagagagccuuaugucucuugcgacccggauaaguguuaccaauucgcucugggacagggcaccacacuuaauaacgugcauagcaauaacaccguucgggaccgcacgcccuauagaacacugcucaugaaugaacugggggugccuuuucaccugggaaccaagcaggucugcauugccugguccucuagcuccugucaugauggcaaagccuggcuccacgugugcaucacaggcgacgauaagaacgcuaccgccagcuucauuuacaaugggcggcugguugacucuguggucuccuggagcaaagagauccuucgcacccaggaaucugagugugugugcauuaacggaacauguacgguggucaugaccgauggcuccgcuagcgggaaggccgacacaaaaauccuguuuaucgaggaaggaaagauuguucauaccuccacacucucuggcagcgcgcaacacguggaggaaugcuccugcuaucccagauacccuggggugcggugugucugccgcgauaacuggaagggaagcaauagacccaucguggacauuaacaucaaagaucacucuguuauuuccagcuacguguguucuggccuggucggcgacaccccgcggaagaaugacagcuccucuagcucccauugccuugauccuaacaaugaggaagggggacacggcgugaaagggugggccuucgacgauggaaacgacguuuggaugggccgcacgaucaaugagacaagcagacugggguaugagaccuuuaaggugaucgaaggauggucuaaccccaaauccaagcuccagauuaaucggcaggucaucguggaucgcggcgacagaagcggcuacucugggauuuucuccgucgagggaaaaagcuguaucaaccggugcuuuuauguggaacugauuagaggccgcaaggaggaaaccgagguucuguggacauccaauucuaucguggucuucugugggaccagcggaacauacggcacgggguccuggccugauggcgcugaccucaaccugaugcccauuuga

SEQ ID NO: 215931 - RNA, 1410 nt, Artificial Sequence
  derived and/or modified CDS sequence (opt5) from neuraminidase__InfluenzaA__AGV99100
augaaccccaaucagaagaucauuaccaucggcagcgugucccugacaauuucuacgaucugcuucuuuaugcaaauugccauccucaucaccacagucacccugcacuucaaacaguacgaguuuaacagcccuccgaauaaccagguuaugcuuugugaacccacaauuaucgagagaaauauuaccgaaaucguguaucugacaaacaccacgauugagaaggaaaucugcccuaaacccgcugaguaccggaauugguccaagccucagugugggauuaccggauucgcccccuuuucuaaagacaacagcauccgccucuccgcgggcggggauaucugggugacaagagagccuuaugucucuugcgacccggauaaguguuaccaauucgcucugggacagggcaccacacuuaauaacgugcauagcaauaacaccguucgggaccgcacgcccuauagaacacugcucaugaaugaacugggggugccuuuucaccugggaaccaagcaggucugcauugccugguccucuagcuccugucaugauggcaaagccuggcuccacgugugcaucacaggcgacgauaagaacgcuaccgccagcuucauuuacaaugggcggcugguugacucuguggucuccuggagcaaagagauccuucgcacccaggaaucugagugugugugcauuaacggaacauguacgguggucaugaccgauggcuccgcuagcgggaaggccgacacaaaaauccuguuuaucgaggaaggaaagauuguucauaccuccacacucucuggcagcgcgcaacacguggaggaaugcuccugcuaucccagauacccuggggugcggugugucugccgcgauaacuggaagggaagcaauagacccaucguggacauuaacaucaaagaucacucuauuguuuccagcuacguguguucuggccuggucggcgacaccccgcggaagaaugacagcuccucuagcucccauugccuugauccuaacaaugaggaagggggacacggcgugaaagggugggccuucgacgauggaaacgacguuuggaugggccgcacgaucaaugagacaagcagacugggguaugagaccuuuaaggugaucgaaggauggucuaaccccaaauccaagcuccagauuaaucggcaggucaucguggaucgcggcgacagaagcggcuacucugggauuuucuccgucgagggaaaaagcugugugaaccggugcuuuuauguugaacugaucagaggccgcaaggaggaaaccgaggugcuguggacauccaauucuauugucguguucugugggaccagcggaacauacggcacgggguccuggccugauggcgcugaccucaaccugaugcccaucuga

SEQ ID NO: 215932 - RNA, 1410 nt, Artificial Sequence; identical to SEQ ID NO: 214218
  derived and/or modified CDS sequence (opt5) from neuraminidase__InfluenzaA__AGV99112

SEQ ID NO: 215933 - RNA, 1410 nt, Artificial Sequence; identical to SEQ ID NO: 214218
  derived and/or modified CDS sequence (opt5) from neuraminidase__InfluenzaA__AGV99124

SEQ ID NO: 215934 - RNA, 1410 nt, Artificial Sequence; identical to SEQ ID NO: 214218
  derived and/or modified CDS sequence (opt5) from neuraminidase__InfluenzaA__AGV99136

SEQ ID NO: 215935 - RNA, 1410 nt, Artificial Sequence; identical to SEQ ID NO: 214218
  derived and/or modified CDS sequence (opt5) from neuraminidase__InfluenzaA__AGV99148

SEQ ID NO: 215936 - RNA, 1410 nt, Artificial Sequence; identical to SEQ ID NO: 214218
  derived and/or modified CDS sequence (opt5) from neuraminidase__InfluenzaA__AGV99160

SEQ ID NO: 215937 - RNA, 1410 nt, Artificial Sequence; identical to SEQ ID NO: 214218
  derived and/or modified CDS sequence (opt5) from neuraminidase__InfluenzaA__AGV99172

SEQ ID NO: 215938 - RNA, 1410 nt, Artificial Sequence; identical to SEQ ID NO: 214218
  derived and/or modified CDS sequence (opt5) from neuraminidase__InfluenzaA__AGV99196

SEQ ID NO: 215939 - RNA, 1410 nt, Artificial Sequence; identical to SEQ ID NO: 214218
  derived and/or modified CDS sequence (opt5) from neuraminidase__InfluenzaA__AGV99208

SEQ ID NO: 215940 - RNA, 1410 nt, Artificial Sequence; identical to SEQ ID NO: 214218
  derived and/or modified CDS sequence (opt5) from neuraminidase__InfluenzaA__AGV99959

SEQ ID NO: 215941 - RNA, 1410 nt, Artificial Sequence; identical to SEQ ID NO: 215429
  derived and/or modified CDS sequence (opt5) from neuraminidase__InfluenzaA__AGW00005

SEQ ID NO: 215942 - RNA, 1410 nt, Artificial Sequence; identical to SEQ ID NO: 214218
  derived and/or modified CDS sequence (opt5) from neuraminidase__InfluenzaA__AGW00068

SEQ ID NO: 215943 - RNA, 1410 nt, Artificial Sequence
  derived and/or modified CDS sequence (opt5) from neuraminidase__InfluenzaA__AGW00080
augaaccccaaucagaagaucauuaccaucggcagcgugucccugacaauuucuacgaucugcuucuuuaugcaaauugccauccucaucaccacagucacccugcacuucaaacaguacgaguuugacagcccuccgaacaaucagguuaugcuuugugaacccacaauuaucgagagaaacauuaccgaaaucguguaucugacaaauaccacgauugagaaggaaaucugcccuaaacccgcugaguaccggaacugguccaagccucagugugggauuaccggauucgcccccuuuucuaaagauaauagcauccgccucuccgcgggcggggacaucugggugacaagagagccuuaugucucuugcgauccggacaaguguuaccaauucgcucugggacagggcaccacacuuaacaaugugcauagcaacaauaccguucgggaucgcacgcccuauagaacacugcucaugaacgaacugggggugccuuuucaccugggaaccaagcaggucugcauugccugguccucuagcuccugucaugacggcaaagccuggcuccacgugugcaucacaggcgaugacaagaaugcuaccgccagcuucauuuacaacgggcggcugguugauucuguggucuccuggagcaaagagauccuucgcacccaggaaucugagugugugugcauuaauggaacauguacgguggucaugaccgacggcuccgcuagcgggaaggccgauacaaaaauccuguuuaucgaggaaggaaagauuguucauaccuccacacucucuggcagcgcgcaacacguggaggaaugcuccugcuaucccagauacccuggggugcggugugucugccgcgacaacuggaagggaagcaacagacccaucguggauauuaauaucaaagaccacucuauuguuuccagcuacguguguucuggccuggucggcgacaccccgcggaagaacgauagcuccucuagcucccauugccuugacccuaauaacgaggaagggggacacggcgugaaagggugggccuucgaugacggaaaugauguuuggaugggccgcacgaucaacgagacaagcagacugggguaugagaccuuuaaggugaucgaaggauggucuaaucccaaauccaagcuccagauuaaccggcaggucaucguggaccgcggcgauagaagcggcuacucugggauuuucuccgucgagggaaaaagcuguaucaaucggugcuuuuauguggaacugauuagaggccgcaaggaggaaaccgagguucuguggacauccaacucuaucguggucuucugugggaccagcggaacauacggcacgggguccuggccugacggcgcugaucucaaucugaugcccauuuga

SEQ ID NO: 215944 - RNA, 1410 nt, Artificial Sequence
  derived and/or modified CDS sequence (opt5) from neuraminidase__InfluenzaA__AGW00104
augaaccccaaucagaagaucauuaccaucggcagcgugucccugacaauuucuacgaucugcuucuuuaugcaaauugccauccucaucaccacagucacccugcacuucaaacaguacgaguuuaacagcccuccgaauaaccagguuaugcuuugugaacccacaauuaucgagagaaauauuaccgaaaucguguaucugacaaacaccacgauugagaaggaaaucugcccuaaacccgcugaguaccggaauugguccaagccucagugugggauuaccggauucgcccccuuuucuaaagacaacagcauccgccucuccgcgggcggggauaucugggugacaagagagccuuaugucucuugcgacccggauaaguguuaccaauucgcucugggacagggcaccacacuuaauaacgugcauagcaauaacaccguucgggaccgcacgcccuauagaacacugcucaugaaugaacugggggugccuuuucaccugggaaccaagcaggucugcauugccugguccucuagcuccugucaugauggcaaagccuggcuccacgugugcaucacaggcgacgauaagaacgcuaccgccagcuucauuuacaaugggcggcugguugacucuguggucuccuggagcaaagagauccuucgcacccaggaaucugagugugugugcauuaacggaacauguacgguggucaugaccgauggcuccgcuagcggggaggccgacacaaagauccuguuuaucgaagagggaaaaauuguucauaccuccacacucucuggcagcgcgcaacacguggaagagugcuccugcuaucccagauacccuggggugcggugugucugccgcgauaacuggaagggaagcaauagacccaucguggacauuaacaucaaggaucacucuauuguuuccagcuacguguguucuggccuggucggcgacaccccgcggaaaaaugacagcuccucuagcucccauugccuugauccuaacaaugaagaagggggacacggcgugaaggggugggccuucgacgauggaaacgacguuuggaugggccgcacgaucaaugagacaagcagacugggguaugagaccuuuaaagugaucgagggauggucuaaccccaaguccaaacuccagauuaaucggcaggucaucguggaucgcggcgacagaagcggcuacucugggauuuucuccgucgaaggaaagagcuguaucaaccggugcuuuuauguggagcugauuagaggccgcaaagaagagaccgagguucuguggacauccaauucuaucguggucuucugugggaccagcggaacauacggcacgggguccuggccugauggcgcugaccucaaccugaugcccauuuga

SEQ ID NO: 215945 - RNA, 1410 nt, Artificial Sequence; identical to SEQ ID NO: 215943
  derived and/or modified CDS sequence (opt5) from neuraminidase__InfluenzaA__AGW00116

SEQ ID NO: 215946 - RNA, 1410 nt, Artificial Sequence; identical to SEQ ID NO: 215943
  derived and/or modified CDS sequence (opt5) from neuraminidase__InfluenzaA__AGW00128

SEQ ID NO: 215947 - RNA, 1410 nt, Artificial Sequence; identical to SEQ ID NO: 214218
  derived and/or modified CDS sequence (opt5) from neuraminidase__InfluenzaA__AGW00140

SEQ ID NO: 215948 - RNA, 1410 nt, Artificial Sequence; identical to SEQ ID NO: 214218
  derived and/or modified CDS sequence (opt5) from neuraminidase__InfluenzaA__AGW00152

SEQ ID NO: 215949 - RNA, 1410 nt, Artificial Sequence; identical to SEQ ID NO: 215943
  derived and/or modified CDS sequence (opt5) from neuraminidase__InfluenzaA__AGW00164

SEQ ID NO: 215950 - RNA, 1410 nt, Artificial Sequence; identical to SEQ ID NO: 214218
  derived and/or modified CDS sequence (opt5) from neuraminidase__InfluenzaA__AGW00176

SEQ ID NO: 215951 - RNA, 1410 nt, Artificial Sequence; identical to SEQ ID NO: 214218
  derived and/or modified CDS sequence (opt5) from neuraminidase__InfluenzaA__AGW00188

SEQ ID NO: 215952 - RNA, 1410 nt, Artificial Sequence; identical to SEQ ID NO: 214218
  derived and/or modified CDS sequence (opt5) from neuraminidase__InfluenzaA__AGW00712

SEQ ID NO: 215953 - RNA, 1410 nt, Artificial Sequence; identical to SEQ ID NO: 214218
  derived and/or modified CDS sequence (opt5) from neuraminidase__InfluenzaA__AGW00724

SEQ ID NO: 215954 - RNA, 1410 nt, Artificial Sequence
  derived and/or modified CDS sequence (opt5) from neuraminidase__InfluenzaA__AGW00736
augaaccccaaucagaagaucauuaccaucggcagcgugucccugacaauuucuacgaucugcuucuuuaugcaaauugccauccucaucaccacagucacccugcacuucaaacaguacgaguuuaacagcccuccgaauaaccagaugaugcuuugugaacccacaauuaucgagagaaauauuaccgaaaucguuuaucugacaaacaccacgauugagaaggaaaucugcccuaaacccgcugaguaccggaauugguccaagccucagugugggauuaccggauucgcccccuuuucuaaagacaacagcauccgccucuccgcgggcggggauaucugggugacaagagagccuuaugugucuugcgacccggauaaguguuaccaauucgcucugggacagggcaccacacuuaauaacguccauagcaauaacaccgugcgggaccgcacgcccuauagaacacugcucaugaaugaacuggggguuccuuuucaccugggaaccaaacaggugugcauugccugguccucuagcuccugucaugauggcaaggccuggcuccacgucugcaucacaggcgacgauaagaacgcuaccgccagcuucauuuacaaugggcggcugguggacucuguuguguccuggagcaaagagauccuucgcacccaggaaucugagugugucugcauuaacggaacauguacgguggugaugaccgauggcuccgcuagcgggaaggccgacacaaaaauccuguuuaucgaggaaggaaagauuguccauaccuccacacucucuggcagcgcgcaacacguugaggaaugcuccugcuaucccagauacccuggggugcggugugugugccgcgauaacuggaagggaagcaauagacccaucgucgacauuaacaucaaagaucacucuauuguguccagcuacguuuguucuggccuggugggcgacaccccgcggaagaaugacagcuccucuagcucccauugccuugauccuaacaaugaggaagggggacacggcgucaaagggugggccuucgacgauggaaacgacguguggaugggccgcacgaucaaugagacaagcagacugggguaugagaccuuuaagguuaucgaaggauggucugaucccaaauccaagcuccagauuaaccgccaggugaucgucgaccggggcgauagaagcggcuacucugggauuuucuccguggagggaaaaagcuguaucaaucggugcuuuuaugucgaacugauuagaggccgcaaggaggaaaccgaggugcuguggacauccaacucuaucguuguguucugugggaccagcggaacauacggcacgggguccuggccugacggcgcugaucucaaucugaugcccauuuga

SEQ ID NO: 215955 - RNA, 1410 nt, Artificial Sequence
  derived and/or modified CDS sequence (opt5) from neuraminidase__InfluenzaA__AGW00748
augaaccccaaucagaagaucauuaccaucggcagcgugucccugacaauuucuacgaucugcuucuuuaugcaaauugccauccucaucaccacagucacccugcacuucaaacaguacgaguuuaacagcccuccgaauaaccagguuaugcuuugugaacccacaauuaucgagagaaauauuaccgaaaucguguaucugacaaacaccacgauugagaaggaaaucugcccuaaacccgcugaguaccggaauugguccaagccucagugugggauuaccggauucgcccccuuuucuaaagacaacagcauccgccucuccgcgggcggggauaucugggugacaagagagccuuaugucucuugcgacccggauaaguguuaccaauucgcucugggacagggcaccacacuuaauaacaugcauagcaauaacaccgugcgggaccgcacgcccuauagaacacugcucaugaaugaacuggggguuccuuuucaccugggaaccaaacaggugugcauugccugguccucuagcuccugucaugauggcaaggccuggcuccacgucugcaucacaggcgacgauaagaacgcuaccgccagcuucauuuacaaugggcggcugguggacucuguuguguccuggagcaaagagauccuucgcacccaggaaucugagugugucugcauuaacggaacauguacgguggugaugaccgauggcuccgcuagcgggaaggccgacacaaaaauccuguuuaucgaggaaggaaagauuguccauaccuccacacucucuggcagcgcgcaacacguugaggaaugcuccugcuaucccagauacccuggggugcggugugugugccgcgauaacuggaagggaagcaauagacccaucgucgacauuaacaucaaagaucacucuauuguguccagcuacguuuguucuggccuggugggcgacaccccgcggaagaaugacagcuccucuagcucccauugccuugauccuaacaaugaggaagggggacacggcgucaaagggugggccuucgacgauggaaacgacguguggaugggccgcacgaucaaugagacaagcagacugggguaugagaccuuuaagguuaucgaaggauggucuaaccccaaauccaagcuccagauuaaucgccaggugaucgucgaucggggcgacagaagcggcuacucugggauuuucuccguggagggaaaaagcuguaucaaccggugcuuuuaugucgaacugauuagaggccgcaaggaggaaaccgaggugcuguggacauccaauucuaucguuguguucugugggaccagcggaacauacggcacgggguccuggccugauggcgcugaccucaaccugaugcccauuuga

SEQ ID NO: 215956 - RNA, 1410 nt, Artificial Sequence
  derived and/or modified CDS sequence (opt5) from neuraminidase__InfluenzaA__AGW00760
augaaccccaaucagaagaucauuaccaucggcagcgugucccugacaauuucuacgaucugcuucuuuaugcaaauugccauccucaucaccacagucacccugcacuucaaacaguacgaguuuaacagcccuccgaauaaccagguuaugcuuugugaacccacaauuaucgagagaaauauuaccgaaaucguguaucugacaaacaccacgauugagaaggaaaucugcccuaaacccgcugaguaccggaauugguccaagccucagugugggauuaccggauucgcccccuuuucuaaagacaacagcauccgccucuccgcgggcggggauaucugggugacaagagagccuuaugucucuugcgacccggauaaguguuaccaauucgcucugggacagggcaccacacuuaauaacgugcauagcaauaacaccguucgggaccgcacgcccuauagaacacugcucaugaaugaacugggggugccuuuucaccugggaaccaagcaggucugcauugccugguccucuagcuccugucaugauggcaaagccuggcuccacgugugcaucacaggcgacgauaagaacgcuaccgccagcuucauuuacaaugggcggcugguugacucuguggucuccuggagcaaagagauccuucgcacccaggaaucugagugugugugcauuaacggaacauguacgguggucaugaccgauggcuccgcuagcgggaaggccgacacaaaaauccuguuuaucgaggaaggaaagauuguucauaccuccacacucucuggcagcgcgcaacacguggaggaaugcuccugcuaucccagauacccuggggugcggugugucugccgcgauaacuggaagggaagcaauagacccaucguggacauuaacaucaaagaucacucuauuguuuccagcuacguguguucuggccuggucggcgacaccccgcggaagaaugacagcuccucuagcucccauugccuugauccuaacaaugaggaagggggacacggcgugaaagggugggccuucgacgauggaaacgacguuuggaugggccgcacgaucaaugagacaagcagacugggguaugagaccuuuaaggugaucgaaggauggucuaaccccaaauccaagcuccaggucaaucgccaggugauugucgaucggggcgacagaagcggcuacucugggaucuucuccguggagggaaaaagcuguauuaaccggugcuuuuauguugaacugaucagaggccgcaaggaggaaaccgaggugcuguggacauccaauucuauugucguguucugugggaccagcggaacauacggcacgggguccuggccugauggcgcugaccucaaccugaugcccaucuga

SEQ ID NO: 215957 - RNA, 1410 nt, Artificial Sequence; identical to SEQ ID NO: 214218
  derived and/or modified CDS sequence (opt5) from neuraminidase__InfluenzaA__AGW00784

SEQ ID NO: 215958 - RNA, 1410 nt, Artificial Sequence; identical to SEQ ID NO: 214218
  derived and/or modified CDS sequence (opt5) from neuraminidase__InfluenzaA__AGW00796

SEQ ID NO: 215959 - RNA, 1410 nt, Artificial Sequence; identical to SEQ ID NO: 215943
  derived and/or modified CDS sequence (opt5) from neuraminidase__InfluenzaA__AGW00808

SEQ ID NO: 215960 - RNA, 1410 nt, Artificial Sequence; identical to SEQ ID NO: 215447
  derived and/or modified CDS sequence (opt5) from neuraminidase__InfluenzaA__AGW00820

SEQ ID NO: 215961 - RNA, 1410 nt, Artificial Sequence; identical to SEQ ID NO: 214218
  derived and/or modified CDS sequence (opt5) from neuraminidase__InfluenzaA__AGW00832

SEQ ID NO: 215962 - RNA, 1410 nt, Artificial Sequence
  derived and/or modified CDS sequence (opt5) from neuraminidase__InfluenzaA__AGW00844
augaaccccaaucagaagaucauuaccaucggcagcgugucccugacaauuucuacgaucugcuucuuuaugcaaauugccauccucaucaccacagucacccugcacuucaaacaguacgaguuuaacuucccuccgaauaaccagguuaugcuuugugaacccacaauuaucgagagaaauauuaccgaaaucguguaucugacaaacaccacgauugagaaggaaaucugcccuaaacccgcugaguaccggaauuggagcaagccucagugugggauuaccggauuugcccccuucuccaaagacaacucuauccgccucagcgcgggcggggauaucugggugacaagagagccuuaugucuccugcgacccggauaaguguuaccaauuugcucugggacagggcaccacacuuaauaacgugcauucuaauaacaccguucgggaccgcacgcccuauagaacacugcucaugaaugaacugggggugccuuuccaccugggaaccaagcaggucugcauugccuggagcuccagcucuugucaugauggcaaagccuggcuccacgugugcaucacaggcgacgauaagaacgcuaccgccuccuuuauuuacaaugggcggcugguugacagcguggucucuugguccaaagagauccuucgcacccaggaaagcgagugugugugcauuaacggaacauguacgguggucaugaccgauggcucugcuuccgggaaggccgacacaaaaauccuguucaucgaggaaggaaagauuguucauaccagcacacucuccggcucugcgcaacacguggaggaaugcagcugcuaucccagauacccuggggugcggugugucugccgcgauaacuggaagggauccaauagacccaucguggacauuaacaucaaagaucacagcauuguuucuuccuacguguguagcggccuggucggcgacaccccgcggaagaaugacucuagcuccucuagccauugccuugauccuaacaaugaggaagggggacacggcgugaaagggugggccuuugacgauggaaacgacguuuggaugggccgcacgaucaaugagacauccagacugggguaugagaccuucaaggugaucgaaggauggagcaaccccaaaucuaagcuccagauuaaucggcaggucaucguggaucgcggcgacagauccggcuacagcgggaucuuuucugucgagggaaaauccuguauuaaccggugcuucuauguggaacugauuagaggccgcaaggaggaaaccgagguucuguggacaagcaauuccaucguggucuucugugggaccucuggaacauacggcacggggagcuggccugauggcgcugaccucaaccugaugcccauuuga

SEQ ID NO: 215963 - RNA, 1410 nt, Artificial Sequence; identical to SEQ ID NO: 215955
  derived and/or modified CDS sequence (opt5) from neuraminidase__InfluenzaA__AGW00868

SEQ ID NO: 215964 - RNA, 1410 nt, Artificial Sequence
  derived and/or modified CDS sequence (opt5) from neuraminidase__InfluenzaA__AGW00880
augaaccccaaucagaagaucauuaccaucggcagcgugucccugacaauuucuacgaucugcuucuuuaugcagauugccauccucaucaccacagucacccugcacuucaaacaguacgaguuuaacagcccuccgaauaaccagguuaugcuuugugaacccacaauuaucgagagaaauauuaccgaaaucguguaucugacaaacaccacgauugagaaggaaaucugcccuaaacccgcugaguaccggaauugguccaagccucagugugacauuaccggguucgcccccuuuucuaaagauaacagcauccgccucuccgcgggaggcgacgugugggucacaagagagccuuaugugucuugcgauccggacaaguguuaccaauucgcucuggggcagggaaccacacuuaauaacguucauagcaauaacaccgugcgggaucgcacgcccuauagaacacugcucaugaaugaacugggcgucccuuuucaccuggggaccaaacaggugugcaucgccugguccucuagcuccugucaugacggaaaggccuggcuccacguuugcauuacaggcgaugacaagaacgcuaccgccagcuucaucuacaauggcaaacugguggauucugucguguccuggagcaaggagauucuucggacccaggaaucugagugugugugcaucaacgggacauguacggucguuaugaccgacggauccgcuagcggcaaagccgauacaaagauucuguuuaucgaggaagggaagaucgugcauaccuccacacucucuggaagcgcgcaacacguggaggaaugcuccugcuauccccgcuacccugacgucagaugugugugccgggauaacuggaaaggcagcaaucgccccauuguugacaucaacauuaaggaccacucuaucguguccagauacgucuguagcgggcuggugggagauaccccgcggaaaaaugacucuagcuccucuagccauugccuugauccuaacaaugaggaaggcggccacgggguuaagggaugggccuucgacgauggcaacgacguguggauggggcgcacgauuaaugagacauccagacugggauaugagaccuuuaaagucaucgaaggcuggagcaaccccaagucuaaacuccagaucaaucggcaagugauugucgaucgcggggacagauccggauacagcggcaucuucucuguggagggcaaguccuguauuaaccggugcuuuuauguugaacugaucagagggcgcaaggaggaaaccgaggugcuguggacaagcaauuccauugucguguucuguggaaccucuggcacauacgggacgggaagcuggccugauggcgcugaccucaaccugaugcccaucuga

SEQ ID NO: 215965 - RNA, 1410 nt, Artificial Sequence
  derived and/or modified CDS sequence (opt5) from neuraminidase__InfluenzaA__AGW00892
augaaccccaaucagaagaucauuaccaucggcagcgugucccugacaauuucuacgaucugcuucuuuaugcaaauugccauccucaucaccacagucacccugcacuucaaacaguacgaguuuaacccuccgcccaauaaccagguuaugcuuugugaaccuacaauuaucgagagaaauauuaccgaaaucguguaucugacaaacaccacgauugagaaggaaaucugccccaaaccugcugaguaccggaauuggagcaagccccagugugggauuaccggauucgccccuuuuuccaaagacaacucuauccgccucagcgcgggcggggauaucugggugacaagagagccguaugucuccugcgaccccgauaaguguuaccaauucgcucugggacagggcaccacacuuaauaacgugcauucuaauaacaccguucgggaccgcacgccuuauagaacacugcucaugaaugaacugggggugcccuuucaccugggaaccaagcaggucugcauugccuggagcuccagcucuugucaugauggcaaagccuggcuccacgugugcaucacaggcgacgauaagaacgcuaccgccuccuucauuuacaaugggcggcugguugacagcguggucucuugguccaaagagauccuucgcacccaggaaagcgagugugugugcauuaacggaacauguacgguggucaugaccgauggcucugcuuccgggaaggccgacacaaaaauccuguuuaucgaggaaggaaagauuguucauaccagcacacucuccggcucugcgcaacacguggaggaaugcagcugcuauccuagauaccccggggugcggugugucugccgcgauaacuggaagggauccaauagaccgaucguggacauuaacaucaaagaucacagcauuguuucuuccuacguguguagcggccuggucggcgacaccccucggaagaaugacucuagcuccucuagccauugccuugaucccaacaaugaggaagggggacacggcgugaaagggugggccuucgacgauggaaacgacguuuggaugggccgcacgaucaaugagacauccagacugggguaugagaccuuuaaggugaucgaaggauggagcaacccuaaaucuaagcuccagaugaaucggcaggucauuguggaucgcggcgacagauccggcuacagcgggaucuucucugucgagggaaaauccuguauuaaccggugcuuuuauguggaacugaucagaggccgcaaggaggaaaccgagguucuguggacaagcaauuccauuguggucuucugugggaccucuggaacauacggcacggggagcuggcccgauggcgcugaccucaaccugaugcccaucuga

SEQ ID NO: 215966 - RNA, 1410 nt, Artificial Sequence
  derived and/or modified CDS sequence (opt5) from neuraminidase__InfluenzaA__AGW00904
augaaccccaaucagaagaucauuaccaucggcagcgugucccugacaauuucuacgaucugcuucuuuaugcaaauugccauccucaucaccacagucacccugcacuucaaacaguacgaguuuaacagcccuccgaauaaccagguuaugcuuugugaacccacaauuaucgagagaaauauuaccgaaaucguguaucugacaaacaccacgauugagaaggaaaucugcccuaaacccgcugaguaccggaauugguccaagccucagugugggauuaccggauucgcccccuuuucuaaagacaacagcauccgccucuccgcgggcggggauaucugggugacaagagagccuuaugucucuugcggaccggacaaguguuaccaauucgcucugggccaggggaccacacuuaauaacaugcauagcaauaacaccgugcgggaucgcacgcccuauagaacacugcucaugaaugaacugggaguuccuuuucaccugggcaccaaacaggugugcauugccugguccucuagcuccugucaugacggcaaggccuggcuccacgucugcaucacaggggaugacaagaacgcuaccgccagcuucauuuacaauggacggcugguggauucuguuguguccuggagcaaagagauccuucgcacccaggaaucugagugugucugcauuaacggcacauguacgguggugaugaccgacggguccgcuagcggaaaggccgauacaaaaauccuguuuaucgaggaaggcaagauuguccauaccuccacacucucugggagcgcgcaacacguugaggaaugcuccugcuaucccagauacccuggagugcggugugugugccgcgacaacuggaagggcagcaauagacccaucgucgauauuaacaucaaagaccacucuauuguguccagcuacguuuguucuggccuggugggggauaccccgcggaagaaugacagcuccucuagcucccauugccuugacccuaacaaugaggaaggaggccacggggucaaaggaugggccuucgaugacggcaacgauguguggauggggcgcacgaucaaugagacaagcagacugggauaugagaccuuuaagguuaucgaaggcuggucuaaccccaaauccaagcuccagauuaaucgccaggugaucgucgaccggggcgauagaagcggguacucuggaauuuucuccguggagggcaaaagcuguaucaaccggugcuuuuaugucgaacugauuagagggcgcaaggaggaaaccgaggugcuguggacauccaauucuaucguuguguucuguggaaccagcggcacauacgggacgggcuccuggccugacggagcugaucucaaccugaugcccauuuga

SEQ ID NO: 215967 - RNA, 1410 nt, Artificial Sequence
  derived and/or modified CDS sequence (opt5) from neuraminidase__InfluenzaA__AGW00916
augaaccccaaucagaagaucauuaccaucggcagcgugucccugacaauuucuacgaucugcuucuuuaugcaaauugccauccucaucaccacagucacccugcacuucaaacaguacgaguuuaacagcccuccgaauaaccagguuaugcuuugugaacccacaauuaucgagagaaauauuaccgaaaucguguaucugacaaacaccacgauugagaaggaaaucugcccuaaacccgcugaguaccggaauugguccaagccucagugugggauuaccggauucgcccccuuuucuaaagacaacagcauccgccucuccgcgggcggggauaucugggugacaagagagccuuaugucucuugcgacccggauaaguguuaccaauucgcucugggacagggcaccacacuuaauaacaugcauagcaauaacaccgugugcgaccggacgcccuaucgcacacugcucaugaaugaacuggggguuccuuuucaccugggaaccaaacagguguguauugccugguccucuagcuccugccaugauggcaaggccuggcuccacgucuguaucacaggcgacgauaagaacgcuaccgccagcuucauuuacaaugggagacugguggacucuguuguguccuggagcaaagagauccuucggacccaggaaucugagugcgucuguauuaacggaacaugcacgguggugaugaccgauggcuccgcuagcgggaaggccgacacaaaaauccuguuuaucgaggaaggaaagauuguccauaccuccacacucucuggcagcgcgcaacacguugaggaaugcuccuguuauccccgcuacccuggggugagaugcgugugucgggauaacuggaagggaagcaaucgccccaucgucgacauuaacaucaaagaucacucuauuguguccagcuacguuugcucuggccuggugggcgacaccccgagaaagaaugacagcuccucuagcucccauugucuugauccuaacaaugaggaagggggacacggcgucaaagggugggccuucgacgauggaaacgacguguggaugggccggacgaucaaugagacaagccgccugggguaugagaccuuuaagguuaucgaaggauggucuaaccccaaauccaagcuccagauuaauagacaggugaucgucgaucggggcgaccgcagcggcuacucugggauuuucuccguggagggaaaaagcugcaucaacagauguuuuuaugucgaacugauucggggcagaaaggaggaaaccgaggugcuguggacauccaauucuaucguuguguucugcgggaccagcggaacauacggcacgggguccuggccugauggcgcugaccucaaccugaugcccauuuga

SEQ ID NO: 215968 - RNA, 1410 nt, Artificial Sequence; identical to SEQ ID NO: 215943
  derived and/or modified CDS sequence (opt5) from neuraminidase__InfluenzaA__AGW00934

SEQ ID NO: 215969 - RNA, 1410 nt, Artificial Sequence
  derived and/or modified CDS sequence (opt5) from neuraminidase__InfluenzaA__AGW01247
augaaccccaaucagaagaucauuaccaucggcagcgugucccugacaauuucuacgaucugcuucuuuaugcaaauugccauccucaucaccacagucacccugcacuucaaacaguacgaguuuaacagcccuccgaauaaccagguuaugcuuugugaacccacaauuaucgagagaaauauuaccgaaaucguguaucugacaaacaccacgauugagaaggaaaucugcccuaaacccgcugaguaccggaauugguccaagccucagugugggauuaccggauucgcccccuuuucuaaagacaacagcauccgccucuccgcgggcggggauaucugggugacaagagagccuuaugucucuugcgacccggauaaguguuaccaauucgcucugggacagggcaccacacuuaauaacgugcauagcaauaacaccguucgggaccgcacgcccuauagaacacugcucaugaaugaacugggggugccuuuucaccugggaaccaagcaggucugcauugccugguccucuagcuccugucaugauggcaaagccuggcuccacgugugcaucacaggcgacgauaagaacgcuaccgccagcuucauuuacaaugggcggcugguugacucuguggucuccuggagcaaagagauccuucgcacccaggaaucugagugugugugcauuaacggaacauguacgguggucaugaccgauggcuccgcuagcgggaaggccgacacaaaaauccuguuuaucgaggaaggaaagauuguucauaccuccacacucucuggcagcgcgcaacacguggaggaaugcuccugcuaucccagauacccuggggugcggugugucugccgcgauaacuggaagggaagcaauagacccaucguggacauuaacaucaaagaucacucuauuguuuccagcuacguguguucuggccuggucggcgacaccccgcggaagaaagacagcuccucuagcucccauugccuugauccuaauaacgaggaagggggacacggcgugaaggggugggccuucgacgauggaaaugacguuuggaugggccgcacgaucaacgagacaagcagacugggguaugagaccuuuaaagugaucgaaggauggucuaaucccaaguccaaacuccagauuaaccggcaggucaucguggaucgcggcgacagaagcggcuacucugggauuuucuccgucgagggaaagagcuguaucaaucggugcuuuuauguggaacugauuagaggccgcaaggaggaaaccgagguucuguggacauccaacucuaucguggucuucugugggaccagcggaacauacggcacgggguccuggccugauggcgcugaccucaaucugaugcccauuuga

SEQ ID NO: 215970 - RNA, 1410 nt, Artificial Sequence; identical to SEQ ID NO: 214218
  derived and/or modified CDS sequence (opt5) from neuraminidase__InfluenzaA__AGW01259

SEQ ID NO: 215971 - RNA, 1410 nt, Artificial Sequence; identical to SEQ ID NO: 215955
  derived and/or modified CDS sequence (opt5) from neuraminidase__InfluenzaA__AGW01298

SEQ ID NO: 215972 - RNA, 1410 nt, Artificial Sequence; identical to SEQ ID NO: 215447
  derived and/or modified CDS sequence (opt5) from neuraminidase__InfluenzaA__AGW01322

SEQ ID NO: 215973 - RNA, 1410 nt, Artificial Sequence
  derived and/or modified CDS sequence (opt5) from neuraminidase__InfluenzaA__AGW01334
augaaccccaaucagaagaucauuaccaucggcagcgugucccugacaauuucuacgaucugcuucuuuaugcaaauugccauccucaucaccacagucacccugcacuucaaacaguacgaguuuaacagcccuccgaauaaccagguuaugcuuugugaacccacaauuaucgagagaaauauuaccgaaaucguguaucugacaaacaccacgauugagaaggaaaucugcccuaaacccgcugaguaccggaauugguccaagccucagugugggauuaccggauucgcccccuuuucuaaagacaacagcauccgccucuccgcgggcggggauaucugggugacaagagagccuuaugucucuugcgacccggauaaguguuaccaauucgcucugggacagggcaccacacuuaauaacgugcauagcaauaacaccguucgggaccgcacgcccuauagaacacugcucaugaaugaacugggggugccuuuucaccugggaaccaagcaggucugcauugccugguccucuagcuccugucaugauggcaaagccuggcuccacgugugcaucacaggcgacgauaagaacgcuaccgccagcuucauuuacaaugggcggcugguugacucuguggucuccuggagcaaagagauccuucgcacccaggaaucugagugugugugcauuaacggaacauguacgguggucaugaccgauggcuccgcuagcgggaaggccgacacaaaaauccuguuuaucgaggaaggaaagauuguucauaccuccacacucucuggcagcgcgcaacacguggaggaaugcuccugcuaucccagauacccuggggugcggugugucugccgcgauaacuggaagggaagcaauagacccaucguggacauuaacaucaaagaucacucuauuguuuccagcuacguguguucuggccuggucggcgacaccccgcggaagaaugacagcuccucuagcucccauugccuugauccuaacaaugaggaagggggacacggcgugaaagggugggccuucgacgauggaaacgacguuuggaugggccgcacgaucaaugagacaagcagacugggguaugagaccuuuaaggugaucgaaggauggucuaaccccaaauccaagcuccagauuaaucggcaggucaucguggaucgcggcgacagaagcggcuacucugggauuuucuccgucgagggaaaaagcuguaucaaccggugcuuuuauguggaacugauuagaggccgcaaggaggaagcugagguucuguggaccuccaauucuaucguggucuucugugggacaagcggaaccuacggcacaggguccuggccugauggcgccgaccucaaccugaugcccauuuga

SEQ ID NO: 215974 - RNA, 1410 nt, Artificial Sequence; identical to SEQ ID NO: 214218
  derived and/or modified CDS sequence (opt5) from neuraminidase__InfluenzaA__AGW01346

SEQ ID NO: 215975 - RNA, 1410 nt, Artificial Sequence
  derived and/or modified CDS sequence (opt5) from neuraminidase__InfluenzaA__AGW01358
augaaccccaaucagaagaucauuaccaucggcagcgugucccugacaauuucuacgaucugcuucuuuaugcaaauugccauccucaucaccacagucacccugcacuucaaacaguacgaguuuaacagcccuccgaauaaccagguuaugcuuugugaacccacaauuaucgagagaaauauuaccgaaaucguguaucugacaaacaccacgauugagaaggaaaucugcccuaaacccaccgaguaccggaauugguccaagccucagugugggauuacaggauucgcucccuuuucuaaagacaacagcauccgccucuccgccggcggggauaucugggugaccagagagccuuaugucucuugcgacccggauaaguguuaccaauucgcgcugggacagggcacaacccuuaauaacgugcauagcaauaacacgguucgggaccgcacacccuauagaacccugcucaugaaugaacugggggugccuuuucaccugggaacaaagcaggucugcauugcuugguccucuagcuccugucaugauggcaaagccuggcuccacgugugcaucaccggcgacgauaagaacgccaccgcuagcuucauuuacaaugggcggcugguugacucuguggucuccuggagcaaagagauccuucgcacacaggaaucugagugugugugcauuaacggaacguguaccguggucaugacagauggcuccgccagcgggaaggcugacaccaaaauccuguuuaucgaggaaggaaagauuguucauacauccacccucucuggcagcgcccaacacguggaggaaugcuccugcuaucccagauacccuggggugcggugugucugccgcgauaacuggaagggaagcaauagacccaucguggacauuaacaucaaagaucacucuauuguuuccagcuacguguguucuggccuggucggcgacacgccgcggaagaaugacagcuccucuagcucccauugccuugauccuaacaaugaggaagggggacacggcgugaaagggugggcguucgacgauggaaacgacguuuggaugggccgcacaaucaaugagaccagcagacugggguaugagaccuuuaaggugaucgaaggauggucuaaccccaaauccaagcuccagauuaaucggcaggucaucguggaucgcggcgacagaagcggcuacucugggauuuucuccgucgagggaaaaagcuguaucaaccggugcuuuuauguggaacugauuagaggccgcaaggaggaaacagagguucuguggaccuccaauucuaucguggucuucugugggacaagcggaacguacggcaccggguccuggccugauggcgccgaccucaaccugaugcccauuuga

SEQ ID NO: 215976 - RNA, 1410 nt, Artificial Sequence; identical to SEQ ID NO: 214218
  derived and/or modified CDS sequence (opt5) from neuraminidase__InfluenzaA__AGW01370

SEQ ID NO: 215977 - RNA, 1410 nt, Artificial Sequence; identical to SEQ ID NO: 214218
  derived and/or modified CDS sequence (opt5) from neuraminidase__InfluenzaA__AGW01382

SEQ ID NO: 215978 - RNA, 1410 nt, Artificial Sequence
  derived and/or modified CDS sequence (opt5) from neuraminidase__InfluenzaA__AGW01394
augaaccccaaucagaagaucauuaccaucggcagcgugucccugacaauuucuacgaucugcuucuuuaugcaaauugccauccucaucaccacagucacccugcacuucaaacaguacgaguuugacagcccuccgaacaaucagguuaugcuuugugaacccacaauuaucgagagaaacauuaccgaaaucguguaucugacaaauaccacgauugagaaggaaaucugcccuaaacccgcugaguaccggaacugguccaagccucagugugggauuaccggauucgcccccuuuucuaaagauaauagcauccgccucuccgcgggcggggacaucugggugacaagagagccuuaugucucuugcgauccggacaaguguuaccaauucgcucugggacagggcaccacacuuaacaaugugcauagcaacaauaccguucgggaucgcacgcccuauagaacacugcucaugaacgaacugggggugccuuuucaccugggaaccaagcaggucugcauugccugguccucuagcuccugucaugacggcaaagccuggcuccacgugugcaucacaggcgaugacaagaaugcuaccgccagcuucauuuacaacgggcggcugguugauucuaucguguccuggagcaaagacauucuucgcacccaggagucugaaugugucugcaucaauggaacauguacgguggugaugaccgauggcuccgcuagcgggaaggccgacacaaaaauccuguuuauugaggagggaaagaucguccauaccuccacacucucuggcagcgcgcaacacguugaagagugcuccugcuaucccagauacccuggggugcggugugugugccgcgauaacuggaagggaagcaacagacccauugucgacaucaauauuaaagaccacucuaucguguccagcuacguuuguucuggccuggugggcgauaccccgcggaagaacgacagcuccucuagcucccauugccuugauccuaauaacgaagaagggggacacggcgucaaagggugggccuucgacgauggaaaugacguguggaugggccgcacgaucaacgagacaagcagacugggguaugagaccuuuaagguuauugagggauggucuaaucccaaauccaagcuccagaucaaccgccaggugauugucgaucggggcgacagaagcggcuacucugggaucuucuccguggaaggaaaaagcuguauuaaucggugcuuuuaugucgagcugaucagaggccgcaaggaagagaccgaagugcuguggacauccaacucuauuguuguguucugugggaccagcggaacauacggcacgggguccuggccugauggcgcugaccucaaucugaugcccaucuga

SEQ ID NO: 215979 - RNA, 1410 nt, Artificial Sequence
  derived and/or modified CDS sequence (opt5) from neuraminidase__InfluenzaA__AGW01406
augaaccccaaucagaagaucauuaccaucggcagcgugucccugacaauuucuacgaucugcuucuuuaugcaaauugccauccucaucaccacagucacccugcacuucaaacaguacgaguuuaacagcccuccgaauaaccagguuaugcuuugugaacccacaauuaucgagagaaauauuaccgaaaucguguaucugacaaacaccacgauugagaaggaaaucugcccuaaacccgcugaguaccggaauugguccaagccucagugugacauuaccggguucgcccccuuuucuaaagauaacagcauccgccucuccgcgggaggcgacaucugggugacaagagagccuuaugucucuugcgauccggacaaguguuaccaauucgcucuggggcagggaaccacacuuaauaacaugcauagcaauaacaccgugcgggaucgcacgcccuauagaacacugcucaugaaugaacugggcguuccuuuucaccuggggaccaaacaggugugcauugccugguccucuagcuccugucaugacggaaaggccuggcuccacgucugcaucacaggcgaugacaagaacgcuaccgccagcuucauuuacaauggccggcugguggauucuguuguguccuggagcaaagagauccuucgcacccaggaaucugagugugucugcauuaacgggacauguacgguggugaucaccgacggauccgcuagcggcaaggccgauacaaaaauccuguuuauugaggaagggaagaucguccauaccuccacacucucuggaagcgcgcaacacguugaggaaugcuccugcuaucccagauacccuggcgugcggugugugugccgcgacaacuggaaggggagcaauagacccauugucgauaucaacauuaaagaccacucuaucguguccagcuacguuuguucuggacuggugggcgacaccccgcggaagaaugauagcuccucuagcucccauugccuugacccuaacaaugaggaaggcgggcacggagucaaaggcugggccuucgaugacgggaacgauguguggaugggacgcacgaucaaugagacaagcagacugggcuaugagaccuuuaagguuauugaaggguggucuaaccccaaauccaagcuccagaucaaucgccaggugauugucgaccggggagauagaagcggcuacucuggcaucuucuccguggaggggaaaagcuguauuaaccggugcuuuuaugucgaacugaucagaggacgcaaggaggaaaccgaggugcuguggacauccaauucuauuguuguguucuguggcaccagcgggacauacggaacgggcuccuggccugacggggcugaucucaaccugaugcccaucuga

SEQ ID NO: 215980 - RNA, 1410 nt, Artificial Sequence
  derived and/or modified CDS sequence (opt5) from neuraminidase__InfluenzaA__AGW01418
augaaccccaaucagaagaucauuaccaucggcagcgugucccugacaauuucuacgaucugcuucuuuaugcaaauugccauccucaucaccacagucacccugcacuucaaacaguacgaguuuaacagcccuccgaauaaccagguuaugcuuugugaacccacaauuaucgagagaaauauuaccgaaaucguguaucugacaaacaccacgauugagaaggaaaucugcccuaaacccgcugaguaccggaauugguccaagccucagugugggauuaccggauucgcccccuuuucuaaagacaacagcauccgccucuccgcgggcggggauaucugggugacaagagagccuuaugucucuugcgacccggauaaguguuaccaauucgcucugggacagggcaccacacuuaauaacaugcauagcaauaacaccgugcgggaccgcacgcccuauagaacacugcucaugaaugaacuggggguuccuuuucaccugggaaccaaacaggugugcauugccugguccucuagcuccugucaugauggcaaggccuggcuccacgucugcaucacaggcgacgauaagaacgcuaccgccagcuucauuuacaaugggcggcugguggacucuguuguguccuggagcaaagagauccuucgcacccaggaaucugagugugucugcauuaacggaacauguacgguggugaugaccgauggcuccgcuagcgggaaggccgacacaaaaauccuguuuaucgaggaaggaaagauuguccauaccuccacacucucuggcagcgcgcaacacguugaggaaugcuccugcuaucccagauacccuggggugcggugugugugccgcgauaacuggaagggaagcaauagacccaucgucgacauuaacaucaaagaucacucuauuguguccagcuacguuuguucuggccuggugggcgacaccccgcggaagaaugacagcuccucuagcucccauugccuugauccuaacaaugaggaagggggacacggcgucaaagggugggccuucgacgauggaaacgacguguggaugggccgcacgaucaaugagacaagcagacugggguaugagaccuuuaagguuaucgaaggauggucuaaccccaaauccaagcuccagauuaaucgccaggugaucgucgaucggggcgacagaagcggcuacucugggauuuucuccguggagggaaaaagcuguaucaaccggugcuuuuaugucgaacugauuagaggccgcaaggaggaaaccggggugcuguggacauccaauucuaucguuguguucuguggaaccagcggcacauacgggacgggcuccuggccugauggagcugaccucaaccugaugcccauuuga

SEQ ID NO: 215981 - RNA, 1410 nt, Artificial Sequence; identical to SEQ ID NO: 214218
  derived and/or modified CDS sequence (opt5) from neuraminidase__InfluenzaA__AGW01430

SEQ ID NO: 215982 - RNA, 1410 nt, Artificial Sequence; identical to SEQ ID NO: 214218
  derived and/or modified CDS sequence (opt5) from neuraminidase__InfluenzaA__AGW01442

SEQ ID NO: 215983 - RNA, 1410 nt, Artificial Sequence; identical to SEQ ID NO: 214218
  derived and/or modified CDS sequence (opt5) from neuraminidase__InfluenzaA__AGW01454

SEQ ID NO: 215984 - RNA, 1410 nt, Artificial Sequence; identical to SEQ ID NO: 215943
  derived and/or modified CDS sequence (opt5) from neuraminidase__InfluenzaA__AGW01466

SEQ ID NO: 215985 - RNA, 1410 nt, Artificial Sequence; identical to SEQ ID NO: 214218
  derived and/or modified CDS sequence (opt5) from neuraminidase__InfluenzaA__AGW01478

SEQ ID NO: 215986 - RNA, 1410 nt, Artificial Sequence
  derived and/or modified CDS sequence (opt5) from neuraminidase__InfluenzaA__AGW01490
augaaccccaaucagaagaucauuaccaucagcuccgugucucugacaauuagcacgaucugcuucuuuaugcaaauugccauccucaucaccacagucacccugcacuucaaacaguacgaguuuaacuccccuccgaauaaccagguuaugcuuugugaacccacaauuaucgagagaaauauuaccgaaaucguguaucugacaaacaccacgauugagaaggaaaucugcccuaaacccgcugaguaccggaauuggucuaagccucaguguggcauuaccggguucgcccccuuuagcaaagacaacuccauccgccucucugcgggaggcgauaucugggugacaagagagccuuaugucagcugcgacccggauaaguguuaccaauucgcucuggggcagggaaccacacuuaauaacgugcauuccaauaacaccguucgggaccgcacgcccuauagaacacugcucaugaaugaacugggcgugccuuuucaccuggggaccaagcaggucugcauugccuggucuagcuccagcugucaugauggaaaagccuggcuccacgugugcaucacaggcgacgauaagaacgcuaccgccucuuucauuuacaauggccggcugguugacuccguggucagcuggucuaaagagauccuucgcacccaggaauccgagugugugugcauuaacgggacauguacgguggucaugaccgauggaagcgcuuccggcaaggccgacacaaaaauccuguuuaucgaggaagggaagauuguucauaccucuacacucagcggauccgcgcaacacguggaggaaugcagcugcuaucccagauacccuggcgugcggugugucugccgcgauaacuggaaggggucuaauagacccaucguggacauuaacaucaaagaucacuccauuguuagcucuuacguguguagcggacuggucggcgacaccccgcggaagaaugacuccucuagcuccagccauugccuugauccuaacaaugaggaaggcgggcacggagugaaaggcugggccuucgacgaugggaacgacguuuggaugggacgcacgaucaaugagacaucuagacugggcuaugagaccuuuaaggugaucgaagggugguccaacagcaaaucuaagcuccagauuaaucggcaggucaucguggaucgcggagacagauccggcuacagcggcauuuucuccgucgaggggaaaucuuguaucaaccggugcuuuuauguggaacugauuagaggacgcaaggaggaaaccgagguucuguggacaagcaauuccaucguggucuucuguggcaccucugggacauacggaacgggcagcuggcccgauggggcugaccucaaccugaugccuauuuga

SEQ ID NO: 215987 - RNA, 1410 nt, Artificial Sequence; identical to SEQ ID NO: 214218
  derived and/or modified CDS sequence (opt5) from neuraminidase__InfluenzaA__AGW01538

SEQ ID NO: 215988 - RNA, 1410 nt, Artificial Sequence; identical to SEQ ID NO: 215943
  derived and/or modified CDS sequence (opt5) from neuraminidase__InfluenzaA__AGW01562

SEQ ID NO: 215989 - RNA, 1410 nt, Artificial Sequence; identical to SEQ ID NO: 214218
  derived and/or modified CDS sequence (opt5) from neuraminidase__InfluenzaA__AGW01574

SEQ ID NO: 215990 - RNA, 1410 nt, Artificial Sequence; identical to SEQ ID NO: 214218
  derived and/or modified CDS sequence (opt5) from neuraminidase__InfluenzaA__AGW01586

SEQ ID NO: 215991 - RNA, 1410 nt, Artificial Sequence; identical to SEQ ID NO: 214218
  derived and/or modified CDS sequence (opt5) from neuraminidase__InfluenzaA__AGW01598

SEQ ID NO: 215992 - RNA, 1410 nt, Artificial Sequence; identical to SEQ ID NO: 215943
  derived and/or modified CDS sequence (opt5) from neuraminidase__InfluenzaA__AGW01610

SEQ ID NO: 215993 - RNA, 1410 nt, Artificial Sequence; identical to SEQ ID NO: 214218
  derived and/or modified CDS sequence (opt5) from neuraminidase__InfluenzaA__AGW01622

SEQ ID NO: 215994 - RNA, 1410 nt, Artificial Sequence; identical to SEQ ID NO: 214218
  derived and/or modified CDS sequence (opt5) from neuraminidase__InfluenzaA__AGW01634

SEQ ID NO: 215995 - RNA, 1410 nt, Artificial Sequence
  derived and/or modified CDS sequence (opt5) from neuraminidase__InfluenzaA__AGW01646
augaaccccaaucagaagaucauuaccaucggcagcgugucccugacaauuucuacgaucugcuucuuuaugcaaauugccauccucaucaccacagucacccugcacuucaaacaguacgaguuuaacagcccuccgaauaaccagguuaugcuuugugaacccacaauuaucgagagaaauauuaccgaaaucguguaucugacaaacaccacgauugagaaggaaaucugcccuaaacccgcugaguaccggaauugguccaagccucagugugggauuaccggauucgcccccuuuucuaaagacaacagcauccgccucuccgcgggcggggauaucugggugacaagagagccuuaugucucuugcgacccggauaaguguuaccaauucgcucugggacagggcaccacacuuaauaacgugcauagcaauaacaccguucgggaccgcacgcccuauagaacacugcucaugaaugaacugggggugccuuuucaccugggaaccaagcaggucugcauugccugguccucuagcuccugucaugauggcaaagccuggcuccacgugugcaucacaggcgacgauaagaacgcuaccgccagcuucauuuacaaugggcggcugguugacucuguggucuccuggagcaaagagauccuucgcacccaggaaucugagugugugugcauugauggaacauguacgguggucaugaccgacggcuccgcuagcgggaaggccgauacaaaaauccuguuuaucgaggaaggaaagauuguucauaccuccacacucucuggcagcgcgcaacacguggaggaaugcuccugcuaucccagauacccuggggugcggugugucugccgcgacaacuggaagggaagcaacagacccaucguggauauuaauaucaaagaccacucuauuguuuccagcuacguguguucuggccuggucggcgacaccccgcggaagaacgauagcuccucuagcucccauugccuugacccuaauaacgaggaagggggacacggcgugaaagggugggccuucgaugacggaaaugauguuuggaugggccgcacgaucaacgagacaagcagacugggguaugagaccuuuaaggugaucgaaggauggucuaaucccaaauccaagcuccagauuaaccggcaggucaucguggaccgcggcgauagaagcggcuacucugggauuuucuccgucgagggaaaaagcuguaucaaucggugcuuuuauguggaacugauuagaggccgcaaggaggaaaccgagguucuguggacauccaacucuaucguggucuucugugggaccagcggaacauacggcacgggguccuggccugacggcgcugaucucaaucugaugcccauuuga

SEQ ID NO: 215996 - RNA, 1410 nt, Artificial Sequence; identical to SEQ ID NO: 214218
  derived and/or modified CDS sequence (opt5) from neuraminidase__InfluenzaA__AGW01670

SEQ ID NO: 215997 - RNA, 1410 nt, Artificial Sequence; identical to SEQ ID NO: 214218
  derived and/or modified CDS sequence (opt5) from neuraminidase__InfluenzaA__AGW01682

SEQ ID NO: 215998 - RNA, 1410 nt, Artificial Sequence; identical to SEQ ID NO: 215955
  derived and/or modified CDS sequence (opt5) from neuraminidase__InfluenzaA__AGW01704

SEQ ID NO: 215999 - RNA, 1410 nt, Artificial Sequence
  derived and/or modified CDS sequence (opt5) from neuraminidase__InfluenzaA__AGW01716
augaaccccaaucagaagaucauuaccaucggcagcgugucccugacaauuucuacgaucugcuucuuuaugcaaauugccauccucaucaccacagucacccugcacuucaaacaguacgaguuuaacagcccuccgaauaaccagguuaugcuuugugaacccacaauuaucgagagaaauauuaccgaaaucguguaucugacaaacaccacgauugagaaggaaaucugcccuaaacccgcugaguaccggaauugguccaagccucagugugggauuaccggauucgcccccuuuucuaaagacaacagcauccgccucuccgcgggcggggauaucugggugacaagagagccuuaugucucuugcgacccggauaaguguuaccaauucgcucugggacagggcaccacacuuaauaacaugcauagcaauaacaccgugcgggaccgcacgcccuauagaacacugcucaugaaugaacuggggguuccuuuucaccugggaaccaaacaggugugcauugccugguccucuagcuccugucaugauggcaaggccuggcuccacgucugcaucacaggcgacgauaagaacgcuaccgccagcuucauuuacaaugggcggcugguggacucuguuguguccuggagcaaagagauccuucgcacccaggaaucugagugugucugcauuaacggaacauguacgguggugaugaccgauggcuccgcuagcgggaaggccgacacaaaaauccuguuuaucgaggaaggaaagauuguccauaccuccacacucucuggcagcgcgcaacacguugaggaaugcuccugcuaucccagauacccuggggugcggugugugugccgcgauaacuggaagggaagcaauagacccaucgucgacauuaacaucaaagaucacucuauuguguccagcuacguuuguucuggccuggugggcgacaccccgcggaagaaugacagcuccucuagcucccauugccuugauccuaacaaugaggaagggggacacggcgucaaagggugggccuucgacgauggaaacgacguguggaugggccgcacgaucaaugagacaagcagacugggguaugagaccuuuaagguuaucgaaggauggucuaaccccaaauccaagcuccagauuaaucgccaggugaucgucgaucggggcgacagaagcggcuacucugggauuuucuccguggagggacggagcuguaucaacagaugcuuuuaugucgaacugauucgcggccggaaagaggaaaccgaggugcuguggacauccaauucuaucguuguguucugugggaccagcggaacauacggcacgggguccuggccugauggcgcugaccucaaccugaugcccauuuga

SEQ ID NO: 216000 - RNA, 1410 nt, Artificial Sequence
  derived and/or modified CDS sequence (opt5) from neuraminidase__InfluenzaA__AGW01728
augaaccccaaucagaagaucauuaccaucggcagcgugucccugacaauuucuacgaucugcuucuuuaugcaaauugccauccucaucaccacagucacccugcacuucaaacaguacgaguuuaacagcccuccgaauaaccagguuaugcuuugugaacccacaauuaucgagagaaauauuaccgaaaucguguaucugacaaacaccacgauugagaaggaaaucugcccuaaacccgcugaguaccggaauugguccaagccucagugugggauuaccggauucgcccccuuuucuaaagacaacagcauccgccucuccgcgggcggggauaucugggugacaagagagccuuaugucucuugcgacccggauaaguguuaccaauucgcucugggacagggcaccacacuuaauaacaugcauagcaauaacaccgugcgggaccgcacgcccuauagaacacugcucaugaaugaacuggggguuccuuuucaccugggaaccaaacaggugugcauugccugguccucuagcuccugucaugauggcaaggccuggcuccacgucugcaucacaggcgacgauaagaacgcuaccgccagcuucauuuacaaugggcggcugguggacucuguuguguccuggagcaaagagauccuucgcacccaggaaucugagugugucugcauuaacggaacauguacgguggugaugaccgauggcuccgcuagcgggaaggccgacacaaaaauccuguuuaucgaggaaggaaagauuguccauaccuccacacucucuggcagcgcgcaacacguugaggaaugcuccugcuaucccagauacccuggggugcggugugugugccgcgauaacuggaagggaagcaauagacccaucgucgacauuaacaucaaagaucacucuauuguguccagcuacguuuguucuggccuggugggcgacaccccgcggaagaaugacagcuccucuagcucccauugccuugauccuaacaaugaggaagggggacacggcgucaaagggugggccuucgacgauggaaacgacguguggaugggccgcacgaucaaugagacaagcagacugggguaugagaccuuuaagguuaucgaaggauggucuaaccccaaauccaagcuccagauuaaucgccaggugaucgucgaucggggcgacagaagcggcuacucugggauuuucuccguggagggaaaaagcuguaucaaccggugcuuuuaugucgaacugauuagaggccgcaaggaggaaaccgaggugcuguggacauccaauucuguuguggucuucugugggaccagcggaacauacggcacgggguccuggccugauggcgcugaccucaaccugaugcccaucuga

SEQ ID NO: 216001 - RNA, 1410 nt, Artificial Sequence; identical to SEQ ID NO: 214218
  derived and/or modified CDS sequence (opt5) from neuraminidase__InfluenzaA__AGW01740

SEQ ID NO: 216002 - RNA, 1410 nt, Artificial Sequence
  derived and/or modified CDS sequence (opt5) from neuraminidase__InfluenzaA__AGW01752
augaaccccaaucagaagaucauuaccaucggcagcgugucccugacaauuucuacgaucugcuucuuuaugcaaauugccauccucaucaccacagucacccugcacuucaaacaguacgaguuuaacagcccuccgaauaaccagguuaugcuuugugaacccacaauuaucgagagaaauauuaccgaaaucguguaucugacaaacaccacgauugagaaggaaaucugcccuaaacccgcugaguaccggaauugguccaagccucagugugggauuaccggauucgcccccuuuucuaaagacaacagcauccgccucuccgcgggcggggauaucugggugacaagagagccuuaugucucuugcgacccggauaaguguuaccaauucgcucugggacagggcaccacacuuaauaacgugcauagcaauaacaccguucgggaccgcacgcccuauagaacacugcucaugaaugaacugggggugccuuuucaccugggaaccaagcaggucugcauugccugguccucuagcuccugucaugauggcaaagccuggcuccacgugugcaucacaggcgacgauaagaacgcuaccgccagcuucauuuacaaugggcggcugguugacucuguggucuccuggagcaaagagauccuucgcacccaggaaucugagugugugugcauuaacggaacauguacgguggucaugaccgauggcuccgcuagcgggaaggccgacacaaaaauccuguuuaucgaggaaggaaagauuguucauaccuccacacucucuggcagcgcgcaacacguggaggaaugcuccugcuaucccagauacccuggggugcggugugucugccgcgauaacuggaagggaagcaauagacccaucguggacauuaacaucaaagaucacucuauuguuuccagcuacguguguucuggccuggucggcgacaccccgcggaagaaugacagcuccucuagcucccauugccuugauccuaacaaugaggaagggggacacggcgugaaagggugggccuucgacgauggaaacgacguuuggaugggccgcacgaucaaugagacaagcagacugggguaugagaccuuuaaggugaucggaggcuggucuaaccccaaauccaagcuccagauuaaucggcaggucaucguggaucgcggcgacagaagcggguacucuggaauuuucuccgucgaaggcaaaagcuguaucaaccggugcuuuuauguggagcugauuagagggcgcaaggaagagaccgaaguucuguggacauccaauucuaucguggucuucuguggaaccagcggcacauacgggacgggcuccuggccugauggagcugaccucaaccugaugcccauuuga

SEQ ID NO: 216003 - RNA, 1410 nt, Artificial Sequence; identical to SEQ ID NO: 214218
  derived and/or modified CDS sequence (opt5) from neuraminidase__InfluenzaA__AGW01764

SEQ ID NO: 216004 - RNA, 1410 nt, Artificial Sequence; identical to SEQ ID NO: 215955
  derived and/or modified CDS sequence (opt5) from neuraminidase__InfluenzaA__AGW01776

SEQ ID NO: 216005 - RNA, 1410 nt, Artificial Sequence; identical to SEQ ID NO: 215943
  derived and/or modified CDS sequence (opt5) from neuraminidase__InfluenzaA__AGW01788

SEQ ID NO: 216006 - RNA, 1410 nt, Artificial Sequence; identical to SEQ ID NO: 215955
  derived and/or modified CDS sequence (opt5) from neuraminidase__InfluenzaA__AGW01800

SEQ ID NO: 216007 - RNA, 1410 nt, Artificial Sequence; identical to SEQ ID NO: 215943
  derived and/or modified CDS sequence (opt5) from neuraminidase__InfluenzaA__AGW01812

SEQ ID NO: 216008 - RNA, 1410 nt, Artificial Sequence; identical to SEQ ID NO: 215943
  derived and/or modified CDS sequence (opt5) from neuraminidase__InfluenzaA__AGW01824

SEQ ID NO: 216009 - RNA, 1410 nt, Artificial Sequence; identical to SEQ ID NO: 215966
  derived and/or modified CDS sequence (opt5) from neuraminidase__InfluenzaA__AGW01848

SEQ ID NO: 216010 - RNA, 1410 nt, Artificial Sequence
  derived and/or modified CDS sequence (opt5) from neuraminidase__InfluenzaA__AGW01860
augaaccccaaucagaagaucauuaccaucggcagcgugucccugacaauuucuacgaucugcuucuuuaugcaaauugccauccucaucaccacagucacccugcacuucaaacaguacgaguuuaacagccuuccuaauaaccagguuaugcugugugaaccgacaauuaucgagagaaauauuaccgaaaucguguaucucacaaacaccacgauugagaaggaaaucugccccaaaccugcugaguaccggaauugguccaagccccagugugggauuaccggauucgccccuuuuucuaaagacaacagcauccgccuguccgcgggcggggauaucugggugacaagagagcccuaugucucuugcgacccugauaaguguuaccaauucgcucuuggacagggcaccacacugaauaacgugcauagcaauaacaccguucgggaccgcacgccguauagaacacuccugaugaaugaacugggggugcccuuucaccucggaaccaagcaggucugcauugccugguccuccucuuccugucaugauggcaaagccuggcugcacgugugcaucacaggcgacgauaagaacgcuaccgccagcuucauuuacaaugggcggcuuguugacucuguggucuccuggagcaaagagauccugcgcacccaggaaucugagugugugugcauuaacggaacauguacgguggucaugaccgauggcuccgcuagcgggaaggccgacacaaaaauccucuuuaucgaggaaggaaagauuguucauaccuccacacugucuggcagcgcgcaacacguggaggaaugcuccugcuauccuagauaccccggggugcggugugucugccgcgauaacuggaagggaagcaauagaccuaucguggacauuaacaucaaagaucacucuauuguuuccagcuacguguguucuggccuugucggcgacacgccccggaagaaugacagcuccucuagcucccauugcuucgauccgaacaaugaggaagggggacacggcgugaaagggugggccuuugacgauggaaacgacguuuggaugggccgcaccaucaaugagacaagcagacugggguaugagaccuucaaggugaucggaggcuggucuaacccuaaauccaagcuccagauuaaucggcaggucaucguggaucgcggcgacagaagcggguacucuggaauuuuuagcgucgaaggcaaaagcuguaucaaccggugcuucuauguggagcugauuagagggcgcaaggaagagaccgaaguucuguggacauccaauucuaucauuguguucuguggaaccagcggcacauacgggacgggcuccuggcccgauggagcugaccucaaccugaugccuaucuga

SEQ ID NO: 216011 - RNA, 1410 nt, Artificial Sequence
  derived and/or modified CDS sequence (opt5) from neuraminidase__InfluenzaA__AGW01884
augaaccccaaucagaagaucauuaccaucggcagcgugucccugacaauuucuacgaucugcuucuuuaugcaaauugccauccucaucaccacagucacccugcacuucaaacaguacgaguuuaacagcccuccgaauaaccagguuaugcuuugugaacccacaauuaucgagagaaauauuaccaagaucguguaucugacaaacaccacgauugaaaaagagaucugcccuaagcccgcugaauaccggaauugguccaaaccucagugugggauuaccggauucgcccccuuuucuaaggacaacagcauccgccucuccgcgggcggggauaucugggugacaagagagccuuaugucucuugcgacccggauaaguguuaccaauucgcucugggacagggcaccacacuuaauaacgugcauagcaauaacaccguucgggaccgcacgcccuauagaacacugcucaugaaugagcugggggugccuuuucaccugggaaccaaacaggucugcauugccugguccucuagcuccugucaugauggcaaggccuggcuccacgugugcaucacaggcgacgauaaaaacgcuaccgccagcuucauuuacaaugggcggcugguugacucuguggucuccuggagcaaggaaauccuucgcacccaggagucugaaugugugugcauuaacggaacauguacgguggucaugaccgauggcuccgcuagcgggaaagccgacacaaagauccuguuuaucgaggagggaaagauuguucauaccuccacacucucuggcagcgcgcaacacguggaagagugcuccugcuaucccagauacccuggggugcggugugucugccgcgauaacuggaaaggaagcaauagacccaucguggacauuaacaucaaggaucacucuauuguuuccagcuacguguguucuggccuggucggcgacaccccgcggaaaaaugacagcuccucuagcucccauugccuugauccuaacaaugaagaagggggacacggcgugaaggggugggccuucgacgauggaaacgacguuuggaugggccgcacgaucaaugagacaagcagacugggguaugagaccuuuaaagugaucgagggauggucuaaccccaaguccaaacuccagauuaaucggcaggucaucguggaucgcggcgacagaagcggcuacucugggauuuucuccgucgaaggaaagagcuguaucaaccggugcuuuuauguggagcugauuagaggccgcaaggaagagaccgaaguucuguggacauccaauucuaucguggucuucugugggaccagcggaacauacggcacgggguccuggccugauggcgcugaccucaaccugaugcccauuuga

SEQ ID NO: 216012 - RNA, 1410 nt, Artificial Sequence; identical to SEQ ID NO: 214218
  derived and/or modified CDS sequence (opt5) from neuraminidase__InfluenzaA__AGW01896

SEQ ID NO: 216013 - RNA, 1410 nt, Artificial Sequence; identical to SEQ ID NO: 214218
  derived and/or modified CDS sequence (opt5) from neuraminidase__InfluenzaA__AGW01908

SEQ ID NO: 216014 - RNA, 1410 nt, Artificial Sequence; identical to SEQ ID NO: 214218
  derived and/or modified CDS sequence (opt5) from neuraminidase__InfluenzaA__AGW01920

SEQ ID NO: 216015 - RNA, 1410 nt, Artificial Sequence; identical to SEQ ID NO: 214218
  derived and/or modified CDS sequence (opt5) from neuraminidase__InfluenzaA__AGW01932

SEQ ID NO: 216016 - RNA, 1410 nt, Artificial Sequence
  derived and/or modified CDS sequence (opt5) from neuraminidase__InfluenzaA__AGW01944
augaaccccaaucagaagaucauuaccaucggcagcgugucccugacaauuucuacgaucugcuucuuuaugcaaauugccauccucaucaccacagucacccugcacuucaaacaguacgaguuuaacuucccuccgaauaaccagguuaugcuuugugaacccacaauuaucgagagaaauauuaccgaaaucguguaucugacaaacaccacgauugagaaggaaaucugcccuaaacccgcugaguaccggaauuggagcaagccucagugugggauuaccggauuugcccccuucuccaaagacaacucuauccgccucagcgcgggcggggauaucugggugacaagagagccuuaugucuccugcgacccggauaaguguuaccaauuugcucugggacagggcaccacacuuaauaacgugcauucuaauaacaccguucgggaccgcacgcccuauagaacacugcucaugaaugaacugggggugccuuuccaccugggaaccaagcaggucugcauugccuggagcuccagcucuugucaugauggcaaagccuggcuccacgugugcaucacaggcgacgauaagaacgcuaccgccuccuuuauuuacaaugggcggcugguugacagcguggucucuugguccaaagagauccuucgcacccaggaaagcgagugugugugcauuaacggaacauguacgguggucaugaccgauggcucugcuuccgggaaggccgacacaaaaauccuguucaucgaggaaggaaagauuguucauaccagcacacucuccggcucugcgcaacacguggaggaaugcagcugcuaucccagauacccuggggugcggugugucugccgcgauaacuggaagggauccaauagacccaucguggacauuaacaucaaagaucacagcauuguuucuuccuacguguguagcggccuggucggcgacaccccgcggaagaaugacucuagcuccucuagccauugccuugccccuaacaaugaggaagggggacacggcgugaaagggugggcuuuugaugacggaaacgauguuuggaugggccgcacgaucaaugagacauccagacugggguaugagaccuucaaggugaucgaaggauggagcaaccccaaaucuaagcuccagauuaaucggcaggucaucguggaccgcggcgauagauccggcuacagcgggaucuuuucugucgagggaaaauccuguauuaaccggugcuucuauguggaacugauuagaggccgcaaggaggaaaccgagguucuguggacaagcaauuccaucguggucuucugugggaccucuggaacauacggcacggggagcuggccugacggcgccgaucucaaccugaugcccauuuga

SEQ ID NO: 216017 - RNA, 1410 nt, Artificial Sequence; identical to SEQ ID NO: 214218
  derived and/or modified CDS sequence (opt5) from neuraminidase__InfluenzaA__AGW01956

SEQ ID NO: 216018 - RNA, 1410 nt, Artificial Sequence
  derived and/or modified CDS sequence (opt5) from neuraminidase__InfluenzaA__AGW01968
augaaccccaaucagaagaucauuaccaucggcagcgugucccugacaauuucuacgaucugcuucuuuaugcaaauugccauccucaucaccacagucacccugcacuucaaacaguacgaguuuaacagcccuccgaauaaccagguuaugcuuugugaacccacaauuaucgagagaaauauuaccgaaaucguguaucugacaaacaccacgauugagaaggaaaucugcccuaaacccgcugaguaccggaauugguccaagccucagugugacauuaccggguucgcccccuuuucuaaagauaacagcauccgccucuccgcgggaggcgacaucugggugacaagagagccuuaugucucuugcgauccggacaaguguuaccaauucgcucuggggcagggaaccacacuuaauaacgugcauagcaauaacaccauucgggaucgcacgcccuauagaacacugcucaugaaugaacugggcguuccuuuucaccuggggaccaaacaggugugcaucgccugguccucuagcuccugucaugacggaaaggccuggcuccacgucugcauuacaggcgaugacgagaacgcuaccgccagcuucaucuacaauggccggcugguggauucuguuguguccuggagcaaggaaauucuucgcacccaggagucugagugugucugcaucaacgggacauguacgguggugaugaccgacggauccgcuagcggcaaagccgauacaaagauccuguuuauugaagaggggaaaaucguccauaccuccacacucucuggaagcgcgcaacacguugaagagugcuccugcuaucccagauacccuggcgugcggugugugugccgcgacaacuggaaggggagcaauagacccauugucgauaucaacauuaaggaccacucuaucgugucccgguacguuuguagcggacuggugggcgacaccccgcgcaaaaaugauucuagcuccucuagccauugccuugacccuaacaaugaagagggcgggcacggagucaagggcugggccuucgaugacgggaacgauguguggaugggaagaacgaucaaugagacaucccggcugggcuaugaaaccuuuaaaguuauugagggguggagcaaccccaagucuaaacuccagaucaaucgccaggugauugucgacagaggagaucgguccggcuacagcggcaucuucucuguggaagggaaguccuguauuaacagaugcuuuuaugucgagcugauccgcggacggaaagaagagaccgaggugcuguggacaagcaauuccauuguuguguucuguggcaccucugggacauacggaacgggcagcuggccugacggggcugaucucaaccugaugcccaucuga

SEQ ID NO: 216019 - RNA, 1410 nt, Artificial Sequence; identical to SEQ ID NO: 215943
  derived and/or modified CDS sequence (opt5) from neuraminidase__InfluenzaA__AGW01980

SEQ ID NO: 216020 - RNA, 1410 nt, Artificial Sequence; identical to SEQ ID NO: 214218
  derived and/or modified CDS sequence (opt5) from neuraminidase__InfluenzaA__AGW01992

SEQ ID NO: 216021 - RNA, 1410 nt, Artificial Sequence; identical to SEQ ID NO: 214218
  derived and/or modified CDS sequence (opt5) from neuraminidase__InfluenzaA__AGW02004

SEQ ID NO: 216022 - RNA, 1410 nt, Artificial Sequence; identical to SEQ ID NO: 214218
  derived and/or modified CDS sequence (opt5) from neuraminidase__InfluenzaA__AGW02016

SEQ ID NO: 216023 - RNA, 1410 nt, Artificial Sequence; identical to SEQ ID NO: 214218
  derived and/or modified CDS sequence (opt5) from neuraminidase__InfluenzaA__AGW02040

SEQ ID NO: 216024 - RNA, 1410 nt, Artificial Sequence
  derived and/or modified CDS sequence (opt5) from neuraminidase__InfluenzaA__AGW02064
augaaccccaaucagaagaucauuaccaucggcagcgugucccugacaauuucuacgaucugcuucuuuaugcaaauugccauccucaucaccacagucacccugcacuucaaacaguacgaguuugacagcccuccgaacaaucagguuaugcuuugugaacccacaauuaucgagagaaacauuaccgaaaucguguaucugacaaauaccacgauugagaaggaaaucugcccuaaacccgcugaguaccggaacugguccaagccucagugugggauuaccggauucgcccccuuuucuaaagauaauagcauccgccucuccgcgggcggggacaucugggugacaagagagccuuaugucucuugcgauccggacaaguguuaccaauucgcucugggacagggcaccacacuuaacaaugugcauagcaacaauaccguucgggaucgcacgcccuauagaacacugcucaugaacgaacugggggugccuuuucaccugggaaccaagcaggucugcauugccugguccucuagcuccugucaugacggcaaagccuggcuccacgugugcaucacaggcgaugacaagaaugcuaccgccagcuucauuuacaacgggcggcugguugauucuguggucuccuggagcaaagagauccuucgcacccaggaaucugagugugugugcauuaauggaacauguacgguggucaugaccgacggcuccgcuagcgggaaggccgauacaaaaauccuguuuaucgaggaaggaaagauuguucauaccuccacacucucuggcagcgcgcaacacguggaggaaugcuccugcuaucccagauacccuggggugcggugugucugccgcgacaacuggaagggaagcaacagacccaucguggauauuaauaucaaagaccacucuauuguuuccagcuacguguguucuggccuggucggcgacaccccgcggaagaacgauagcuccucuagcgggcauugccuugacccuaauaacgaggaaggaggccacggggugaaaggaugggccuucgaugacggcaaugauguuuggauggggcgcacgaucaacgagacauccagacugggauaugagaccuuuaaggugaucgaaggcuggagcaaucccaaaucuaagcuccagauuaaccggcaggucaucguggaccgcggcgauagauccggguacagcggaauuuucucugucgagggcaaauccuguaucaaucggugcuuuuauguggaacugauuagagggcgcaaggaggaaaccgagguucuguggacaagcaacuccaucguggucuucuguggaaccucuggcacauacgggacgggcagcuggccugacggagcugaucucaaucugaugcccauuuga

SEQ ID NO: 216025 - RNA, 1410 nt, Artificial Sequence; identical to SEQ ID NO: 214218
  derived and/or modified CDS sequence (opt5) from neuraminidase__InfluenzaA__AGW02076

SEQ ID NO: 216026 - RNA, 1410 nt, Artificial Sequence; identical to SEQ ID NO: 214218
  derived and/or modified CDS sequence (opt5) from neuraminidase__InfluenzaA__AGW02088

SEQ ID NO: 216027 - RNA, 1410 nt, Artificial Sequence
  derived and/or modified CDS sequence (opt5) from neuraminidase__InfluenzaA__AGW02100
augaaccccaaucagaagaucauuaccaucggcagcgugucccugacaauuucuacgaucugcuucuuuaugcaaauugccauccucaucaccacagucacccugcacuucaaacaguacgagagcaacuccccuccgaauaaccagguuaugcuuugugaacccacaauuaucgagagaaauauuaccgaaaucguguaucugacaaacaccacgauugagaaggaaaucugcccuaaacccgcugaguaccggaauuggucuaagccucagugugggauuaccggauuugcccccuucagcaaagacaacuccauccgccucucugcgggcggggauaucugggugacaagagagccuuaugucagcugcgacccggauaaguguuaccaauuugcucugggacagggcaccacacuuaauaacgugcauuccaauaacaccguucgggaccgcacgcccuauagaacacugcucaugaaugaacugggggugccuuuccaccugggaaccaagcaggucugcauugccuggucuagcuccagcugucaugauggcaaagccuggcuccacgugugcaucacaggcgacgauaagaacgcuaccgccucuuuuauuuacaaugggcggcugguugacuccguggucagcuggucuaaagagauccuucgcacccaggaauccgagugugugugcauuaacggaacauguacgguggucaugaccgauggcagcgcuuccgggaaggccgacacaaaaauccuguucaucgaggaaggaaagauuguucauaccucuacacucagcggcuccgcgcaacacguggaggaaugcagcugcuaucccagauacccuggggugcggugugucugccgcgauaacuggaagggaucuaauagacccaucguggacauuaacaucaaagaucacuccauuguuagcucuuacguguguagcggccuggucggcgacaccccgcggaagaaugacuccucuagcuccagccauugccuugauccuaacaaugaggaagggggacacggcgugaaagggugggccuuugacgauggaaacgacguuuggaugggccgcacgaucaaugagacaucuagacugggguaugagaccuucaaggugaucgaaggaugguccaaccccaaaagcaagcuccagauuaaucggcaggucaucguggaucgcggcgacagaucuggcuacuccgggauuuuuagcgucgagggaaaauccuguaucaaccggugcuucuauguggaacugauuagaggccgcaaggaggaaaccgagguucuguggacaucuaauagcaucguggucuuuugugggaccuccggaacauacggcacggggucuuggccugauggcgcugaccucaaccugaugcccauuuga

SEQ ID NO: 216028 - RNA, 1410 nt, Artificial Sequence; identical to SEQ ID NO: 215955
  derived and/or modified CDS sequence (opt5) from neuraminidase__InfluenzaA__AGW02112

SEQ ID NO: 216029 - RNA, 1410 nt, Artificial Sequence
  derived and/or modified CDS sequence (opt5) from neuraminidase__InfluenzaA__AGW02124
augaaccccaaucagaagaucauuaccaucggcagcgugucccugacaauuucuacgaucugcuucuuuaugcaaauugccauccucaucaccacagucacccugcacuucaaacaguacgaguuuaacagcccuccgaauaaccagguuaugcuuugugaacccacaauuaucgagagaaauauuaccgaaaucguguaucugacaaacaccacgauugagaaggaaaucugcccuaaacccgcugaguaccggaauugguccaagccucagugugggauuaccggauucgcccccuuuucuaaagacaacagcauccgccucuccgcgggcggggauaucugggugacaagagagccuuaugucucuugcgacccggauaaguguuaccaauucgcucugggacagggcaccacacuuaauaacgugcauagcaauaacaccguuuccgaccggacgcccuaucgcacacugcucaugaaugaacugggggugccuuuucaccugggaaccaagcaggucugcauugccuggucuagcuccagcugucaugauggcaaagccuggcuccacgugugcaucacaggcgacgauaagaacgcuaccgccucuuucauuuacaaugggagacugguugacuccguggucagcuggucuaaagagauccuucggacccaggaauccgagugugugugcauuaacggaacauguacgguggucaugaccgauggcagcgcuuccgggaaggccgacacaaaaauccuguuuaucgaggaaggaaagauuguucauaccucuacacucagcggcuccgcgcaacacguggaggaaugcagcugcuauccccgcuacccuggggugagaugugucugccgggauaacuggaagggaucuaaucgccccaucguggacauuaacaucaaagaucacuccauuguuagcucuuacguguguagcggccuggucggcgacaccccgagaaagaaugacuccucuagcuccagccauugccuugauccuaacaaugaggaagggggacacggcgugaaagggugggccuucgacgauggaaacgacguuuggaugggccggacgaucaaugagacaucucgccugggguaugagaccuuuaaggugaucgaaggaugguccaaccccaaaagcaagcuccagauuaauagacaggucaucguggaucggggcgaccgcucuggcuacuccgggauuuucagcgucgagggaaaauccuguaucaacagaugcuuuuauguggaacugauucggggcagaaaggaggaaaccgagguucuguggacaucuaauagcaucguggucuucugugggaccuccggaacauacggcacggggucuuggccugauggcgcugaccucaaccugaugcccauuuga

SEQ ID NO: 216030 - RNA, 1410 nt, Artificial Sequence; identical to SEQ ID NO: 215943
  derived and/or modified CDS sequence (opt5) from neuraminidase__InfluenzaA__AGW02136

SEQ ID NO: 216031 - RNA, 1410 nt, Artificial Sequence; identical to SEQ ID NO: 215955
  derived and/or modified CDS sequence (opt5) from neuraminidase__InfluenzaA__AGW02148

SEQ ID NO: 216032 - RNA, 1410 nt, Artificial Sequence
  derived and/or modified CDS sequence (opt5) from neuraminidase__InfluenzaA__AGW02160
augaaccccaaucagaagaucauuaccaucggcagcgugucccugacaauuucuacgaucugcuucuuuaugcaaauugccauccucaucaccacagucacccugcacuucaaacaguacgaguuugacagcccuccgaacaaucagguuaugcuuugugaacccacaauuaucgagagaaacauuaccgaaaucguguaucugacaaauaccacgauugagaaggaaaucugcccuaaacccgcugaguaccggaacugguccaagccucagugugggauuaccggauucgcccccuuuucuaaagauaauagcauccgccucuccgcgggcggggacaucugggugacaagagagccuuaugucucuugcgauccggacaaguguuaccaauucgcucugggacagggcaccacacuuaacaaugugcauagcaacaauaccguucgggaucgcacgcccuauagaacacugcucaugaacgaacugggggugccuuuucaccugggaaccaagcaggucugcauugccugguccucuagcuccugucaugacggcaaagccuggcuccacgugugcaucacaggcgaugacaagaaugcuaccgccagcuucauuuacaacgggcggcugguugauucuguggucuccuggagcaaagagauccuucgcacccaggaaucugagugugugugcauuaauggaacauguacgguggucaugaccgacggcuccgcuagcgggaaggccgauacaaaaauccuguuuaucgaggaaggaaagauuguucauaccuccacacucucuggcagcgcgcaacacguggaggaaugcuccugcuaucccagauacccuggggugcggugugucugccgcgacaacuggaagggaagcaacagacccaucguggauauuaauaucaaagaccacucuauuguuuccagcuacguguguucuggccuggucggcgacaccccgcggaagaacgauagcuccucuagcucccauugccuugacccuaauaacgaggaagggggacacggcgugaaagggugggccuucgaugacggaaaugauguuuggaugggccgcacgaucaacgagacaagcagacugggguaugagaccuuuaaggugaucgaaggauggucuaaucccaaauccaagcuccagauuaaccggcaggucaucguggaccgcagcgauagaucuggcuacuccggcauuuucagcgucgaggggaaauccuguaucaaucggugcuuuuauguggaacugauuagaggacgcaaggaggaaaccgagguucuguggacaucuaacagcaucguggucuucuguggcaccuccgggacauacggaacgggcucuuggccugacggggcugaucucaaucugaugcccauuuga

SEQ ID NO: 216033 - RNA, 1410 nt, Artificial Sequence; identical to SEQ ID NO: 214218
  derived and/or modified CDS sequence (opt5) from neuraminidase__InfluenzaA__AGW02172

SEQ ID NO: 216034 - RNA, 1410 nt, Artificial Sequence; identical to SEQ ID NO: 214218
  derived and/or modified CDS sequence (opt5) from neuraminidase__InfluenzaA__AGW02184

SEQ ID NO: 216035 - RNA, 1410 nt, Artificial Sequence
  derived and/or modified CDS sequence (opt5) from neuraminidase__InfluenzaA__AGW02196
augaaccccaaucagaagaucauuaccaucggcagcgugucccugacaauuucuacgaucugcuucuuuaugcaaauugccauccucaucaccacagucacccugcacuucaaacaguacgaguuuaacagcccuccgaauaaccagguuaugcuuugugaacccacaauuaucgagagaaauauuaccgaaaucguguaucugauuaacacaaccaucgagaaggaaauuugcccuaaacccgcugaguaccggaauugguccaagccucagugugggaucacgggauucgcccccuuuucuaaagacaacagcauccgccucuccgcgggcggggauauuugggugaccagagagccuuaugucucuugcgacccguacaaguguuaucaauucgcucugggacagggcacaacccuuaauaacgugcauagcaauaacacaguucgggaucgcacccccuacagaacgcugcucaugaaugaacugggggugccuuuucaccugggaacaaagcaggucugcaucgccugguccucuagcuccugucaugacggcaaagccuggcuccacgugugcauuaccggcgaugacaagaacgcuacagccagcuucaucuauaaugggcggcugguugauucuguggucuccuggagcaaagagauucuucgcacccaggaaucugagugugugugcaucaacggaaccuguacaguggucaugacggacggcuccgcuagcgggaaggccgauaccaaaauccuguuuauugaggaaggaaagaucguucauacauccacccucucuggcagcgcgcaacacguggaggaaugcuccugcuaccccagauacccuggggugcggugugucugccgcgacaacuggaagggaagcaauagacccauuguggauaucaacauuaaagaccacucuaucguuuccagcuauguguguucuggccuggucggcgauacaccgcggaagaaugacagcuccucuagcucccauugccuugacccuaacaaugaggaagggggacacggcgugaaagggugggccuucgaugacggaaacgauguuuggaugggccgcaccaucaaugagacgagcagacugggguacgagacauuuaaggugauugaaggauggucuaaccccaaauccaagcuccagaucaaucggcaggucauuguggaccgcggcgauagaagcggcuauucugggaucuucuccgucgagggaaaaagcuguauuaaccggugcuuuuacguggaacugaucagaggccgcaaggaggaaaccgagguucuguggaccuccaauucuauuguggucuucugugggacaagcggaaccuauggcacaggguccuggccugacggcgcugaucucaaccugaugcccaucuga

SEQ ID NO: 216036 - RNA, 1410 nt, Artificial Sequence; identical to SEQ ID NO: 215447
  derived and/or modified CDS sequence (opt5) from neuraminidase__InfluenzaA__AGW04174

SEQ ID NO: 216037 - RNA, 1410 nt, Artificial Sequence
  derived and/or modified CDS sequence (opt5) from neuraminidase__InfluenzaA__AGW25784
augaaccccaaucagaagaucauuaccaucggcagcgugucccugauuaucgccacaauuugcuuccucaugcaaaucgcuauccuggucacgaccguuacacuucacuuuaaacaguacggguauaacucucugccuaauaaccaggugaugcucugugagccgaccauuaucgaaagaaauauuacagagaucguguaccugaccaacacaaccauugaaaaggagaucugccccaaacuugccgaauaucggaauuggagcaagccucaguguaaaauuacgggauucgcgcccuuuuccaaggacaacucuauccgccugagcgcuggcggggauaucugggucaccagagagccuuacguguccugcgaccccuauaaguguuaccaauucgcccucggacagggcacaacccugaauaacaaacauucuaaugauacaguucacgaccggaccccuuaucgcacgcugcucaugaacgagcugggggugccguuucaucuuggaacaaagcaggucugcauugccuggagcuccagcucuugucacgauggcaaggcuuggcugcauaucugcgugaccggccacgacgaaaaugccacagcuuccuucauuuacgaugggaaacucguugacagcaucggaucuugguccaaaaagauucugagaacccaggagagcgaaugugugugcaucaacggcaccuguacagucgugaugacggaugggucugccuccggacgggcggacaccaagauccuuuuuauugaggagggcaaaaucauucacaucagccaacuguccgggucugcccagcauguggaagagugcagcugcuacccccgcuauccuggaauuagaugugucugccgggauaauuggaagggcuccaaccgccccaucguugacaucaacgugaaagauuacagcauuacaucuuccuauguguguagcggccucgucggggacaccccuagaaagacagacaauucuagcuccucucacugccugaaccccaauaacgaagagggaggccauggggugaaaggaugggcuuucgaugacggcaaugauguuuggauggggcggaccaucagcgaaaaguuucgcuccggauacgagacguucaaagugauuaagggcuggagcaagccgaacucuaaacugcagaucaauagacaggucauuguggaccgggauaaccgcuccggcuauagcgggaucuuuucuguugagggaaaguccuguauuaauagaugcuucuacguggaacucauccggggcagaaaacgcgaggccgaagucugguggacaagcaacuccaucguggucuuuugugggaccucuggaaccuauggcacagggagcuggccugacggcgcugauauuaaucugaugcccaucuga

SEQ ID NO: 216038 - RNA, 1350 nt, Artificial Sequence
  derived and/or modified CDS sequence (opt5) from neuraminidase__InfluenzaA__AGW27062
augaaccccaaucagaagaucgugaccauuggcagcaucugcauggucauugggacaaucucccugaugcuccaaauuggaaacaucaucucuauuuggguuagccacuccauccagacgggcaaucagcaucagaccgagccuauuagaaacacaaauuuccugaccgaaaacgccguggcuucugugacacuugccgggaauagcucccuguguccgauccggggaugggcgguccacucuaaagacaacagcauucgcaucggcuccaagggggauguguuuguuauuagagagcccuucaucagcugcucucaucucgaaugucggaccuuuuuccugacacaaggagcccuucugaaugacaaacacuccaacggcaccgugaaggaucgcagcccucauagaacgcucaugucuugccccaucggcgaggcuccuucccccuacaauagccgguuugaaucugucgccugguccgcuagcgccugucacgacgggaccuccuggcuggugauuggaaucucuggcccugauaacggggcuguugccgugcugaaauauaauggaauuaucacagacaccauucgcagcuggagaaacaauauccuccggacacaggaguccgagugcgcgugugucaacggcagcugcuucaccgugaugacggaugggccgucuaacggacaggccuccuacaagaucuuuaagauugaaaaaggcaagguggucaaaagcguugagcugaaugcucccaacuaucacuacgaagaguguucuugcuauccugacgccggcgagaucacaugugugugccgcgauaauuggcaugggagcaacagacccuggguguccuucaaucagaaccuugaauaccaaauuggauauaucugcucuggcgucuuuggggacaauccucggcccaacgauggaaccggcagcugugggccgguguccagcaauggagcuuacggcguuaagggcuucucuuuuaaauacgggaacggaguguggauuggccgcacaaaguccacccacagcagaucuggguucgagaugaucugggacccuaauggauggaccggcacagauuccgaauuuagcaugaagcaggacaucgucgccauuacggacugguccggguauucuggcagcuucgugcagcaucccgagcugaccggacucgauugcauccggccuuguuucuggguugaacugauucgcggcagacccaaagaguccacaaucuggaccucugggagcuccauuagcuuuugcggagugaacucugacacagucuccuggagcuggcccgauggcgcggagcuuccuuucaccaucgacaaguga

SEQ ID NO: 216039 - RNA, 1410 nt, Artificial Sequence
  derived and/or modified CDS sequence (opt5) from neuraminidase__InfluenzaA__AGY14472
augaaccccaaucagaagaucauuaccaucggcagcguuucccugacacucgccacgauuugcuuccugaugcaaaucgcuauucuugucaccacaguuacccugcacuuuaaacaguacgaguguaacucuacaccuaauaaccaggugaugcucugcgaaccgaccgugaucgagagaaauaucacaaagauugucuaucugaccaacacgaccguggaaaaagagaucugucccaagccugccgaauaccggaauuggagcaaaccccagugcaagauuacaggguucgcgccuuuuuccaaggacaacucuauccgccuuagcgcuggaggcgauauuuggguuaccagagagcccuauguguccugugacccuaauaaaugcuaccaauucgcccuggggcagggaacaacccucaacaaucggcauucuaacgauacgguccacgaccgcacaccguauagaacccugcugaugaaugagcucggcauccccuuucaucuggggacaaaacagguguguauugccuggagcuccagcucuugccacgauggaaaggcuuggcuucauguuugugugaccggccacgacaagaacgccaccgcuuccuucaucuacgauggcaaacuggucgacagcaucgggucuugguccaagaagauucuccggacacaggaaagcgagugcguguguaucaauggaacgugcaccguggucaugacagauggcucugccuccgggcgcgcggacaccaaaauucuguuuaucgaagagggaaagauuauccacaucagccaacuuuccggcucugcccagcauguugaggaaugcagcuguuauccuagauaccccgggauucggugcgugugucgcgauaacuggaaaggauccaacagaccuaucguggacauuaaugucaaggauuacagcaucacaucuuccuaugugugcagcggccugguuggcgacacgccccggaaaaccgacaacucuagcuccucucacugucucaauccgaacaaugaggaagggggacauggcgugaaggggugggcuuucgaugacggaaacgaugucuggaugggccgcacaauuagcgagaaauuuagauccggguacgaaaccuucaaggugaucaagggauggagcaaaccuaauucuaagcugcagaucaaccggcagguuauuguggaccgcgauaauagauccggcuauagcggcaucuuuucugucgaggggaaauccugcauuaaccgguguuucuacguggagcugaucagaggacgcaagcgggaagccgaggucugguggaccagcaauuccauugugguguuuugcggcacaucugggaccuauggaacaggcagcuggcccgacggggcugauaucaaccucaugccuauuuga

SEQ ID NO: 216040 - RNA, 1398 nt, Artificial Sequence
  derived and/or modified CDS sequence (opt5) from neuraminidase__InfluenzaA__AHA11501
augaaccccaaucagaagauccugugcaccagcgccacagcuauuaucauuggcgccaucgcggugcucauugggaucgcuaaccugggacuuaauaucggccugcaccucaaaccuggguguaacugcucccauucucaaccggagacgaccaauacaagccagaccauuaucaacaauuacuauaacgaaacaaauauuaccaacauccagauggaggaaagaacaucccggaauuucaacaaucugaccaagggacuuuguacgauuaacucuuggcacaucuacggcaaagacaaugccguccgcauuggggagagcuccgauguucuggugaccagagaacccuaugugucuugcgacccugaugagugucgguuuuacgcccucagccagggaacaaccauccgcggcaagcauuccaacggcacaauccacgacagaagccaauaucgggcucugauuucuuggccccuguccagcccucccaccgucuacaacucucgcguggagugcaucgggugguccagcacgucuugucaugauggaaaauccagaaugagcauuugcaucuccggcccuaauaacaaugccucugcuguugugugguauaaccggcgcccggucgccgaaauuaauacaugggcgagaaacauccuccggacccaggagagcgaaugugugugccacaaugggguuugucccaucguguucacagacggauccgccaccggcccugcugauacccgcauuuacuacuuuaaggaggggaagauccuggagugggaaagccuuacaggaacggccaaacacauugaggaaugcucuugcuauggcgagagaaccggcaucacauguaccugccgggacaacuggcagggguccaaucgccccgucauucagaucgauccuguggcuaugacacauaccagccaauacaucuguucucccgugcugacggacacaccgagaccuaacgaucccaauauuggaaagugcaacgacccuuaucccggcaaugauaacaauggggucaaaggauucagcuaccucgacggcgccaacaccuggcuggggcggaccaucuccacagcgucuagaagcggauaugaaaugcuuaagguucccaacgcccugaccgacgaucgcuccaaaccuauucagggccagacaaucgugcucaaugcugacuggagcggcuacucuggguccuuuauggauuauugggccgagggagacuguuaccgggcuugcuucuacguggagcugauuagaggccgcccgaaggaagauaaggucugguggacgagcaacucuaucguguccauguguagcuccaccgaguuucuggggcaguggaauuggcccgacggagcccggauugaauauuuccucuga

SEQ ID NO: 216041 - RNA, 1410 nt, Artificial Sequence
  derived and/or modified CDS sequence (opt5) from neuraminidase__InfluenzaA__AHC57462
augaaccccaaucagaagaucauuaccaucggcagcgugucccugacaauuucuacgaucugcuucuuuaugcaaauugccauccucaucaccacagucacccugcacuucaaacaguacgaguuuaacagcccuccgaauaaccagguuaugcuuugugaacccacaauuaucgagagaaauauuaccgaaaucguguaucugacaaacaccacgauugagaaggaaaucugcccuaaacucgcugaguaccggaauugguccaagccccagugugacauuaccggguucgccccuuuuucuaaagauaacagcauccgccuguccgcgggaggcgacaucugggugacaagagagcccuaugucucuugcgauccugacaaguguuaccaauucgcucuugggcagggaaccacacugaauaacgugcauagcaauaacaccguucgggaucgcacgccguauagaacacuccugaugaaugaacugggcgugcccuuucaccucgggaccaagcaggucugcauugccugguccucuagcuccugucaugacggaaaagccuggcugcacgugugcaucacaggcgaugacaagaacgcuaccgccagcuucauuuacaauggccggcuuguugauucuguggucuccuggagcaaagagauccugcgcacccaggaaucugagugugugugcauuaacgggacauguacgguggucaugaccgacggauccgcuagcggcaaggccgauacaaaaauccucuuuaucgaggaagggaagauuguucauaccuccacacugucuggaagcgcgcaacacguggaggaaugcuccugcuauccuagauaccccggcgugcggugugucugccgcgacaacuggaaggggagcaauagaccuaucguggauauuaacaucaaagaccacucuauuguuuccagcuacguguguucuggacuugucggcgacacgccccggaagaaugauagcuccucuagcucccauugcugggacccgaacaaugaggaaggcgggcacggagugaaaggcugggccuucgaugacgggaacgauguuuggaugggacgcaccaucaaugagacaagcagacugggcuaugagaccuuuaaggugaucgaaggguggucuaacccuaaauccaagcuccaggucaaucgccaggugauugucgaccggggagauagaagcggcuacucuggcaucuucuccguggaggggaaaagcuguauuaaccggugcuuuuauguugaacugaucagaggacgcaaggaggaaaccgaggugcuguggacauccaauucuauugucguguucuguggcaccagcgggacauacggaacgggcuccuggcccgacggggcugaucucaaccugaugccuaucuga

SEQ ID NO: 216042 - RNA, 1410 nt, Artificial Sequence; identical to SEQ ID NO: 211590
  derived and/or modified CDS sequence (opt5) from neuraminidase__InfluenzaA__AHC57490

SEQ ID NO: 216043 - RNA, 1410 nt, Artificial Sequence
  derived and/or modified CDS sequence (opt5) from neuraminidase__InfluenzaA__AHC57514
augaaccccaaucagaagaucauuaccaucggcagcgugucccugacaauuucuacgaucugcuucuuuaugcaaauugccauccucaucaccacagucacccugcacuucaaacaguacgaguuuuauagcccuccgaacaaucagguuaugcuuugugaacccacaauuaucgagagaaacauuaccgaaaucguguaccugacaaauaccacgauugagaaggaaaucugcccuaaacucgcugaguaucggaacugguccaagccccagugugacauuaccggguucgccccuuuuucuaaagauaauagcauccgccuguccgcgggaggcgacaucugggugacaagagagcccuacgucucuugcgauccugacaaguguuaucaauucgcucuugggcagggaaccacacugaacaaugugcauagcaacaauaccguucgggaucgcacgccguacagaacacuccugaugaacgaacugggcgugcccuuucaccucgggaccaagcaggucugcauugccugguccucuagcuccugucaugacggaaaagccuggcugcacgugugcaucacaggcgaugacaagaaugcuaccgccagcuucauuuauaacggccggcuuguugauucuguggucuccuggagcaaagagauccugcgcacccaggaaucugagugugugugcauuaaugggacauguacgguggucaugaccgacggauccgcuagcggcaaggccgauacaaaaauccucuuuaucgaggaagggaagauuguucauaccuccacacugucuggaagcgcgcaacacguggaggaaugcuccugcuacccuagauaccccggcgugcggugugucugccgcgacaacuggaaggggagcaacagaccuaucguggauauuaauaucaaagaccacucuauuguuuccagcuauguguguucuggacuugucggcgacacgccccggaagaacgauagcuccucuagcucccauugccuggacccgaauaacgaggaaggcgggcacggagugaaaggcugggccuucgaugacgggaaugauguuuggaugggacgcaccaucaacgagacaagcagacucggcuacgagaccuuuaaggugaucgaaggguggucuaauccuaaauccaagcugcagauuaaccggcaggucaucguggaccgcggaaauagaagcggcuauucuggcauuuucuccgucgaggggaaaagcuguaucaaccggugcuuuuacguggaacugauuagaggacgcaaggaggaaaccgagguucucuggacauccaauucuaucguggucuucuguggcaccagcgggacauauggaacgggcuccuggcccgauggggcugaccugaaccuuaugccuauuuga

SEQ ID NO: 216044 - RNA, 1410 nt, Artificial Sequence; identical to SEQ ID NO: 216043
  derived and/or modified CDS sequence (opt5) from neuraminidase__InfluenzaA__AHC57526

SEQ ID NO: 216045 - RNA, 1410 nt, Artificial Sequence; identical to SEQ ID NO: 216043
  derived and/or modified CDS sequence (opt5) from neuraminidase__InfluenzaA__AHC57806

SEQ ID NO: 216046 - RNA, 1410 nt, Artificial Sequence; identical to SEQ ID NO: 216043
  derived and/or modified CDS sequence (opt5) from neuraminidase__InfluenzaA__AHC57818

SEQ ID NO: 216047 - RNA, 1410 nt, Artificial Sequence
  derived and/or modified CDS sequence (opt5) from neuraminidase__InfluenzaA__AHC57830
augaaccccaaucagaagaucauuaccaucggcagcgugucccugacaauuucuacgaucugcuucuuuaugcaaauugccauccucaucaccacagucacccugcacuucaaacaguacgaguuuaacagcccuccgaauaaccagguuaugcuuugugaacccacaauuaucgagagaaauauuaccgaaaucguguaucugacaaacaccacgauugagaaggaaaucugcccuaaacucgcugaguaccggaauugguccaagccccagugugacauuaccggguucgccccuuuuucuaaagauaacagcauccgccuguccgcgggaggcgacaucugggugacaagagagcccuaugucucuugcgauccuaauaaguguuaccaauucgcucuugggcagggaaccacacugaacaaugugcauagcaacaauaccguucgggaccgcacgccguauagaacacuccugaugaacgaacugggcgugcccuuucaccucgggaccaagcaggucugcauugccugguccucuagcuccugucaugauggaaaagccuggcugcacgugugcaucacaggcgacgauaagaaugcuaccgccagcuucauuuacaacggcaaacuuguugacucuguggucuccuggagcaaggagauccugcggacccaggaaucugagugugugugcauuaacgggacauguacgguggucaugaccgauggauccgcuagcggcaaagccgacacaaagauccucuuuaucgaggaagggaagauuguucauaccuccacacugucuggaagcgcgcaacacguggaggaaugcuccugcuauccucgcuaccccggcgugagaugugucugccgggauaauuggaaagggagcaaccgcccuaucguggacauuaauaucaaggaucacucuauuguuuccagcuacguguguucuggacuugucggcgacacccccagaaagaacgacagcuccucuagcucccauugccuggauccgaauaacgaggaaggcgggcacggagugaagggcugggccuucgacgaugggaaugacguuuggaugggacggacgaucaacgagacaagccgccucggcuaugagaccuuuaaagugaucgaaggguggucuaauccuaaguccaaacugcagauuaacagacaggucaucguggaucggggaaaucgcagcggcuacucuggcauuuucuccgucgaggggaaaagcuguaucaacagaugcuuuuauguggaacugauucggggaagaaaggaggaaaccgagguucucuggacauccaauucuaucguggucuucuguggcaccagcgggacauacggaacgggcuccuggcccgacggggcugaucugaaccuuaugccuauuuga

SEQ ID NO: 216048 - RNA, 1410 nt, Artificial Sequence; identical to SEQ ID NO: 216047
  derived and/or modified CDS sequence (opt5) from neuraminidase__InfluenzaA__AHC57971

SEQ ID NO: 216049 - RNA, 1410 nt, Artificial Sequence; identical to SEQ ID NO: 216043
  derived and/or modified CDS sequence (opt5) from neuraminidase__InfluenzaA__AHC57984

SEQ ID NO: 216050 - RNA, 1410 nt, Artificial Sequence
  derived and/or modified CDS sequence (opt5) from neuraminidase__InfluenzaA__AHC57996
augaaccccaaucagaagaucauuaccaucggcagcgugucccugacaauuucuacgaucugcuucuuuaugcaaauugccauccucaucaccacagucacccugcacuucaaacaguacgaguuuuauagcccuccgaacaaucagguuaugcuuugugaacccacaauuaucgagagaaacauuaccgaaaucguguaccugacaaauaccacgauugagaaggaaaucugcccuaaacucgcugaguaucggaacugguccaagccccagugugacauuaccggguucgccccuuuuucuaaagauaauagcauccgccuguccgcgggaggcgacaucugggugacaagagagcccuacgucucuugcgauccugacaaguguuaucaauucgcucuugggcagggaaccacacugaacaaugugcauagcaacaauaccguucgggaucgcacgccgcacagaacacuccugaugaacgaacugggcgugcccuuucaucucgggaccaagcaggucugcauugccugguccucuagcuccugucacgacggaaaagccuggcugcaugugugcaucacaggcgaugacaagaaugcuaccgccagcuucauuuacaacggccggcuuguugauucuguggucuccuggagcaaagagauccugcgcacccaggaaucugagugugugugcauuaaugggacauguacgguggucaugaccgacggauccgcuagcggcaaggccgauacaaaaauccucuuuaucgaggaagggaagauuguucacaccuccacacugucuggaagcgcgcaacacguggaggaaugcuccugcuauccuagauaccccggcgugcggugugucugccgcgacaacuggaaggggagcaacagaccuaucguggauauuaauaucaaagaccauucuauuguuuccagcuacguguguucuggacuugucggcgacacgccccggaagaacgauagcuccucuagcucccacugccuggacccgaauaacgaggaaggcgggcauggagugaaaggcugggccuucgaugacgggaaugauguuuggaugggacgcaccaucaacgagacaagcagacucggcuaugagaccuuuaaggugaucgaaggguggucuaauccuaaauccaagcugcagauuaaccggcaggucaucguggaccgcggaaauagaagcggcuacucuggcauuuucuccgucgaggggaaaagcuguaucaaccggugcuuuuauguggaacugauuagaggacgcaaggaggaaaccgagguucucuggacauccaauucuaucguggucuucuguggcaccagcgggacauacggaacgggcuccuggcccgauggggcugaccugaaccuuaugccuauuuga

SEQ ID NO: 216051 - RNA, 1410 nt, Artificial Sequence; identical to SEQ ID NO: 214994
  derived and/or modified CDS sequence (opt5) from neuraminidase__InfluenzaA__AHC58008

SEQ ID NO: 216052 - RNA, 1410 nt, Artificial Sequence; identical to SEQ ID NO: 211590
  derived and/or modified CDS sequence (opt5) from neuraminidase__InfluenzaA__AHC58020

SEQ ID NO: 216053 - RNA, 1410 nt, Artificial Sequence
  derived and/or modified CDS sequence (opt5) from neuraminidase__InfluenzaA__AHC58032
augaaccccaaucagaagaucauuaccaucggcagcgugucccugacaauuucuacgaucugcuucuuuaugcaaauugccauccucaucaccacagucacccugcacuucaaacaguacgaguuuaacagcccuccgaauaaccagguuaugcuuugugaacccacaauuaucgagagaaauauuaccgaaaucguguaucugacaaacaccacgauugagaaggaaaucugcccuaaacucgcugaguaccggaauugguccaagccccagugugacauuaccggguucgccccuuuuucuaaagauaacagcauccgccuguccgcgggaggcgacaucugggugacaagagagcccuaugucucuugcgauccuaauaaguguuaccaauucgcucuugggcagggaaccacacugaacaaugugcauagcaacaauaccguucgggaccgcacgccguauagaacacuccugaugaacgaacugggcgugcccuuucaccucgggaccaagcaggucugcauugccugguccucuagcuccugucaugauggaaaagccuggcugcacgugugcaucacaggcgacgauaagaaugcuaccgccagcuucauuuacaacggcaaacuuguugacucuguggucuccuggagcaaggagauccugcggacccaggaaucugagugugugugcauuaacgggacauguacgguggucaugaccgauggauccgcuagcggcaaagccgacacaaagauccucuuuaucgaggaagggaagauuguucauaccuccacacugucuggaagcgcgcaacacguggaggaaugcuccugcuauccucgcuaccccggcgugagaugugucugccgggauaauuggaaagggagcaaccgcccuaucguggacauuaauaucaaggaucacucuauuguuuccagcuacguguguucuggacuugucggcgacacccccagaaagaacgacagcuccucuagcucccauugccugaauccgaacaaugaggaaggcgggcacggagugaagggcugggccuucgaugacgggaacgauguuuggaugggacggacgaucaaugagacaagccgccucggcuaugagaccuuuaaagugaucgaaggguggucuaacccuaaguccaaacugcagauuaauagacaggucaucguggaccggggaaaccgcagcggcuacucuggcauuuucuccgucgaggggaaaagcuguaucaauagaugcuuuuauguggaacugauucggggaagaaaggaggaaaccgagguucucuggacauccaacucuaucguggucuucuguggcaccagcgggacauacggaacgggcuccuggcccgauggggcugaccugaaucuuaugccuauuuga

SEQ ID NO: 216054 - RNA, 1410 nt, Artificial Sequence; identical to SEQ ID NO: 214994
  derived and/or modified CDS sequence (opt5) from neuraminidase__InfluenzaA__AHC58053

SEQ ID NO: 216055 - RNA, 1410 nt, Artificial Sequence
  derived and/or modified CDS sequence (opt5) from neuraminidase__InfluenzaA__AHC58077
augaaccccaaucagaagaucauuaccaucggcagcgugucccugacaauuucuacgaucugcuucuuuaugcaaauugccauccucaucaccacagucacccugcacuucaaacaguacgaguuuuauagcccuccgaacaaucagguuaugcuuagagaacccacaauuaucgagcggaacauuaccgaaaucguguaccugacaaauaccacgaccgagaaggaaauuuguccuaaacucgcugaguaucgcaacugguccaagccccagugcgacaucacaggguucgccccuuuuucuaaagauaauagcauuagacuguccgcgggaggcgacaucugggugacccgggagcccuacgucucuugugauccugacaagugcuaucaauucgcucuugggcagggaacaacccugaacaaugugcauagcaacaauacgguucgcgauagaacaccguaccggacccuccugaugaacgaacugggcgugcccuuucaccucgggacaaagcaggucuguaucgccugguccucuagcuccugccaugacggaaaagccuggcugcacguguguauuaccggcgaugacaagaaugcuaccgccagcuucaucuauaacggccgccuuguugauucuguggucuccuggagcaaagagauucugagaacacaggaaucugagugcguguguaucaaugggacgugcaccguggucaugacagacggauccgcuagcggcaaggccgauaccaaaauucucuuuaucgaggaagggaagaucguucauacauccacccugucuggaagcgcgcaacacguggaggaauguuccugcuacccucgguaccccggcgugcgcugcgucuguagagacaacuggaaggggagcaaccggccuauuguggauaucaauauuaaagaccacucuaucguuuccagcuaugugugcucuggacuugucggcgacacgccccgcaagaacgauagcuccucuagcucccauugucuggacccgaauaacgaggaaggcgggcacggagugaaaggcugggccuucgaugacgggaaugauguuuggaugggaagaacaauuaacgagaccagccggcucggcuacgagaccuuuaaggugaucgaaggguggucuaauccuaaauccaagcugcagaucaaccgccaggucauuguggacagaggaaaucggagcggcuauucuggcaucuucuccgucgaggggaaaagcugcauuaacagauguuuuuacguggaacugauccgcggacggaaggaggaaacagagguucucuggaccuccaauucuauuguggucuucugcggcacaagcgggacguauggaaccggcuccuggcccgauggggcugaccugaaccuuaugccuaucuga

SEQ ID NO: 216056 - RNA, 1410 nt, Artificial Sequence; identical to SEQ ID NO: 216047
  derived and/or modified CDS sequence (opt5) from neuraminidase__InfluenzaA__AHC58089

SEQ ID NO: 216057 - RNA, 1410 nt, Artificial Sequence; identical to SEQ ID NO: 216043
  derived and/or modified CDS sequence (opt5) from neuraminidase__InfluenzaA__AHC58101

SEQ ID NO: 216058 - RNA, 1410 nt, Artificial Sequence
  derived and/or modified CDS sequence (opt5) from neuraminidase__InfluenzaA__AHC58113
augaaccccaaucagaagaucauuaccaucggcagcgugucccugacaauuucuacgaucugcuucuuuaugcaaauugccauccucaucaccacagucacccugcacuucaaacaguacgaguuuuauagcccuccgaacaaucagguuaugcuuugugaacccacaauuaucgagagaaacauuaccgaaaucguguaccugacaaauaccacgauugagaaggaaaucugcccuaaacucgcugaguaucggaacugguccaagccccagugugacauuaccggguucgccccuuuuucuaaagauaauagcauccgccuguccgcgggaggcgacaucugggugacaagagagcccuacgucucuugcgauccugacaaguguuaucaauucgcucuugggcagggaaccacacugaacaaugugcauagcaacaauaccguucgggaucgcacgccguacagaacacuccugaugaacgaacugggcgugcccuuucaccucgggaccaagcaggucugcauugccugguccagcagcuccugucaugacggaaaagccuggcugcacgugugcaucacaggcgaugacaagaaugcuaccgccagcuucauuuauaacggccggcuuguugauucuguggucuccuggagcaaaaagauccugcgcacccaggagucugaaugugugugcauuaaugggacauguacgguggucaugaccgacggauccgcuagcggcaaagccgauacaaagauccucuuuaucgaggaggggaagauuguucauaccuccacacugucuggaagcgcgcaacacguggaagagugcuccugcuacccuagauaccccggcgugcggugugucugccgcgacaacuggaaagggagcaacagaccuaucguggauauuaauaucaaggaccacucuauuguuuccagcuauguguguucuggacuugucggcgacacgccccggaaaaacgauagcuccucuagcucccauugccuggacccgaauaacgaagagggcgggcacggagugaagggcugggccuucgaugacgggaaugauguuuggaugggacgcaccaucaacgaaacaagcagacucggcuacgagaccuuuaaagugaucgagggguggucuaauccuaaguccaaacugcagauuaaccggcaggucaucguggaccgcggaaauagaagcggcuauucuggcauuuucuccgucgaagggaagucuuguaucaaccggugcuuuuacguggagcugauuagaggacgcaaggaagagaccgaaguucucuggacauccaauucuaucguggucuucuguggcaccagcgggacauauggaacgggcuccuggcccgauggggcugaccugaaccuuaugccuauuuga

SEQ ID NO: 216059 - RNA, 1410 nt, Artificial Sequence; identical to SEQ ID NO: 216043
  derived and/or modified CDS sequence (opt5) from neuraminidase__InfluenzaA__AHC58129

SEQ ID NO: 216060 - RNA, 1410 nt, Artificial Sequence; identical to SEQ ID NO: 216043
  derived and/or modified CDS sequence (opt5) from neuraminidase__InfluenzaA__AHC58153

SEQ ID NO: 216061 - RNA, 1410 nt, Artificial Sequence; identical to SEQ ID NO: 216043
  derived and/or modified CDS sequence (opt5) from neuraminidase__InfluenzaA__AHC58165

SEQ ID NO: 216062 - RNA, 1410 nt, Artificial Sequence; identical to SEQ ID NO: 216047
  derived and/or modified CDS sequence (opt5) from neuraminidase__InfluenzaA__AHC58177

SEQ ID NO: 216063 - RNA, 1410 nt, Artificial Sequence
  derived and/or modified CDS sequence (opt5) from neuraminidase__InfluenzaA__AHC58189
augaaccccaaucagaagaucauuaccaucggcagcgugucccugacaauuucuacgaucugcuucuuuaugcaaauugccauccucaucaccacagucacccugcacuucaaacaguacgaguuuaacagcccuccgaauaaccagguuaugcuuugugaacccacaauuaucgagagaaauauuaccgaaaucguguaucugacaaacaccacgauugagaaggaaaucugcccuaaacccgcugaguaccggaauugguccaagccucagugugacauuaccggguucgcccccuuuucuaaagauaacagcauccgccucuccgcgggaggcgacaucugggugacaagagagccuuaugucucuugcgauccggacaaguguuaccaauucgcucuggggcagggaaccacacuuaauaacgugcauagcaauaacaccguucgggaucgcacgcccuauagaacacugcucaugaaugaacugggcgugccuuuucaccuggggaccaagcaggucugcauugccugguccucuagcuccugucaugacggaaaagccuggcuccacgugugcaucacaggcgaugacaagaacgcuaccgccagcuucauuuacaauggccggcugguugauucuguggucuccuggagcaaagagauccuucgcacccaggaaucugagugugugugcauuaacgggacauguacgguggucaugaccgacggauccgcuagcggcaaggccgauacaaaaauccuguuuaucgaggaagggaagauuguucauaccuccacacucucuggaagcgcgcaacacguggaggaaugcuccugcuaucccagauacccuggcgugcggugugucugccgcgacaacuggaaggggagcaauagacccaucguggauauuaacaucaaagaccacucuauuguuuccagcuacguguguucuggacuggucggcgacaccccgcggaagaaugauagcuccucuagcucccauugccuugacccuaacaaugaggaaggcgggcacggagugaaaggcugggccuucgaugacgggaacgauguuuggaugggacgcacgaucaaugagaugagcagacugggcuaugagacauuuaaggugaucgaaggguggucuaaccccaaauccaagcuccagauuaaucggcaggucaucguggaccgcggagauagaagcggcuacucuggcauuuucuccgucgaggggaaaagcuguaucaaccggugcuuuuauguggaacugauuagaggacgcaaggaggaaaccgagguucuguggaccuccaauucuaucguggucuucuguggcacaagcgggaccuacggaacaggcuccuggccugacggggcugaucucaaccugaugcccauuuga

SEQ ID NO: 216064 - RNA, 1410 nt, Artificial Sequence; identical to SEQ ID NO: 216043
  derived and/or modified CDS sequence (opt5) from neuraminidase__InfluenzaA__AHC58201

SEQ ID NO: 216065 - RNA, 1410 nt, Artificial Sequence
  derived and/or modified CDS sequence (opt5) from neuraminidase__InfluenzaA__AHC58225
augaaccccaaucagaagaucauuaccaucggcagcgugucccugacaauuucuacgaucugcuucuuuaugcaaauugccauccucaucaccacagucacccugcacuucaaacaguacgaguuuaacagcccuccgaauaaccagguuaugcuuugugaacccacaauuaucgagagaaauauuaccgaaaucguguaucugacaaacaccacgauugagaaggaaaucugcccuaaacccgcugaguaccggaauugguccaagccucagugugacauuaccggguucgcccccuuuucuaaagauaacagcauccgccucuccgcgggaggcgacaucugggugacaagagagccuuaugucucuugcgauccggacaaguguuaccaauucgcucuggggcagggaaccacacuuaauaacgugcauagcaauaacaccguucgggaucgcacgcccuauagaacacugcucaugaaugaacugggcgugccuuuucaccuggggaccaagcaggucugcauugccugguccucuagcuccugucaugacggaaaagccuggcuccacgugugcaucacaggcgaugacaagaacgcuaccgccagcuucauuuacaauggccggcugguugauucuguggucuccuggagcaaagagauccuucgcacccaggaaucugagugugugugcauuaacgggacauguacgguggucaugaccgacggauccgcuagcggcaaggccgauacaaaaauccuguuuaucgaggaagggaagauuguucauaccuccacacucucuggaagcgcgcaacacguggaggaaugcuccugcuaucccagauacccuggcgugcggugugucugccgcgacaacuggaaggggagcaauagacccaucguggauauuaacaucaaagaccacucuauuguuuccagcuacguguguucuggacuggucggcgacaccccgcggaagaaugauagcuccucuagcucccauugccuugacccuaacaaugaggaaggcgggcacggagugaaaggcugggccuucgaugacgggaacgauguuuggaugggacgcacgaucaaugagacaagcagacugggcuaugagaccuuuaaggugaucgaaggguggucuaaccccaaauccaagcuccagauuaaucggcaggucaucgugaaccgcggagacagaagcggcuacucuggcauuuucuccgucgaggggaaaagcuguaucaaucggugcuuuuauguggaacugauuagaggacgcaaggaggaaaccgagguucuguggacauccaacucuaucguggucuucuguggcaccagcgggacauacggaacgggcuccuggccugauggggcugaccucaaucugaugcccauuuga

SEQ ID NO: 216066 - RNA, 1410 nt, Artificial Sequence; identical to SEQ ID NO: 216047
  derived and/or modified CDS sequence (opt5) from neuraminidase__InfluenzaA__AHC58237

SEQ ID NO: 216067 - RNA, 1410 nt, Artificial Sequence; identical to SEQ ID NO: 216043
  derived and/or modified CDS sequence (opt5) from neuraminidase__InfluenzaA__AHC58249

SEQ ID NO: 216068 - RNA, 1410 nt, Artificial Sequence; identical to SEQ ID NO: 211590
  derived and/or modified CDS sequence (opt5) from neuraminidase__InfluenzaA__AHC58273

SEQ ID NO: 216069 - RNA, 1410 nt, Artificial Sequence; identical to SEQ ID NO: 216047
  derived and/or modified CDS sequence (opt5) from neuraminidase__InfluenzaA__AHC58363

SEQ ID NO: 216070 - RNA, 1410 nt, Artificial Sequence; identical to SEQ ID NO: 214994
  derived and/or modified CDS sequence (opt5) from neuraminidase__InfluenzaA__AHC58375

SEQ ID NO: 216071 - RNA, 1410 nt, Artificial Sequence; identical to SEQ ID NO: 216047
  derived and/or modified CDS sequence (opt5) from neuraminidase__InfluenzaA__AHC58387

SEQ ID NO: 216072 - RNA, 1410 nt, Artificial Sequence; identical to SEQ ID NO: 216047
  derived and/or modified CDS sequence (opt5) from neuraminidase__InfluenzaA__AHC58399

SEQ ID NO: 216073 - RNA, 1410 nt, Artificial Sequence; identical to SEQ ID NO: 216043
  derived and/or modified CDS sequence (opt5) from neuraminidase__InfluenzaA__AHC58411

SEQ ID NO: 216074 - RNA, 1410 nt, Artificial Sequence; identical to SEQ ID NO: 214994
  derived and/or modified CDS sequence (opt5) from neuraminidase__InfluenzaA__AHC58423

SEQ ID NO: 216075 - RNA, 1410 nt, Artificial Sequence; identical to SEQ ID NO: 216047
  derived and/or modified CDS sequence (opt5) from neuraminidase__InfluenzaA__AHC58459

SEQ ID NO: 216076 - RNA, 1410 nt, Artificial Sequence
  derived and/or modified CDS sequence (opt5) from neuraminidase__InfluenzaA__AHC58471
augaaccccaaucagaagaucauuaccaucggcagcgugugcaugacaauugggauggccaaccugauccuccaaauuggaaauaucaucuccauuuggaucucucacagcauucagcugggcaaccagaaucagaucgagacguguaaccaauccgucauuaccuacgaaaauaacacauggguuaaucagaccuaugugaacaucucuaauacaaacuucgcugccgggcagccuguggucagcgugaaacuugcgggaaauuccucucugugcccgguuagcggcugggcuauuuacuccaaggacaacagcaucagaaucgggucuaaaggagauguguuugucauucgggagcccuucaucuccuguagcccucucgaaugccgcaccuuuuuccugacacagggcgcccuucugaaugacaagcauucuaacggcaccauuaaagauagaucccccuaucggacgcucaugagcuguccuaucggggaggugcccucuccuuacaacucccgcuuugaaagcguugccugguccgcuucugccugccacgacggaauuaauuggcugaccaucggcaucagcgggccggauaacggagcuguggccguccugaaguauaauggcauuaucacagacaccauuaaguccuggagaaacaauauccuccggacacaagagagcgagugugcgugcgugaacgggucuuguuucaccgugaugacggauggacccuccgacggccaggccagcuacaaaauuuuucgcaucgaaaagggcaaaaucgucaagucuguugagaugaaugcuccuaacuaucauuacgaagagugcagcuguuaccccgauuccucugagauuacaugcgugugcagagacaauuggcacggggccaaccggccuugggugagcuucaaucagaaccuggaauaucagaucggauacauuuguuccggcgucuuuggggauaauccccgcccgaacgacaaaaccggaagcugcggcccugugucuuccaauggggcuaacggaguuaagggcuucagcuuuaaguauggcaacgggguguggaucggaagaacaaaaucuauuuccagccggaauggcuucgagaugaucugggaucccaacggguggaccggaaccgacaauaacuuuuccauuaagcaagacaucgucggcaucaaugaauggucuggguacagcggcuccuucgugcagcauccugagcuuacaggacuggauuguauucgccccugcuucuggguugaacucaucagaggccggcccaaagagaacacgauuuggaccucugggagcuccaucagcuuuuguggagucaauucugacacagugggcugguccuggccugauggggccgagcugccguucaccauugacaaguga

SEQ ID NO: 216077 - RNA, 1410 nt, Artificial Sequence; identical to SEQ ID NO: 216043
  derived and/or modified CDS sequence (opt5) from neuraminidase__InfluenzaA__AHC58482

SEQ ID NO: 216078 - RNA, 1410 nt, Artificial Sequence; identical to SEQ ID NO: 216047
  derived and/or modified CDS sequence (opt5) from neuraminidase__InfluenzaA__AHC58494

SEQ ID NO: 216079 - RNA, 1410 nt, Artificial Sequence
  derived and/or modified CDS sequence (opt5) from neuraminidase__InfluenzaA__AHC58518
augaaccccaaucagaagaucauuaccaucggcagcgugucccugacaauuucuacgaucugcuucuuuaugcaagucgccauucucaucaccacaguuacccugcacuucaaacaguacgaguuuaacagcccuccgaauaaccaggugaugcuuugugaacccacaaucauugagagaaauaucaccgaaauuguguaucugacaaacaccacgaucgagaaggaaauuugcccuaaacucgcugaguaccggaauugguccaagccccagugugacaucaccggguucgccccuuuuucuaaagauaacagcauucgccuguccgcgggaggcgacaucugggucacaagagagcccuaugugucuugcgauccugacaaguguuaccaauucgcucuugggcagggaaccacacugaauaacguucauagcaauaacaccgugcgggaucgcacgccguauagaacacuccugaugaaugaacugggcguccccuuucaccucgggaccaaacaggugugcaucgccugguccagcagcuccugucaugacggaaaagccuggcugcacguuugcauuacaggcgaugacaagaacgcuaccgccagcuucaucuacaauggcaaacuuguggauucugucguguccuggagcaaggagauucugcggacccaggaaucugagugugugugcaucaacgggacauguacggucguuaugaccgacggauccgcuagcggcaaagccgauacaaagauucucuuuaucgaggaagggaagaucgugcauaccuccacacugucuggaagcgcgcaacacguggaggaaugcuccugcuauccucgcuaccccggcgucagaugugugugccgggacaacuggaaagggagcaaucgcccuauuguugauaucaacauuaaggaccacucuaucguguccagcuacgucuguucuggacuugugggcgacacccccagaaagaaugauagcuccucuagcucccauugccuggacccgaacaaugaggaaggcgggcacggaguuaagggcugggccuucgaugacgggaacgauguguggaugggacggacgauuaaugagacaagccgccucggcuaugagaccuuuaaagucaucgaaggguggucuaacccuaaguccaaacugcagaucaauagacaggugauugucgaccggggaaaccgcagcggcuacucuggcaucuucuccguggaggggaagucuuguauuaauagaugcuuuuauguugaacugauccggggaagaaaggaggaaaccgaggugcucuggacauccaacucuauugucguguucuguggcaccagcgggacauacggaacgggcuccuggcccgauggggcugaccugaaucuuaugccuaucuga

SEQ ID NO: 216080 - RNA, 1410 nt, Artificial Sequence; identical to SEQ ID NO: 216043
  derived and/or modified CDS sequence (opt5) from neuraminidase__InfluenzaA__AHC58530

SEQ ID NO: 216081 - RNA, 1410 nt, Artificial Sequence; identical to SEQ ID NO: 216043
  derived and/or modified CDS sequence (opt5) from neuraminidase__InfluenzaA__AHC58554

SEQ ID NO: 216082 - RNA, 1410 nt, Artificial Sequence; identical to SEQ ID NO: 216043
  derived and/or modified CDS sequence (opt5) from neuraminidase__InfluenzaA__AHC58566

SEQ ID NO: 216083 - RNA, 1410 nt, Artificial Sequence
  derived and/or modified CDS sequence (opt5) from neuraminidase__InfluenzaA__AHC58578
augaaccccaaucagaagaucauuaccaucggcagcgugucccugacagucucuacgauuugcuucuuuaugcaaaucgccauucucaucaccacaguuacccugcacuucaaacaguacgaguuuuauagcccuccgaacaaucaggugaugcuuugugaacccacaaucauugagagaaacaucaccgaaauuguguaccugacaaauaccacgaucgagaaggaaauuugcccuaaacucgcugaguaucggaacugguccaagccccagugugacaucaccggguucgccccuuuuucuaaagauaauagcauucgccuguccgcgggaggcgacaucugggucacaagagagcccuacgugucuugcgauccugacaaguguuaucaauucgcucuugggcagggaaccacacugaacaauguucauagcaacaauaccgugcgggaucgcacgccguacagaacacuccugaugaacgaacugggcguccccuuucaccucgggaccaaacaggugugcaucgccugguccucuagcuccugucaugacggaaaggccuggcugcacguuugcauuacaggcgaugacaagaaugcuaccgccagcuucaucuauaacggccggcuuguggauucugucguguccuggagcaaagagauucugcgcacccaggaaucugagugugugugcaucaaugggacauguacggucguuaugaccgacggauccgcuagcggcaaggccgauacaaaaauucucuuuaucgaggaagggaagaucgugcauaccuccacacugucuggaagcgcgcaacacguggaggaaugcuccugcuacccuagauaccccggcguccggugugugugccgcgacaacuggaaggggagcaacagaccuauuguugauaucaauauuaaagaccacucuaucguguccagcuaugucuguucuggacuugugggcgacacgccccggaagaacgauagcuccucuagcucccauugccuggacccgaauaacgaggaaggcgggcacggaguuaaaggcugggccuucgaugacgggaaugauguguggaugggacgcaccauuaacgagacaagcagacucggcuacgagaccuuuaaggucaucgaaggguggucuaauccuaaauccaagcugcagaucaaccgccaggugauugucgaccggggaaauagaagcggcuauucuggcaucuucuccguggaggggaaaagcuguauuaaccggugcuuuuacguugaacugaucagaggacgcaaggaggaaaccgaggugcucuggacauccaauucuauugucguguucuguggcaccagcgggacauauggaacgggcuccuggcccgauggggcugaccugaaccuuaugccuaucuga

SEQ ID NO: 216084 - RNA, 1410 nt, Artificial Sequence; identical to SEQ ID NO: 211590
  derived and/or modified CDS sequence (opt5) from neuraminidase__InfluenzaA__AHC58590

SEQ ID NO: 216085 - RNA, 1410 nt, Artificial Sequence; identical to SEQ ID NO: 216079
  derived and/or modified CDS sequence (opt5) from neuraminidase__InfluenzaA__AHC58602

SEQ ID NO: 216086 - RNA, 1410 nt, Artificial Sequence; identical to SEQ ID NO: 216043
  derived and/or modified CDS sequence (opt5) from neuraminidase__InfluenzaA__AHC58614

SEQ ID NO: 216087 - RNA, 1410 nt, Artificial Sequence; identical to SEQ ID NO: 216043
  derived and/or modified CDS sequence (opt5) from neuraminidase__InfluenzaA__AHC58626

SEQ ID NO: 216088 - RNA, 1410 nt, Artificial Sequence; identical to SEQ ID NO: 216043
  derived and/or modified CDS sequence (opt5) from neuraminidase__InfluenzaA__AHC58638

SEQ ID NO: 216089 - RNA, 1410 nt, Artificial Sequence; identical to SEQ ID NO: 216043
  derived and/or modified CDS sequence (opt5) from neuraminidase__InfluenzaA__AHC58650

SEQ ID NO: 216090 - RNA, 1410 nt, Artificial Sequence
  derived and/or modified CDS sequence (opt5) from neuraminidase__InfluenzaA__AHC58662
augaaccccaaucagaagaucauuaccaucggcagcgugucccugacaauuucuacgaucugcuucuuuaugcaaaccgccauucucaucacaaccgucacacugcacuucaaacaguacgaguuuaacagcccuccgaauaaccagguuaugcuuugugaacccaccaucauugagagaaauaucacagaaauuguguaucugaccaacacgaccaucgagaaggaaauuugcccuaaacucgcugaguaccggaauugguccaagccccagugugacaucacaggguucgccccuuuuucuaaagauaacagcauucgccuguccgcgggaggcgacaucugggugaccagagagcccuaugucucuugcgauccugacaaguguuaccaauucgcucuugggcagggaacaacccugaauaacgugcauagcaauaacacgguucgggaucgcacaccguauagaacccuccugaugaaugaacugggcgugcccuuucaccucgggacaaagcaggucugcaucgccugguccucuagcuccugucaugacggaaaagccuggcugcacgugugcauuaccggcgaugacaagaacgcuaccgccagcuucaucuacaauggcaaacuuguugauucuguggucuccuggagcaaggagauucugcggacacaggaaucugagugugugugcaucaacgggacguguaccguggucaugacagacggauccgcuagcggcaaagccgauaccaagauucucuuuaucgaggaagggaagaucguucauacauccacccugucuggaagcgcgcaacacguggaggaaugcuccugcuauccucgcuaccccggcgugagaugugucugccgggacaacuggaaagggagcaaucgcccuauuguggauaucaacauuaaggaccacucuaucguuuccagcuacguguguucuggacuugucggcgacacgcccagaaagaaugauagcuccucuagcucccauugccuggacccgaacaaugaggaaggcgggcacggagugaagggcugggccuucgaugacgggaacgauguuuggaugggacggacaauuaaugagaccagccgccucggcuaugagaccuuuaaagugaucgaaggguggucuaacccuaaguccaaacugcagaucaauagacaggucauuguggaccggggaaaccgcagcggcuacucuggcaucuucuccgucgaggggaaaagcuguauuaauagaugcuuuuauguggaacugauccggggaagaaaggaggaaacagagguucucuggaccuccaacucuauuguggucuucuguggcacaagcgggacguacggaaccggcuccuggcccgauggggcugaccugaaucuuaugccuaucuga

SEQ ID NO: 216091 - RNA, 1410 nt, Artificial Sequence
  derived and/or modified CDS sequence (opt5) from neuraminidase__InfluenzaA__AHC58686
augaaccccaaucagaagaucauuaccaucggcagcgugucccugacaauuucuacgaucugcuucuuuaugcaaauugccauccucaucaccacagucacccugcacuucaaacaguacgaguuuaacagcccuccgaauaaccagguugugcuuugugaacccacaauuaucgagagaaauauuaccgaaaucguguaucugacaaacaccacgauugagaaggaaaucugcccuaaacccgcugaguaccggaauugguccaagccucagugugacauuaccggguucgcccccuuuucuaaagauaacagcauccgccucuccgcgggaggcgacaucugggucacaagagagccuuaugugucuugcgauccggacaaguguuaccaauucgcucuggggcagggaaccacacuuaauaacguucauagcaauaacaccgugcgggaucgcacgcccuauagaacacugcucaugaaugaacugggcgucccuuuucaccuggggaccaaacaggugugcauugccugguccucuagcuccugucaugacggaaaggccuggcuccacguuugcaucacaggcgaugacaagaacgcuaccgccagcuucauuuacaauggccggcugguggauucugucguguccuggagcaaagagauccuucgcacccaggaaucugagugugugugcauuaacgggacauguacggucguuaugaccgacggauccgcuagcggcaaggccgauacaaaaauccuguuuaucgaggaagggaagauugugcauaccuccacacucucuggaagcgcgcaacacguggaggaaugcuccugcuaucccagauacccuggcguccggugugugugccgcgacaacuggaaggggagcaauagacccaucguugauauuaacaucaaagaccacucuauuguguccagcuacgucuguucuggacuggugggcgacaccccgcggaagaaugauagcuccucuagcucccauugccuugacccuaacaaugaggaaggcgggcacggaguuaaaggcugggccuucgaugacgggaacgauguguggaugggacgcacgaucaaugagacaagcagacugggcuaugagaccuuuaaggucaucgaaggguggucuaaccccaaauccaagcuccagauuaaucgccaggugaucgucgaccggggagauagaagcggcuacucuggcauuuucuccguggaggggaaaagcuguaucaaccggugcuuuuauguugaacugauuagaggacgcaaggaggaaaccgaggugcuguggacauccaauucuaucgucguguucuguggcaccagcgggacauacggaacgggcuccuggccugacggggcugaucucaaccugaugcccauuuga

SEQ ID NO: 216092 - RNA, 1410 nt, Artificial Sequence
  derived and/or modified CDS sequence (opt5) from neuraminidase__InfluenzaA__AHC58698
augaaccccaaucagaagaucauuaccaucggcagcgugucccugacaauuucuacgaucugcuucuuuaugcaaauugccauccucaucaccacagucacccugcacuucaaacaguacgaguuuaacagcccuccgaauaaccagguuaugcuuugugaacccacaauuaucgagagaaauauuaccgaaaucguguaucugacaaacaccacgauugagaaggaaaucugcccuaaacucgcugaguaccggaauugguccaagccccagugugacauuaccggguucgccccuuuuucuaaagauaacagcauccgccuguccgcgggaggcgacaucugggugacaagagagcccuaugucucuugcgauccugacaaguguuaccaauucgcucuugggcagggaaccacacugaauaacgugcauagcaauaacaccguucgggaucgcacgccguauagaacacuccugaugaaugaacugggcgugcccuuucaccucgggaccaagcaggucugcauugccugguccucuagcuccugucaugacggaaaagccuggcugcacgugugcaucacaggcgaugacaagaacgcuaccgccagcuucauuuacaauggccggcuuguugauucuguggucuccuggagcaaagagauccugcgcacccaggaaucugagugugugugcauuaacgggacaugugcuguggucaugacggacggauccgccagcggcaaggcggauaccaaaauccucuuuaucgaggaagggaagauuguucauacauccacccugucuggaagcgcccaacacguggaggaaugcuccugcuauccuagauaccccggcgugcggugugucugccgcgacaacuggaaggggagcaauagaccuaucguggauauuaacaucaaagaccacucuauuguuuccagcuacguguguucuggacuugucggcgacacaccccggaagaaugauagcuccucuagcucccauugccuggacccgaacaaugaggaaggcgggcacggagugaaaggcugggcuuucgaugacgggaacgauguuuggaugggacgcaccaucaaugagacgagcagacucggcuaugagacauuuaaggugaucgaaggguggucuaacccuaaauccaagcugcagauuaaucggcaggucaucguggaccgcggaaacagaagcggcuacucuggcauuuucuccgucgaggggaaaagcuguaucaaucggugcuuuuauguggaacugauuagaggacgcaaggaggaaaccgagguucucuggaccuccaacucuaucguggucuucuguggcacaagcgggaccuacggaacaggcuccuggcccgauggggccgaccugaaucuuaugccuauuuga

SEQ ID NO: 216093 - RNA, 1410 nt, Artificial Sequence; identical to SEQ ID NO: 214994
  derived and/or modified CDS sequence (opt5) from neuraminidase__InfluenzaA__AHC58710

SEQ ID NO: 216094 - RNA, 1410 nt, Artificial Sequence; identical to SEQ ID NO: 214994
  derived and/or modified CDS sequence (opt5) from neuraminidase__InfluenzaA__AHC58722

SEQ ID NO: 216095 - RNA, 1410 nt, Artificial Sequence
  derived and/or modified CDS sequence (opt5) from neuraminidase__InfluenzaA__AHC58734
augaaccccaaucagaagaucauuaccaucggcagcgugucccugacaauuucuacgaucugcuucuuuaugcaaauugccauccucaucaccacagucacccugcacuucaaacaguacgaguuuaacagcccuccgaauaaccagguuaugcuuugugaacccacaauuaucgagagaaauauuaccgaaaucguguaucugacaaacaccacgauugagaaggaaaucugcccuaaacucgcugaguaccggaauugguccaagccccagugugacauuaccggguucgccccuuuuucuaaagauaacagcauccgccuguccgcgggaggcgacaucugggugacaagagagcccuaugucucuugcgauccuaauaaguguuaccaauucgcucuugggcagggaaccacacugaacaaugugcauagcaacaauaccguucgggaccgcacgccguauagaacacuccugaugaacgaacugggcgugcccuuucaccucgggaccaagcaggucugcauugccugguccucuagcuccugucaugauggaaaagccuggcugcacgugugcaucacaggcgacgauaagaaugcuaccgccagcuucauuuacaacggcaaacuuguugacucuguggucuccuggagcaaggagauccugcggacccaggaaucugagugugugugcauuaacgggacauguacgguggucaugaccgauggauccgcuagcggcaaagccgacacaaagauccucuuuaucgaggaagggaagauuguucauaccuccacacugucuggaagcgcgcaacacguggaggaaugcuccugcuauccucgcuaccccggcaucagaugugugugccgggauaauuggaaagggagcaaccgcccuauugucgacaucaauauuaaggaucacucuaucguguccagcuacguuuguucuggacuugugggcgacacccccagaaagaacgacagcuccucuagcucccauugccuggauccgaauaacgaggaaggcgggcacggagucaagggcugggccuucgacgaugggaaugacguguggaugggacggacgaucaacgagacaagccgccucggcuaugagaccuuuaaaguuauugaaggguggucuaauccuaaguccaaacugcagaucaacagacaggugauugucgaucggggaaaucgcagcggcuacucuggcaucuucuccguggaggggaaaagcuguauuaacagaugcuuuuaugucgaacugauccggggaagaaaggaggaaaccgaggugcucuggacauccaauucuauuguuguguucuguggcaccagcgggacauacggaacgggcuccuggcccgacggggcugaucugaaccuuaugccuaucuga

SEQ ID NO: 216096 - RNA, 1410 nt, Artificial Sequence; identical to SEQ ID NO: 216043
  derived and/or modified CDS sequence (opt5) from neuraminidase__InfluenzaA__AHC58746

SEQ ID NO: 216097 - RNA, 1410 nt, Artificial Sequence; identical to SEQ ID NO: 216047
  derived and/or modified CDS sequence (opt5) from neuraminidase__InfluenzaA__AHC58758

SEQ ID NO: 216098 - RNA, 1410 nt, Artificial Sequence; identical to SEQ ID NO: 216043
  derived and/or modified CDS sequence (opt5) from neuraminidase__InfluenzaA__AHC58770

SEQ ID NO: 216099 - RNA, 1410 nt, Artificial Sequence; identical to SEQ ID NO: 211590
  derived and/or modified CDS sequence (opt5) from neuraminidase__InfluenzaA__AHC58782

SEQ ID NO: 216100 - RNA, 1410 nt, Artificial Sequence; identical to SEQ ID NO: 216043
  derived and/or modified CDS sequence (opt5) from neuraminidase__InfluenzaA__AHC58806

SEQ ID NO: 216101 - RNA, 1410 nt, Artificial Sequence
  derived and/or modified CDS sequence (opt5) from neuraminidase__InfluenzaA__AHC58818
augaaccccaaucagaagaucauuaccaucggcagcgugucccugacaauuucuacgaucugcuucuuuauucaaaucgccauccucauuaccacagucacccugcacuucaaacaguacgaguuuaacagcccuccgaauaaccagguuaugcuuugugaacccacaaucauugagagaaauaucaccgaaauuguguaucugacaaacaccacgaucgagaaggaaauuugcccuaaacucgcugaguaccggaauugguccaagccccagugugacaucaccggguucgccccuuuuucuaaagauaacagcauccgccuguccgcgggaggcgacauuugggugacaagagagcccuaugucucuugcgauccugacaaguguuaccaauucgcucuugggcagggaaccacacugaauaacgugcauagcaauaacaccguucgggaucgcacgccguauagaacacuccugaugaaugaacugggcgugcccuuucaccucgggaccaagcaggucugcaucgccugguccucuagcuccugucaugacggaaaagccuggcugcacgugugcauuacaggcgaugacaagaacgcuaccgccagcuucaucuacaauggccggcuuguugauucuguggucuccuggagcaaagagauucugcgcacccaggaaucugagugugugugcaucaacgggacauguacgguggucaugaccgacggauccgcuagcggcaaggccgauacaaaaauccucuuuauugaggaagggaagaucguucauaccuccacacugucuggaagcgcgcaacacguggaggaaugcuccugcuauccuagauaccccggcgugcggugugucugccgcgacaacuggaaggggagcaauagaccuauuguggauaucaacauuaaagaccacucuaucguuuccagcuacguguguucuggacuugucggcgacacgccccggaagaaugauagcuccucuagcucccauugccuggacccgaacaaugaggaaggcgggcacggagugaaaggcugggccuucgaugacgggaacgauguuuggaugggacgcaccaucaaugagacaagcagacucggcuaugagaccuuuaaggugauugaaggguggucuaacccuaaauccaagcugcagaucaaucggcaggucauuguggaccgcggaaacagaagcggcuacucuggcaucuucuccgucgaggggaaaagcuguauuaaucggugcuuuuauguggaacugaucagaggacgcaaggaggaaaccgagguucucuggacauccaacucuauuguggucuucuguggcaccagcgggacauacggaacgggcuccuggcccgauggggcugaccugaaucuuaugccuaucuga

SEQ ID NO: 216102 - RNA, 1410 nt, Artificial Sequence; identical to SEQ ID NO: 216092
  derived and/or modified CDS sequence (opt5) from neuraminidase__InfluenzaA__AHC58830

SEQ ID NO: 216103 - RNA, 1410 nt, Artificial Sequence; identical to SEQ ID NO: 216043
  derived and/or modified CDS sequence (opt5) from neuraminidase__InfluenzaA__AHC58842

SEQ ID NO: 216104 - RNA, 1410 nt, Artificial Sequence
  derived and/or modified CDS sequence (opt5) from neuraminidase__InfluenzaA__AHC58866
augaaccccaaucagaagaucauuaccaucggcagcgugucccugacaauuucuacgaucugcuucuuuaugcaaauugccauccucaucaccacagucacccugcacuucaaacagugugaguuuaacagcccuccgaauaacagaguuaugcuuugcgaacccacaauuaucgagcggaauauuaccgaaaucguguaccugacaaacaccacgauugagaaggaaaucuguccuaaacucgcugaguaucgcaauugguccaagccccagugcgacauuaccggguucgccccuuuuucuaaagauaacagcaucagacuguccgcgggaggcgacaucugggugacacgggagcccuacgucucuugugauccuaauaagugcuaucaguucgcucuugggcaaggaaccacacugaacaaugugcauagcaacaauaccguucgcgacagaacgccguaccggacacuccugaugaacgaacugggcgugcccuuucaccucgggaccaagcaggucuguauugccugguccagcagcuccugccaugauggaaaagccuggcugcacguguguaucacaggcgacgauaagaaugcuaccgccagcuucauuuauaacggcaaacuuguugacucuguggucuccuggagcaaggagauccugcgcacccaggaaucugagugcguguguauuaacgggacaugcacgguggucaugaccgauggauccgcuagcggcaaagccgacacaaagauccucuuuaucgaggaagggaagauuguucauaccuccacacugucuggaagcgcgcagcacguggaggaaugcuccuguuacccuagauaucccggcgugcggugcgucugucgcgauaauuggaaagggagcaacagaccuaucguggacauuaauaucaaggaucacucuauuguuuccagcuacgugugcucuggacuugucggcgacacgccccggaaaaacgacagcuccucuagcucccauugucuggauccgaauaacgaggaaggcgggcacggagugaagggcugggccuucgacgaugggaaugacguuuggaugggacgcaccaucaacgagacaagcagacucggcuacgagaccuuuaaagugaucgaaggguggucuaauccuaaguccaaacugcaaauuaaccggcaggucaucguggaucgcggaaauagaagcggcuauucuggcauuuucuccgucgaggggaagucuugcaucaaccgguguuuuuacguggaacugauuagaggacgcaaggaggaaaccggcguucucuggacauccaauucuaucguggucuucugcgggaccagcggaacauauggcacgggguccuggcccgacggcgcugaucugaaccuuaugccuauuuga

SEQ ID NO: 216105 - RNA, 1410 nt, Artificial Sequence; identical to SEQ ID NO: 216092
  derived and/or modified CDS sequence (opt5) from neuraminidase__InfluenzaA__AHC58878

SEQ ID NO: 216106 - RNA, 1410 nt, Artificial Sequence; identical to SEQ ID NO: 216043
  derived and/or modified CDS sequence (opt5) from neuraminidase__InfluenzaA__AHC58890

SEQ ID NO: 216107 - RNA, 1410 nt, Artificial Sequence; identical to SEQ ID NO: 216047
  derived and/or modified CDS sequence (opt5) from neuraminidase__InfluenzaA__AHC58902

SEQ ID NO: 216108 - RNA, 1410 nt, Artificial Sequence; identical to SEQ ID NO: 216043
  derived and/or modified CDS sequence (opt5) from neuraminidase__InfluenzaA__AHC58996

SEQ ID NO: 216109 - RNA, 1410 nt, Artificial Sequence; identical to SEQ ID NO: 216043
  derived and/or modified CDS sequence (opt5) from neuraminidase__InfluenzaA__AHC59008

SEQ ID NO: 216110 - RNA, 1410 nt, Artificial Sequence; identical to SEQ ID NO: 216047
  derived and/or modified CDS sequence (opt5) from neuraminidase__InfluenzaA__AHC59020

SEQ ID NO: 216111 - RNA, 1410 nt, Artificial Sequence
  derived and/or modified CDS sequence (opt5) from neuraminidase__InfluenzaA__AHC59032
augaaccccaaucagaagaucauuaccaucggcagcgugucccugacaauuucuacgaucugcuucuuuaugcaaauugccauccucaucaccacagucacccugcacuucaaacaguacgaguuuaacagcccuccgaauaaccagguuaugcuuugugaacccacaauuaucgagagaaauauuaccgaaaucguguaucugacaaacaccacgauugagaaggaaaucugcccuaaacucgcugaguaccggaauugguccaagccccagugugacauuaccggguucgccccuuuuucuaaagauaacagcauccgccuguccgcgggaggcgacaucugggugacaagagagcccuaugucucuugcgauccuaauaaguguuaccaauucgcucuugggcagggaaccacacugaacaaugugcauagcaacaauaccguucgggaccgcacgccguauagaacacuccugaugaacgaacugggcgugcccuuucaccucgggaccaagcaggucugcauugccugguccucuagcuccugucaugauggaaaagccuggcugcacgugugcaucacaggcgacgauaagaaugcuaccgccagcuucauuuacaacggcaaacuuguugacucuguggucuccuggagcaaggagauccugcggacccaggaaucugagugugugugcauuaacgggacauguacgguggucaugaccgauggauccgcuagcggcaaagccgacacaaagauccucuuuaucgaggaagggaagauuguucauaccuccacacugucuggaagcgcgcaacacguggaggaaugcuccugcuauccucgcuaccccagcgugagaugugucugccgggauaauuggaaaggcucuaaccgcccuaucguggacauuaauaucaaggaucacuccauuguuagcucuuacguguguagcgggcuugucggagacacccccagaaagaacgacuccucuagcuccagccauugccuggauccgaauaacgaggaaggcggccacggggugaaaggaugggccuucgacgauggcaaugacguuuggauggggcggacgaucaacgagacaucucgccucggauaugagaccuuuaaagugaucgaaggcugguccaauccuaagagcaaacugcagauuaacagacaggucaucguggaucgggggaaucgcucuggauacuccggcauuuucagcgucgagggcaaguccuguaucaacagaugcuuuuauguggaacugauucgggggagaaaggaggaaaccgagguucucuggacaucuaauagcaucguggucuucuguggaaccuccggcacauacgggacgggaucuuggcccgacggcgcugaucugaaccuuaugccuauuuga

SEQ ID NO: 216112 - RNA, 1410 nt, Artificial Sequence; identical to SEQ ID NO: 216079
  derived and/or modified CDS sequence (opt5) from neuraminidase__InfluenzaA__AHC59044

SEQ ID NO: 216113 - RNA, 1410 nt, Artificial Sequence; identical to SEQ ID NO: 211590
  derived and/or modified CDS sequence (opt5) from neuraminidase__InfluenzaA__AHC59056

SEQ ID NO: 216114 - RNA, 1410 nt, Artificial Sequence; identical to SEQ ID NO: 216043
  derived and/or modified CDS sequence (opt5) from neuraminidase__InfluenzaA__AHC59068

SEQ ID NO: 216115 - RNA, 1410 nt, Artificial Sequence; identical to SEQ ID NO: 216043
  derived and/or modified CDS sequence (opt5) from neuraminidase__InfluenzaA__AHC59080

SEQ ID NO: 216116 - RNA, 1410 nt, Artificial Sequence
  derived and/or modified CDS sequence (opt5) from neuraminidase__InfluenzaA__AHC59092
augaaccccaaucagaagaucauuaccaucggcagcgugucccugacaauuucuacgaucugcuucuuuaugcaaauugccauccucgucaccacaguuacccugcacuucaaacaguacgaguuuaacagcccuccgaauaaccaggugaugcuuugugaacccacaaucauugagagaaauaucaccgaaauuguguaucugacaaacaccacgaucgagaaggaaauuugcccuaaacccgcugaguaccggaauugguccaagccucagugugacaucaccggguucgcccccuuuucuaaagauaacagcauucgccucuccgcgggaggcgacaucugggucacaagagagccuuaugugucuugcgauccggacaaguguuaccaauucgcucuggggcagggaaccacacuuaauaacguucauagcaauaacaccgugcgggaucgcacgcccuauagaacacugcucaugaaugaacugggcgucccuuuucaccuggggaccaaacaggugugcaucgccugguccucuagcuccugucaugacggaaaggccuggcuccacguuugcauuacaggcgaugacaagaacgcuaccgccagcuucaucuacaauggccggcugguggauucugucguguccuggagcaaagagauucuucgcacccaggaaucugagugugugugcaucaacgggacauguacggucguuaugaccgacggauccgcuagcggcaaggccgauacaaaaauucuguuuaucgaggaagggaagaucgugcauaccuccacacucucuggaagcgcgcaacacguggaggaaugcuccugcuaucccagauacccuggcguccggugugugugccgcgacaacuggaaggggagcaauagacccauuguugauaucaacauuaaagaccacucuaucguguccagcuacgucuguucuggacuggugggcgacaccccgcggaagaaugauagcuccucuagcggccauugccuugacccuaacaaugaggaagggggacacggcguuaaagggugggccuucgaugacggaaacgauguguggaugggccgcacgauuaaugagacauccagacugggguaugagaccuuuaaggucaucgaaggauggagcaaccccaaaucuaagcuccagaucaaucgccaggugauugucgaccggggcgauagauccggcuacagcgggaucuucucuguggagggaaaauccuguauuaaccggugcuuuuauguugaacugaucagaggccgcaaggaggaaaccgaggugcuguggacaagcaauuccauugucguguucugugggaccucuggaacauacggcacggggagcuggccugacggcgcugaucucaaccugaugcccaucuga

SEQ ID NO: 216117 - RNA, 1410 nt, Artificial Sequence
  derived and/or modified CDS sequence (opt5) from neuraminidase__InfluenzaA__AHC59104
augaaccccaaucagaagaucauuaccaucggcagcgugucccugacaauuucuacgaucugcuucuuuaugcaaauugccauccucaucaccacagucacccugcacuucaaacaguacgaguuuuauagcccuccgaacaaucagguuaugcuuugugaacccacaauuaucaagagaaacauuaccgagaucguguaccugacaaauaccacgauugaaaaagagaucugcccuaagcucgcugaauaucggaacugguccaaaccccagugugacauuaccggguucgccccuuuuucuaaggauaauagcauccgccuguccgcgggaggcgacaucugggugacaagagagcccuacgucucuugcgauccugacaaguguuaucaauucgcucuugggcagggaaccacacugaacaaugugcauagcaacaauaccguucgggaucgcacgccguacagaacacuccugaugaacgagcugggcgugcccuuucaccucgggaccaaacaggucugcauugccugguccagcagcuccugucaugacggaaaggccuggcugcacgugugcaucacaggcgaugacaaaaaugcuaccgccagcuucauuuauaacggccggcuuguugauucuguggucuccuggagcaaggaaauccugcgcacccaggagucugaaugugugugcauuaaugggacauguacgguggucaugaccgacggauccgcuagcggcaaagccgauacaaagauccucuuuaucgaggaggggaagauuguucauaccuccacacugucuggaagcgcgcaacacguggaagagugcuccugcuacccuagauaccccggcgugcggugugucugccgcgacaacuggaaagggagcaacagaccuaucguggauauuaauaucaaggaccacucuauuguuuccagcuauguguguucuggacuugucggcgacacgccccggaaaaacgauagcuccucuagcucccauugccuggacccgaauaacgaagagggcgggcacggagugaagggcugggccuucgaugacgggaaugauguuuggaugggacgcaccaucaacgaaacaagcagacucggcuacgagaccuuuaaagugaucgagggguggucuaauccuaaguccaaacugcagauuaaccggcaggucaucguggaccgcggaaauagaagcggcuauucuggcauuuucuccgucgaagggaagucuuguaucaaccggugcuuuuacguggagcugauuagaggacgcaaggaagagaccgaaguucucuggacauccaauucuaucguggucuucuguggcaccagcgggacauauggaacgggcuccuggcccgauggggcugaccugaaccuuaugccuauuuga

SEQ ID NO: 216118 - RNA, 1410 nt, Artificial Sequence
  derived and/or modified CDS sequence (opt5) from neuraminidase__InfluenzaA__AHC59116
augaaccccaaucagaagaucauuaccaucggcagcgugucccugacaauuucuacgaucugcuucuuuaugcaaauugccauccucaucaccacagucacccugcacuucaaacaguacgaguuuaacagcccuccgaauaaccagguuaugcuuugugaacccacaauuaucgagagaaauauuaccgaaaucguguaucugacaaacaccacgauugagaaggaaaucugcccuaaacucgcugaguaccggaauugguccaagccccagugugacauuaccggguucgccccuuuuucuaaagauaacagcauccgccuguccgcgggaggcgacaucugggugacaagagagcccuaugucucuugcgauccuaauaaguguuaccaauucgcucuugggcagggaaccacacugaacaaugugcauagcaacaauaccguucgggaccgcacgccguauagaacacuccugaugaacgaacugggcgugcccuuucaccucgggaccaagcaggucugcauugccugguccucuagcuccugucaugauggaaaagccuggcugcacgugugcaucacaggcgacgauaagaaugcuaccgccagcuucauuuacaacggcaaacuuguugacucuguggucuccuggagcaaggagauccugcggacccaggaaucugagugugugugcauuaacgggacauguacgguggucaugaccgauggauccgcuagcggcaaagccgacacaaagauccucuuuaucgaggaagggaagauuguucauaccuccacacugucuggaagcgcgcaacacguggaggaaugcuccugcuauccucgcuaccccggcgugagaugugucugccgggauaauuggaaagggagcaaccgcccuaucguggacauuaauaucaaggaucacucuauuguuuccagcuacguguguucuggacuugucggcgacacccccagaaagaacgacagcuccucuagcucccauugccuggauccgaauaacgaggaaggcgggcacggagugaagggcugggccuucgacgaugggaaugacguuuggaugggacggacgaucaacgagacaagccgccucggcuaugagaccuuuaaagugaucgaaggguggucuaauccuaaguccaaacugcagauuaacagacaggucaucguggaucggggaaaucgcagcggcuacucuggcauuuucuccgucgaggggaaaagcuguaucaacagaugcuuuuauguggaacugauucggggaagagaggaagagaccgagguucucuggacauccaauucuaucguggucuucuguggcaccagcgggacauacggaacgggcuccuggcccgacggggcugaucugaaccuuaugccuauuuga

SEQ ID NO: 216119 - RNA, 1410 nt, Artificial Sequence
  derived and/or modified CDS sequence (opt5) from neuraminidase__InfluenzaA__AHC59128
augaaccccaaucagaagaucauuaccaucggcagcgugucccugacaauuucuacgaucugcuucuuuaugcaaauugccauccucaucaccacagucacccugcacuucaaacaguacgaguuuuauagcccuccgaacaaucagguuaugcuuugugaacccacaauuauggagagaaacaucaccgaaauuguguaccugacaaauaccacgaucgagaaggaaauuugcccuaaacucgcugaguaucggaacugguccaagccccagugugacaucaccggguucgccccuuuuucuaaagauaauagcauucgccuguccgcgggaggcgacaucugggugacaagagagcccuacgucucuugcgauccugacaaguguuaucaauucgcucuugggcagggaaccacacugaacaaugugcauagcaacaauaccguucgggaucgcacgccguacagaacacuccugaugaacgaacugggcgugcccuuucaccucgggaccaagcaggucugcaucgccugguccucuagcuccugucaugacggaaaagccuggcugcacgugugcguuacaggcgaugacaagaaugcuaccgccagcuucauuuauaacggccggcuuguggauucugucguguccuggagcaaagagauccugcgcacccaggaaucugagugugugugcauuaaugggacauguacggucguuaugaccgacggauccgcuagcggcaaggccgauacaaaaauccucuuuauugaggaagggaagaucgugcauaccuccacacugucuggaagcgcgcaacacguggaggaaugcuccugcuacccuagauaccccggcguccggugugugugccgcgacaacuggaaggggagcaacagaccuaucguugauauuaauaucaaagaccacucuauuguguccagcuaugucuguucuggacuugugggcgacacgccccggaagaacgauagcuccucuagcucccauugccuggacccgaauaacgaggaaggcgggcacggaguuaaaggcugggccuucgaugacgggaaugauguguggaugggacgcaccaucaacgagacaagcagacucggcuacgagaccuuuaaggucauugaaggguggucuaauccuaaauccaagcugcagaucaaccgccaggugaucgucgaccggggaaauagaagcggcuauucuggcauuuucuccguggaggggaaaagcuguaucaaccggugcuuuuacguugaacugauuagaggacgcaaggaggaaaccgaggugcucuggacauccaauucuaucgucguguucuguggcaccagcgggacauauggaacgggcuccuggcccgauggggcugaccugaaccuuaugccuauuuga

SEQ ID NO: 216120 - RNA, 1410 nt, Artificial Sequence
  derived and/or modified CDS sequence (opt5) from neuraminidase__InfluenzaA__AHC59152
augaaccccaaucagaagaucauuaccaucggcagcgugucccugacaauuucuacgaucugcuucuuuaugcaagucgccauucucaucaccacaguuacccugcacuucaaacaguacgaguuuaacagcccuccgaauaaccaggugaugcuuugugaacccacaaucauugagagaaauaucaccgaaauucuguaucucacaaacaccacgaucgagaaggaaauuugcccuaaacuggcugaguaccggaauugguccaagccccagugugacaucaccggguucgccccuuuuucuaaagauaacagcauucgccuuuccgcgggaggcgacaucugggugacaagagagcccuaugucucuugcgauccugacaaguguuaccaauucgcucuggggcagggaaccacacucaauaacgugcauagcaauaacaccguucgggaucgcacgccguauagaacacugcugaugaaugaacucggcgugcccuuucaccuggggaccaagcaggucugcaucgccugguccucuagcuccugucaugacggaaaagccuggcuucacgugugcauuacaggcgaugacaagaacgcuaccgccagcuucaucuacaauggcaaacugguugauucuguggucuccuggagcaaggagauucuccggacccaggaaucugagugugugugcaucaacgggacauguacgguggucaugaccgacggauccgcuagcggcaaagccgauacaaagauucuguuuaucgaggaagggaagaucguucauaccuccacacuuucuggaagcgcgcaacacguggaggaaugcuccugcuauccucgcuaccccggcgugagaugugucugccgggacaacuggaaagggagcaaucgcccuauuguggauaucaacauuaaggaccacucuaucguuuccagcuacguguguucuggacuggucggcgacacccccagaaagaaugauagcuccucuagcucccauugccucgacccgaacaaugaggaaggcgggcacggagugaagggcugggccuucgaugacgggaacgauguuuggaugggacggacgauuaaugagacaagccgccugggcuaugagaccuuuaaagugaucgaaggguggucuaacccuaaguccaaacugcagaucaauagacaggucauuguggaccggggaaaccgcagcggcuacucuggcaucuucuccgucgaggggaaaagcuguauuaauagaugcuuuuauguggaacucauccggggaagaaaggaggaaaccgagguucuguggacauccaacucuauuguggucuucuguggcaccagcgggacauacggaacgggcuccuggcccgauggggcugaccuuaaucugaugccuaucuga

SEQ ID NO: 216121 - RNA, 1410 nt, Artificial Sequence
  derived and/or modified CDS sequence (opt5) from neuraminidase__InfluenzaA__AHC59188
augaaccccaaucagaagaucauuaccaucggcagcgugucccugacaauuucuacgaucugcuucuuuaugcaaauugccauccucaucaccacagucacccugcacuucaaacaguacgaguuuaacccuccgcccaauaaccagguugugcuuugugaaccuacaauuaucgagagaaauauuaccgaaaucguguaucugacaaacaccacgauugagaaggaaaucugccccaaacucgcugaguaccggaauuggagcaagccucagugugacauuaccggguucgcccccuuuuccaaagauaacucuauccgccugagcgcgggaggcgacaucugggucacaagagagccuuauguguccugcgauccggacaaguguuaccaauucgcucuugggcagggaaccacacugaauaacguucauucuaauaacaccgugcgggaucgcacgcccuauagaacacuccugaugaaugaacugggcgucccuuuucaccucgggaccaaacaggugugcauugccuggagcuccagcucuugucaugacggaaaggccuggcugcacguuugcaucacaggcgaugacaagaacgcuaccgccuccuucauuuacaauggccggcuuguggauagcgucgugucuugguccaaagagauccugcgcacccaggaaagcgagugugugugcauuaacgggacauguacggucguuaugaccgacggaucugcuuccggcaaggccgauacaaaaauccucuuuaucgaggaagggaagauugugcauaccagcacacuguccggaucugcgcaacacguggaggaaugcagcugcuaucccagauacccuggcguccggugugugugccgcgacaacuggaagggguccaauagacccaucguugauauuaacaucaaagaccacagcauugugucuuccuacgucuguagcggacuugugggcgacaccccgcggaagaaugauucuagcuccucuagccauugccuggacccuaacaaugaggaaggcgggcacggaguuaaaggcugggccuucgaugacgggaacgauguguggaugggacgcacgaucaaugagacauccagacucggcuaugagaccuuuaaggucaucgaaggguggagcaaccccaaaucuaagcugcagauuaaucgccaggugaucgucgaccggggagauagauccggcuacagcggcauuuucucuguggaggggaaauccuguaucaaccggugcuuuuauguugaacugauuagaggacgcaaggaggaaaccgaggugcucuggacaagcaauuccaucgucguguucuguggcaccucugggacauacggaacgggcagcuggccugacggggcugaucugaaccuuaugcccauuuga

SEQ ID NO: 216122 - RNA, 1410 nt, Artificial Sequence; identical to SEQ ID NO: 211590
  derived and/or modified CDS sequence (opt5) from neuraminidase__InfluenzaA__AHC59200

SEQ ID NO: 216123 - RNA, 1410 nt, Artificial Sequence
  derived and/or modified CDS sequence (opt5) from neuraminidase__InfluenzaA__AHC59212
augaaccccaaucagaagaucauuaccaucggcagcgugucccugacaauuucuacgaucugcuucuuuaugcaaauugccacccucaucacaaccgucacacugcacuucaaacaguacgaguuuaacagcccuccgaauaaccagguuaugcuuugugaacccaccaucauugagagaaauaucacagaaauuguguaucugaccaacacgaccaucgagaaggaaauuugcccuaaacucgcugaguaccggaauugguccaagccccagugugacaucacaggguucgccccuuuuucuaaagauaacagcauucgccuguccgcgggaggcgacaucugggugaccagagagcccuaugucucuugcgauccugacaaguguuaccaauucgcucuugggcagggaacaacccugaauaacgugcauagcaauaacacgguucgggaucgcacaccguauagaacccuccugaugaaugaacugggcgugcccuuucaccucgggacaaagcaggucugcaucgccugguccucuagcuccugucaugacggaaaagccuggcugcacgugugcauuaccggcgaugacaagaacgcuaccgccagcuucaucuacaauggccggcuuguugauucuguggucuccuggagcaaagagauucugcgcacacaggaaucugagugugugugcaucaacgggacguguaccguggucaugacagacggauccgcuagcggcaaggccgauaccaaaauucucuuuaucgaggaagggaagaucguucauacauccacccugucuggaagcgcgcaacacguggaggaaugcuccugcuauccuagauaccccggcgugcggugugucugccgcgacaacuggaaggggagcaauagaccuauuguggauaucaacauuaaagaccacucuaucguuuccagcuacguguguucuggacuugucggcgacacgccccggaagaaugauagcuccucuagcucccauugccuggacccgaacaaugaggaaggcgggcacggagugaaaggcugggccuucgaugacgggaacgauguuuggaugggacgcacaauuaaugagaccagcagacucggcuaugagaccuuuaaggugaucgaaggguggucuaacccuaaauccaagcugcagaucaaucggcaggucauuguggaccgcggagauagaagcggcuacucuggcaucuucuccgucgaggggaaaagcuguauuaaccggugcuuuuauguggaacugaucagaggacgcaaggaggaaacagagguucucuggaccuccaauucuauuguggucuucuguggcacaagcgggacguacggaaccggcuccuggcccgacggggcugaucugaaccuuaugccuaucuga

SEQ ID NO: 216124 - RNA, 1410 nt, Artificial Sequence; identical to SEQ ID NO: 216047
  derived and/or modified CDS sequence (opt5) from neuraminidase__InfluenzaA__AHC59224

SEQ ID NO: 216125 - RNA, 1410 nt, Artificial Sequence
  derived and/or modified CDS sequence (opt5) from neuraminidase__InfluenzaA__AHC59236
augaaccccaaucagaagaucauuaccaucggcagcgugucccugacaauuucuacgaucugcuucuuuaugcaaauugccauccucaucaccacagucacccugcacuucaaacaguacgaguuuuauagcccuccgaacaaucagguuaugcuuugugaacccacaauuaucgagagaaacauuaccgaaaucguguaccugacaaauaccacgauugagaaggaaaucugcccuaaacucgcugaguaucggaacugguccaagccccagugugacauuaccggguucgccccuuuuucuaaagauaauagcauccgccuguccgcgggaggcgacaucugggugacaagagagcccuacgucucuugcgauccugacaaguguuaucaauucgcucuugggcagggaaccacacugaacaaugugcauagcaacaauaccguucacgaucggacgccguaccgcacacuccugaugaacgaacugggcgugcccuuucaucucgggaccaagcaggucugcauugccugguccucuagcuccugucacgacggaaaagccuggcugcaugugugcaucacaggcgaugacaagaaugcuaccgccagcuucauuuauaacggcagacuuguugauucuguggucuccuggagcaaagagauccugcggacccaggaaucugagugugugugcauuaaugggacauguacgguggucaugaccgacggauccgcuagcggcaaggccgauacaaaaauccucuuuaucgaggaagggaagauuguucacaccuccacacugucuggaagcgcgcaacacguggaggaaugcuccugcuacccucgcuaccccggcgugagaugugucugccgggacaacuggaaggggagcaaccgcccuaucguggauauuaauaucaaagaccauucuauuguuuccagcuauguguguucuggacuugucggcgacacccccagaaagaacgauagcuccucuagcucccacugccuggacccgaauaacgaggaaggcgggcauggagugaaaggcugggccuucgaugacgggaaugauguuuggaugggacggacgaucaacgagacaagccgccucggcuacgagaccuuuaaggugaucgaaggguggucuaauccuaaauccaagcugcagauuaacagacaggucaucguggaccggggaaaucgcagcggcuauucuggcauuuucuccgucgaggggaaaagcuguaucaacagaugcuuuuacguggaacugauucggggaagaaaggaggaaaccgagguucucuggacauccaauucuaucguggucuucuguggcaccagcgggacauauggaacgggcuccuggcccgauggggcugaccugaaccuuaugccuauuuga

SEQ ID NO: 216126 - RNA, 1410 nt, Artificial Sequence; identical to SEQ ID NO: 216047
  derived and/or modified CDS sequence (opt5) from neuraminidase__InfluenzaA__AHC59260

SEQ ID NO: 216127 - RNA, 1410 nt, Artificial Sequence; identical to SEQ ID NO: 216043
  derived and/or modified CDS sequence (opt5) from neuraminidase__InfluenzaA__AHC59272

SEQ ID NO: 216128 - RNA, 1410 nt, Artificial Sequence; identical to SEQ ID NO: 216047
  derived and/or modified CDS sequence (opt5) from neuraminidase__InfluenzaA__AHC59284

SEQ ID NO: 216129 - RNA, 1410 nt, Artificial Sequence
  derived and/or modified CDS sequence (opt5) from neuraminidase__InfluenzaA__AHC59296
augaaccccaaucagaagaucauuaccaucggcagcgugucccugacaauuucuacgaucugcuucuuuaugcaaauugccauccucaucaccacagucacccugcacuucaaacaguacgaguuuaacagcccuccgaauaaccagguuaugcuuugugaacccacaauuaucgagagaaauauuaccgaaaucguguaucugacaaacaccacgauugagaaggaaaucugcccuaaacucgcugaguaccggaauugguccaagccccagugugacauuaccggguucgccccuuuuucuaaagauaacagcauccgccuguccgcgggaggcgacaucugggugacaagagagcccuaugucucuugcgauccuaauaaguguuaccaauucgcucuugggcagggaaccacacugaacaaugugcauagcaacaauaccguucgggaccgcacgccguauagaacacuccugaugaacgaacugggcgugcccuuucaccucgggaccaagcaggucugcauugccugguccagcagcuccugucaugauggaaaagccuggcugcacgugugcaucacaggcgacgauaagaaugcuaccgccagcuucauuuacaacggcaaacuuguugacucuguggucuccuggagcaaggagauccugcggacccaggaaucugagugugugugcauuaacgggacauguacgguggucaugaccgauggauccgcuagcggcaaagccgacacaaagauccucuuuaucgaggaagggaagauuguucauaccuccacacugucuggaagcgcgcaacacguggaggaaugcuccugcuauccucgcuaccccggcgugagaugugucugccgggauaauuggaaagggagcaaccgcccuaucguggacauuaagaucaaagaucacucuauuguuuccagcuacguguguucuggacuugucggcgacacccccagaaagaaugacagcuccucuagcucccauugccuggauccgaacaaugaggaaggcgggcacggagugaaaggcugggccuucgacgaugggaacgacguuuggaugggacggacgaucaaugagacaagccgccucggcuaugagaccuuuaaggugaucgaaggguggucuaacccuaaauccaagcugcagauuaauagacaggucaucguggaucggggaaaccgcagcggcuacucuggcauuuucuccgucgaggggaagucuuguaucaauagaugcuuuuauguggaacugauucggggaagaaaagaggaaaccgagguucucuggacauccaacucuaucguggucuucuguggcaccagcgggacauacggaacgggcuccuggcccgacggggcugaucugaaucuuaugccuauuuga

SEQ ID NO: 216130 - RNA, 1410 nt, Artificial Sequence
  derived and/or modified CDS sequence (opt5) from neuraminidase__InfluenzaA__AHC59308
augaaccccaaucagaagaucauuaccaucggcagcgugucccugacaauuucuacgaucugcuucuuuaugcaaauugccauccucaucaccacagucacccugcacuucaaacaguacgaguuuaacccuccgcccaauaaccagguuaugcuuugugaaccuacaauuaucgagagaaauauuaccgaaaucguguaucugacaaacaccacgauugagaaggaaaucugccccaaacucgcugaguaccggaauuggagcaagccucagugugacauuaccggguucgcccccuuuuccaaagauaacucuauccgccugagcgcgggaggcgacaucugggugacaagagagccuuaugucuccugcgauccgaauaaguguuaccaauucgcucuugggcagggaaccacacugaacaaugugcauucuaacaauaccguucgggaccgcacgcccuauagaacacuccugaugaacgaacugggcgugccuuuucaccucgggaccaagcaggucugcauugccuggagcuccagcucuugucaugauggaaaagccuggcugcacgugugcaucacaggcgacgauaagaaugcuaccgccuccuucauuuacaacggcaaacuuguugacagcguggucucuugguccaaggagauccugcggacccaggaaagcgagugugugugcauuaacgggacauguacgguggucaugaccgauggaucugcuuccggcaaagccgacacaaagauccucuuuaucgaggaagggaagauuguucauaccagcacacuguccggaucugcgcaacacguggaggaaugcagcugcuauccccgcuacccuggcgugagaugugucugccgggauaauuggaaaggguccaaccgccccaucguggacauuaauaucaaggaucacagcauuguuucuuccuacguguguagcggacuugucggcgacaccccgcggaaaaacgacucuagcuccucuagccauugccuggauccuaauaacgaggaaggcgggcacggagugaagggcugggccuucgacgaugggaaugacguuuggaugggaagaacgaucaacgagacaucccgccucggcuaugagaccuuuaaagugaucgaaggguggagcaaucccaagucuaaacugcagauuaacagacaggucaugguggaucggggaaaucgcuccggcuacagcggcaucuucucugucgaggggaaguccuguauuaacagaugcuuuuauguggaacugauccggggaagaaaggaggaaaccgagguucucuggacaagcaauuccauuguggucuucuguggcaccucugggacauacggaacgggcagcuggccugacggggcugaucugaaccuuaugcccaucuga

SEQ ID NO: 216131 - RNA, 1410 nt, Artificial Sequence; identical to SEQ ID NO: 215955
  derived and/or modified CDS sequence (opt5) from neuraminidase__InfluenzaA__AHC59320

SEQ ID NO: 216132 - RNA, 1410 nt, Artificial Sequence; identical to SEQ ID NO: 214218
  derived and/or modified CDS sequence (opt5) from neuraminidase__InfluenzaA__AHC59332

SEQ ID NO: 216133 - RNA, 1410 nt, Artificial Sequence; identical to SEQ ID NO: 216091
  derived and/or modified CDS sequence (opt5) from neuraminidase__InfluenzaA__AHC59344

SEQ ID NO: 216134 - RNA, 1410 nt, Artificial Sequence
  derived and/or modified CDS sequence (opt5) from neuraminidase__InfluenzaA__AHC59368
augaaccccaaucagaagaucauuaccaucggcagcgugucccugacaauuucuacgaucugcuucuuuaugcaaauugccauccucaucaccacagucacccugcacuucaaacaguacgaguuuaacagcccuccgaauaaccagguuaugcuuugugaacccacaauuaucgagagaaauauuaccgaaaucguguaucugacaaacaccacgauugagaaggaaaucugcccuaaacucgcugaguaccggaauugguccaagccccagugugacauuaccggguucgccccuuuuucuaaagauaacagcauccgccuguccgcgggaggcgacaucugggugacaagagagcccuaugucucuugcgauccuaauaaguguuaccaauucgcucuugggcagggaaccacacugaacaaugugcauagcaacaauaccguucgggaccgcacgccguauagaacacuccugaugaacgaacugggcgugcccuuucaccucgggaccaagcaggucugcauugccugguccucuagcuccugucaugauggaaaagccuggcugcacgugugcaucacaggcgacgauaagaaugcuaccgccagcuucauuuacaacggcaaacuuguugacucuguggucuccuggagcaaggagauccugcggacccaggaaucugagugugugugcauuaacgggacauguacgguggucaugaccgauggauccgcuagcggcaaagccgacacaaagauccucuuuaucgaggaagggaagauuguucauaccuccacacugucuggaagcgcgcaacacguggaggaaugcuccugcuauccucgcuaccccggcgugagaugugucugccgggauaauuggaaagggagcaaccgcccuaucguggacauuaauaucaaggaucacucuauuguuuccagcuacguguguucuggacuugucggcgacacccccagaaagaacgacagcuccucuagcucccauugccuggauccgaauaacgaggaaggcgggcacggagugaagggcugggccuucgacgaugggaaugacguuuggaugggacggacgaucgaugagacaagccgccucggcuaugagaccuuuaaagugaucgaaggguggucuaacccuaaguccaaacugcagauuaauagacaggucaucguggaccggggaaaccgcagcggcuacucuggcauuuucuccgucgaggggaaaagcuguaucaauagaugcuuuuauguggaacugauucggggaagaaaggaggaaaccgagguucucuggacauccaacucuaucguggucuucuguggcaccagcgggacauacggaacgggcuccuggcccgauggggcugaccugaaucuuaugccuauuuga

SEQ ID NO: 216135 - RNA, 1410 nt, Artificial Sequence; identical to SEQ ID NO: 216043
  derived and/or modified CDS sequence (opt5) from neuraminidase__InfluenzaA__AHC59380

SEQ ID NO: 216136 - RNA, 1410 nt, Artificial Sequence; identical to SEQ ID NO: 214994
  derived and/or modified CDS sequence (opt5) from neuraminidase__InfluenzaA__AHC59392

SEQ ID NO: 216137 - RNA, 1410 nt, Artificial Sequence; identical to SEQ ID NO: 216079
  derived and/or modified CDS sequence (opt5) from neuraminidase__InfluenzaA__AHC59404

SEQ ID NO: 216138 - RNA, 1410 nt, Artificial Sequence; identical to SEQ ID NO: 216047
  derived and/or modified CDS sequence (opt5) from neuraminidase__InfluenzaA__AHC59416

SEQ ID NO: 216139 - RNA, 1410 nt, Artificial Sequence
  derived and/or modified CDS sequence (opt5) from neuraminidase__InfluenzaA__AHC59428
augaaccccaaucagaagaucauuaccaucggcagcgugucccugacaauuucuacgaucugcuucuuuaugcaaauugccauccucaucaccacagucacccugcacuucaaacaguacgaguuuuauagcccuccgaacaaucagguuaugcuuugugaacccacaauuaucgagagaaacauuaccgaaaucguguaccugacaaauaccacgauugagaaggaaaucugcccuaaacucgcugaguaucggaacugguccaagccccagugugacauuaccggguucgccccuuuuucuaaagauaauagcauccgccuguccgcgggaggcgacaucugggugacaagagagcccuacgucucuugcgauccugaccgguguuaucaauucgcucuugggcagggaaccacacugaacaaugugcauagcaacaauaccguucgcgauagaacgccguaccggacacuccugaugaacgaacugggcgugcccuuucaccucgggaccaagcaggucugcauugccugguccagcagcuccugucaugacggaaaggccuggcugcacgugugcaucacaggcgaugacaaaaaugcuaccgccagcuucauuuauaacggccgccuuguugauucuguggucuccuggagcaaggagauccugagaacccaggaaucugagugugugugcauuaaugggacauguacgguggucaugaccgacggauccgcuagcggcaaagccgauacaaagauccucuuuaucgaggaagggaaaauuguucauaccuccacacugucuggaagcgcgcaacacguggaggaaugcuccugcuacccucgguaccccggcgugcgcugugucugcagagacaacuggaaggggagcaaccggccuaucguggauauuaauaucaaggaccacucuauuguuuccagcuauguguguucuggacuugucggcgacacgccccgcaaaaacgauagcuccucuagcucccauugccuggacccgaauaacgaggaaggcgggcacggagugaagggcugggccuucgaugacgggaaugauguuuggaugggaagaaccaucaacgagacaagccggcucggcuacgagaccuuuaaagugaucgaaggguggucuaauccuaaguccaaacugcagauuaaccgccaggucaucguggacagaggaaaucggagcggcuauucuggcauuuucuccgucgaggggaagucuuguaucaacagaugcuuuuacguggaacugauucgcggacggaaagaggaaaccgagguucucuggacauccaauucuaucguggucuucuguggcaccagcgggacauauggaacgggcuccuggcccgauggggcugaccugaaccuuaugccuauuuga

SEQ ID NO: 216140 - RNA, 1410 nt, Artificial Sequence
  derived and/or modified CDS sequence (opt5) from neuraminidase__InfluenzaA__AHC59440
augaaccccaaucagaagaucauuaccaucggcagcgugucccugacaauuucuacgaucugcuucuuuaugcaaauugccauccucaucaccacagucacccugcacuucaaacaguacgaguuuaacagcccuccgaauaaccagguuaugcuuugugaacccacaauuaucgagagaaauauuaccgaaaucguguaucugacaaacaccacgauugagaaggaaaucugcccuaaacccgcugaguaccggaauugguccaagccucagugugacauuaccggguucgcccccuuuucuaaagauaacagcauccgccucuccgcgggaggcgacaucugggugacaagagagccuuaugucucuugcgauccggacaaguguuaccaauucgcucuggggcagggaaccacacuuaauaacgugcauagcaauaacaccguucgggaucgcacgcccuauagaacacugcucaugaaugaacugggcgugccuuuucaccuggggaccaagcaggucugcauugccugguccucuagcuccugucaugacggaaaagccuggcuccacgugugcaucacaggcgaugacaagaacgcuaccgccagcuucauuuacaauggccggcugguugauucuguggucuccuggagcaaagagauccuucgcacccaggaaucugagugugugugcauuaacgggacauguacgguggucaugaccgacggauccgcuagcggcaaggccgauacaaaaauccuguuuaucgaggaagggaagauuguucaaaccuccacacucucuggaagcgcgcagcauguggaggaaugcuccugcuaucccagauacccuggcgugcggugugucugccgcgacaacuggaaggggagcaauagacccaucguggauauuaacaucaaagaccacucuauuguuuccagcuacguguguucuggacuggucggcgacaccccgcggaagaaugauagcuccucuagcucccacugccuugacccuaacaaugaggaaggcgggcauggagugaaaggcugggccuucgaugacgggaacgauguuuggaugggacgcacgaucaaugagacaagcagacugggcuaugagaccuuuaaggugaucgaaggguggucuaaccccaaauccaagcuccagauuaaucggcaggucaucguggaccgcggagauagaagcggcuacucuggcauuuucuccgucgaggggaaaagcuguaucaaccggugcuuuuauguggaacugauuagaggacgcaaggaggaaaccgagguucuguggacauccaauucuaucguggucuucuguggcaccagcgggacauacggaacgggcuccuggccugacggggcugaucucaaccugaugcccauuuga

SEQ ID NO: 216141 - RNA, 1410 nt, Artificial Sequence; identical to SEQ ID NO: 216047
  derived and/or modified CDS sequence (opt5) from neuraminidase__InfluenzaA__AHC59452

SEQ ID NO: 216142 - RNA, 1410 nt, Artificial Sequence; identical to SEQ ID NO: 211590
  derived and/or modified CDS sequence (opt5) from neuraminidase__InfluenzaA__AHC59464

SEQ ID NO: 216143 - RNA, 1410 nt, Artificial Sequence; identical to SEQ ID NO: 215955
  derived and/or modified CDS sequence (opt5) from neuraminidase__InfluenzaA__AHC59476

SEQ ID NO: 216144 - RNA, 1410 nt, Artificial Sequence; identical to SEQ ID NO: 216047
  derived and/or modified CDS sequence (opt5) from neuraminidase__InfluenzaA__AHC59488

SEQ ID NO: 216145 - RNA, 1410 nt, Artificial Sequence; identical to SEQ ID NO: 216047
  derived and/or modified CDS sequence (opt5) from neuraminidase__InfluenzaA__AHC59500

SEQ ID NO: 216146 - RNA, 1410 nt, Artificial Sequence; identical to SEQ ID NO: 216092
  derived and/or modified CDS sequence (opt5) from neuraminidase__InfluenzaA__AHC59512

SEQ ID NO: 216147 - RNA, 1410 nt, Artificial Sequence; identical to SEQ ID NO: 216092
  derived and/or modified CDS sequence (opt5) from neuraminidase__InfluenzaA__AHC59524

SEQ ID NO: 216148 - RNA, 1410 nt, Artificial Sequence; identical to SEQ ID NO: 216079
  derived and/or modified CDS sequence (opt5) from neuraminidase__InfluenzaA__AHC59536

SEQ ID NO: 216149 - RNA, 1410 nt, Artificial Sequence; identical to SEQ ID NO: 216047
  derived and/or modified CDS sequence (opt5) from neuraminidase__InfluenzaA__AHC59548

SEQ ID NO: 216150 - RNA, 1410 nt, Artificial Sequence; identical to SEQ ID NO: 216047
  derived and/or modified CDS sequence (opt5) from neuraminidase__InfluenzaA__AHC59560

SEQ ID NO: 216151 - RNA, 1410 nt, Artificial Sequence; identical to SEQ ID NO: 216125
  derived and/or modified CDS sequence (opt5) from neuraminidase__InfluenzaA__AHC59572

SEQ ID NO: 216152 - RNA, 1410 nt, Artificial Sequence; identical to SEQ ID NO: 216120
  derived and/or modified CDS sequence (opt5) from neuraminidase__InfluenzaA__AHC59584

SEQ ID NO: 216153 - RNA, 1410 nt, Artificial Sequence; identical to SEQ ID NO: 216092
  derived and/or modified CDS sequence (opt5) from neuraminidase__InfluenzaA__AHC59596

SEQ ID NO: 216154 - RNA, 1410 nt, Artificial Sequence; identical to SEQ ID NO: 214994
  derived and/or modified CDS sequence (opt5) from neuraminidase__InfluenzaA__AHC59608

SEQ ID NO: 216155 - RNA, 1410 nt, Artificial Sequence; identical to SEQ ID NO: 216079
  derived and/or modified CDS sequence (opt5) from neuraminidase__InfluenzaA__AHC59620

SEQ ID NO: 216156 - RNA, 1410 nt, Artificial Sequence; identical to SEQ ID NO: 216047
  derived and/or modified CDS sequence (opt5) from neuraminidase__InfluenzaA__AHC59632

SEQ ID NO: 216157 - RNA, 1410 nt, Artificial Sequence; identical to SEQ ID NO: 216047
  derived and/or modified CDS sequence (opt5) from neuraminidase__InfluenzaA__AHC59644

SEQ ID NO: 216158 - RNA, 1410 nt, Artificial Sequence
  derived and/or modified CDS sequence (opt5) from neuraminidase__InfluenzaA__AHC59656
augaaccccaaucagaagaucauuaccaucggcagcgugucccugacaauuucuacgaucugcuucuuuaugcaaauugccauccucaucaccacagucaccaugcacuucaaacaguacgaguuuaacagcccuccgaauaaccagguuaugcugugugaacccacaauuaucgagagaaauauuaccgaaaucguguaucuuacaaacaccacgauugagaaggaaaucugcccuaaacuggcugaguaccggaauugguccaagccccagugugacauuaccggguucgccccuuuuucuaaagauaacagcauccgccucuccgcgggaggcgacaucugggugacaagagagcccuaugucucuugcgauccugugaaguguuaccaauucgcucuggggcagggaaccacacuuaauaacguucauagcaauaacaccgugcgggaccgcacgccguauagaacacugcucaugaaugaacugggcguccccuuucaccuggggaccaaacaggugugcauugccugguccagcagcuccugucaugauggaaaagccuggcuccacguuugcaucacaggcgacgauaagaacgcuaccgccagcuucauuuacaauggcaaacugguggacucugucguguccuggagcaaggagauccuucggacccaggaaucugagugugugugcauuaacgggacauguacggucguuaugaccgauggauccgcuagcggcaaagccgacacaaagauccuguuuaucgaggaagggaagauugugcauaccuccacacucucuggaagcgcgcaacacguggaggaaugcuccugcuauccucgcuaccccggcgucagaugugugugccgggauaacuggaaagggagcaaucgcccuaucguugacauuaacaucaaggaucacucuauuguguccagcuacgucuguucuggacuggugggcgacacccccagaaagaaugacagcuccucuagcucccauugccuugauccgaacaaugaggaaggcgggcacggaguuaagggcugggccuucgacgaugggaacgacguguggaugggacggacgaucaaugagacaagccgccugggcuaugagaccuuuaaagucaucgaaggguggucuaacccuaaguccaaacuccagauuaauagacaggugaucgucgaucggggaaaccgcagcggcuacucuggcauuuucuccguggaggggaagucuuguaucaauagaugcuuuuauguugaacugauucggggaagaaaggaggaaaccgaggugcuguggacauccaacucuaucgucguguucuguggcaccagcgggacauacggaacgggcuccuggcccgacggggcugaucucaaucugaugccuauuuga

SEQ ID NO: 216159 - RNA, 1410 nt, Artificial Sequence; identical to SEQ ID NO: 216092
  derived and/or modified CDS sequence (opt5) from neuraminidase__InfluenzaA__AHC59668

SEQ ID NO: 216160 - RNA, 1410 nt, Artificial Sequence; identical to SEQ ID NO: 216120
  derived and/or modified CDS sequence (opt5) from neuraminidase__InfluenzaA__AHC59680

SEQ ID NO: 216161 - RNA, 1410 nt, Artificial Sequence; identical to SEQ ID NO: 216047
  derived and/or modified CDS sequence (opt5) from neuraminidase__InfluenzaA__AHC59704

SEQ ID NO: 216162 - RNA, 1410 nt, Artificial Sequence; identical to SEQ ID NO: 211590
  derived and/or modified CDS sequence (opt5) from neuraminidase__InfluenzaA__AHC59716

SEQ ID NO: 216163 - RNA, 1410 nt, Artificial Sequence; identical to SEQ ID NO: 211590
  derived and/or modified CDS sequence (opt5) from neuraminidase__InfluenzaA__AHC59728

SEQ ID NO: 216164 - RNA, 1410 nt, Artificial Sequence; identical to SEQ ID NO: 216092
  derived and/or modified CDS sequence (opt5) from neuraminidase__InfluenzaA__AHC59752

SEQ ID NO: 216165 - RNA, 1410 nt, Artificial Sequence; identical to SEQ ID NO: 216079
  derived and/or modified CDS sequence (opt5) from neuraminidase__InfluenzaA__AHC59764

SEQ ID NO: 216166 - RNA, 1410 nt, Artificial Sequence
  derived and/or modified CDS sequence (opt5) from neuraminidase__InfluenzaA__AHC59776
augaaccccaaucagaagaucauuaccaucggcagcgugucccugacaauuucuacgaucugcuucuuuaugcaaauugccauccucaucaccacagucacccugcacuucaaacaguacgaguuuuauagcccuccgaacaaucagguuaugcuuugugaacccacaauuaucgagagaaacauuaccgaaaucguguaccugacaaauaccacgauugagaaggaaaucugcccuaaacucgcugaguaucggaacugguccaagccccagugugacauuaccggguucgccccuuuuucuaaagauaauagcauccgccuguccgcgggaggcgacaucugggugacaagagagcccuacgucucuugcgauccugacaaguguuaucaauucgcucuugggcagggaaccacacugaacaaugugcauagcaacaauaccguucgggaucgcacgccguacagaacacuccugaugaacgaacugggcgugcccuuucaccucgggaccaagcaggucugcauugccugguccucuagcuccugucaugacggaaaagccuggcugcacgugugcaucacaggcgaugacaagaaugcuaccgccagcuucauuuauaacggcaaacuuguugauucuguggucuccuggagcaaggagauccugcggacccaggaaucugagugugugugcauuaaugggacauguacgguggucaugaccgacggauccgcuagcggcaaagccgauacaaagauccucuuuaucgaggaagggaagauuguucauaccuccacacugucuggaagcgcgcaacacguggaggaaugcuccugcuacccucgcuaccccggcgugagaugugucugccgggacaacuggaaagggagcaaccgcccuaucguggauauuaauaucaaggaccacucuauuguuuccagcuauguguguucuggacuugucggcgacacccccagaaagaacgauagcuccucuagcucccauugccuggacccgaauaacgaggaaggcgggcacggagugaagggcugggccuucgaugacgggaaugauguuuggaugggacggacgaucaacgagacaagccgccucggcuacgagaccuuuaaagugaucgaaggguggucuaauccuaaguccaaacugcagauuaacagacaggucaucguggaccggggaaaucgcagcggcuauucuggcauuuucuccgucgaggggaaaagcuguaucaacagaugcuuuuacguggaacugauucggggaagaaaggaggaaaccgagguucucuggacauccaauucuaucguggucuucuguggcaccagcgggacauauggaacgggcuccuggcccgauggggcugaccugaaccuuaugccuauuuga

SEQ ID NO: 216167 - RNA, 1410 nt, Artificial Sequence; identical to SEQ ID NO: 216043
  derived and/or modified CDS sequence (opt5) from neuraminidase__InfluenzaA__AHC59788

SEQ ID NO: 216168 - RNA, 1410 nt, Artificial Sequence; identical to SEQ ID NO: 216120
  derived and/or modified CDS sequence (opt5) from neuraminidase__InfluenzaA__AHC59800

SEQ ID NO: 216169 - RNA, 1410 nt, Artificial Sequence
  derived and/or modified CDS sequence (opt5) from neuraminidase__InfluenzaA__AHC59812
augaaccccaaucagaagaucauuaccaucggcagcgugucccugacaauuucuacgaucugcuucuuuaugcaaauugccauccucaucaccacagucacccugcacuucaaacaguacgaguuuaacagcccuccgaauaaccagguugugcuuugugaacccacaauuaucgagagaaauauuaccgaaaucguguaucugacaaacaccacgauugagaaggaaaucugcccuaaacccgcugaguaccggaauugguccaagccucagugugacauuaccggguucgcccccuuuucuaaagauaacagcauccgccucuccgcgggaggcgacaucugggucacaagagagccuuaugugucuugcgauccggacaaguguuaccaauucgcucuggggcagggaaccacacuuaauaacguucauagcaauaacaccgugcgggaucgcacgcccuauagaacacugcucaugaaugaacugggcgucccuuuucaccuggggaccaaacaggugugcauugccugguccucuagcuccugucaugacggaaaggccuggcuccacguuugcaucacaggcgaugacaagaacgcuaccgccagcuucauuuacaauggccggcugguggauucugucguguccuggagcaaagagauccuucgcacccaggaaucugagugugugugcauuaacgggacauguacggucguuaugaccgacggauccgcuagcggcaaggccgauacaaaaauccuguuuaucgaggaagggaagauuguguauaccuccacacucucuggaagcgcgcaacauguggaggaaugcuccugcuaccccagauacccuggcguccggugugugugccgcgacaacuggaaggggagcaauagacccaucguugauauuaacaucaaagaccacucuauuguguccagcuaugucuguucuggacuggugggcgacaccccgcggaagaaugauagcuccucuagcucccacugccuugacccuaacaaugaggaaggcgggcauggaguuaaaggcugggccuucgaugacgggaacgauguguggaugggacgcacgaucaaugagacaagcagacugggcuacgagaccuuuaaggucaucgaaggguggucuaaccccaaauccaagcuccagauuaaucgccaggugaucgucgaccggggagauagaagcggcuauucuggcauuuucuccguggaggggaaaagcuguaucaaccggugcuuuuacguugaacugauuagaggacgcaaggaggaaaccgaggugcuguggacauccaauucuaucgucguguucuguggcaccagcgggacauauggaacgggcuccuggccugacggggcugaucucaaccugaugcccauuuga

SEQ ID NO: 216170 - RNA, 1410 nt, Artificial Sequence
  derived and/or modified CDS sequence (opt5) from neuraminidase__InfluenzaA__AHC59824
augaaccccaaucagaagaucauuaccaucggcagcgugucccugacaauuucuacgaucugcuucuuuaugcaaauugccauccucaucaccacagucacccugcacuucaaacaguacgaguuuuauagcccuccgaacaaucagguuaugcuuugugaacccacaauuaucgagagaaacauuaccgaaaucguguaccugacaaauaccacgauugagaaggaaaucugcccuaaacucgcugaguaucggaagugguccaaaccccagugugacauuaccggguucgccccuuuuucuaaggauaacagcauccgccuguccgcgggaggcgacaucugggugacaagagagcccuacgucucuugcgauccugacaaguguuaucaauucgcucuugggcagggaaccacacugaauaacgugcauagcaauaacaccguucgggaucgcacgccguacagaacacuccugaugaaugaacugggcgugcccuuucaccucgggaccaaacaggucugcauugccugguccagcagcuccugucaugacggaaaggccuggcugcacgugugcaucacaggcgaugacaaaaacgcuaccgccagcuucauuuauaauggccggcuuguugauucuguggucuccuggagcaaggagauccugcgcacccaggaaucugagugugugugcauuaacgggacauguacgguggucaugaccgacggauccgcuagcggcaaagccgauacaaagauccucuuuaucgaggaagggaagauuguucauaccuccacacugucuggaagcgcgcaacacguggaggaaugcuccugcuacccuagauaccccggcgugcggugugucugccgcgacaauuggaaagggagcaacagaccuaucguggauauuaacaucaaggaccacucuauuguuuccagcuauguguguucuggacuugucggcgacacgccccggaaaaaugauagcuccucuagcucccauugccuggacccgaacaaugaggaaggcgggcacggagugaagggcugggccuucgaugacgggaacgauguuuggaugggacgcaccaucaaugagacaagcagacucggcuacgagaccuuuaaagugaucgaaggguggucuaacccuaaguccaaacugcagauuaaucggcaggucaucguggaccgcggaaacagaagcggcuauucuggcauuuucuccgucgaggggaagucuuguaucaaucggugcuuuuacguggaacugauuagaggacgcaaggaggaaaccgagguucucuggacauccaacucuaucguggucuucuguggcaccagcgggacauauggaacgggcuccuggcccgauggggcugaccugaaucuuaugccuauuuga

SEQ ID NO: 216171 - RNA, 1410 nt, Artificial Sequence; identical to SEQ ID NO: 216047
  derived and/or modified CDS sequence (opt5) from neuraminidase__InfluenzaA__AHC59836

SEQ ID NO: 216172 - RNA, 1410 nt, Artificial Sequence; identical to SEQ ID NO: 214994
  derived and/or modified CDS sequence (opt5) from neuraminidase__InfluenzaA__AHC59848

SEQ ID NO: 216173 - RNA, 1410 nt, Artificial Sequence; identical to SEQ ID NO: 216043
  derived and/or modified CDS sequence (opt5) from neuraminidase__InfluenzaA__AHC59860

SEQ ID NO: 216174 - RNA, 1410 nt, Artificial Sequence; identical to SEQ ID NO: 216090
  derived and/or modified CDS sequence (opt5) from neuraminidase__InfluenzaA__AHC59872

SEQ ID NO: 216175 - RNA, 1410 nt, Artificial Sequence; identical to SEQ ID NO: 216079
  derived and/or modified CDS sequence (opt5) from neuraminidase__InfluenzaA__AHC59884

SEQ ID NO: 216176 - RNA, 1410 nt, Artificial Sequence
  derived and/or modified CDS sequence (opt5) from neuraminidase__InfluenzaA__AHC59895
augaaccccaaucagaagaucauuaccaucggcagcgugucccugacaauuucuacgaucugcuucuuuaugcaaauugccauccucaucaccacagucacccugcacuucaaacaguacgaguuuaacagcccuccgaauaaccagguuaugcuuugugaacccacaauuaucgagagaaauauuaccgaaaucguguaucugacaaacaccacgauugagaaggaaaucugcccuaaacucgcugaguaccggaauugguccaagccccagugugacauuaccggguucgccccuuuuucuaaagauaacagcauccgccuguccgcgggaggcgacaucugggugacaagagagcccuaugucucuugcgauccugacaaguguuaccaauucgcucuugggcagggaaccacacugaauaacgugcauagcaauaacaccguucgggaucgcacgccguauagaacacuccugaugaaugaacugggcgugcccuuucaccucgggaccaagcaggucugcauugccugguccagcagcuccugucaugacggaaaagccuggcugcacgugugcaucacaggcgaugacaagaacgcuaccgccagcuucauuuacaauggccggcuuguugauucuguggucuccuggagcaaagagauccugcgcacccaggaaucugagugugugugcauuaacgggacauguacgguggucaugaccgacggauccgcuagcggcaaggccgauacaaaaauccucuuuaucaaggaggggaagauuguucauaccuccacacugucuggaagcgcgcaacacguggaagagugcuccugcuauccuagauaccccggcgugcggugugucugccgcgacaacuggaaagggagcaauagaccuaucguggauauuaacaucaaggaccacucuauuguuuccagcuacguguguucuggacuugucggcgacacgccccggaaaaaugauagcuccucuagcucccauugccuggacccgaacaaugaagagggcgggcacggagugaagggcugggccuucgaugacgggaacgauguuuggaugggacgcaccaucaaugaaacaagcagacucggcuaugagaccuuuaaagugaucgagggguggucuaacccuaaguccaaacugcagauuaaucggcaggucaucguggaccgcggaaacagaagcggcuacucuggcauuuucuccgucgaagggaagucuuguaucaaucggugcuuuuauguggagcugauuagaggacgcaaggaagagaccgaaguucucuggacauccaacucuaucguggucuucuguggcaccagcgggacauacggaacgggcuccuggcccgauggggcugaccugaaucuuaugccuauuuga

SEQ ID NO: 216177 - RNA, 1410 nt, Artificial Sequence; identical to SEQ ID NO: 216047
  derived and/or modified CDS sequence (opt5) from neuraminidase__InfluenzaA__AHC59907

SEQ ID NO: 216178 - RNA, 1410 nt, Artificial Sequence
  derived and/or modified CDS sequence (opt5) from neuraminidase__InfluenzaA__AHC59918
augaaccccaaucagaagaucauuaccaucggcagcgugucccugacaauuucuacgaucugcuucuuuauucaaaucgccauccucauuaccacagucacccugcacuucaaacaguacgaguuuaacagcccuccgaauaaccagguuaugcuuugugaacccacaaucauugagagaaauaucaccgaaauuguguaucugacaaacaccacgaucgagaaggaaauuugcccuaaacucgcugaguaccggaauugguccaagccccagugugacaucaccggguucgccccuuuuucuaaagauaacagcauccgccuguccgcgggaggcgacauuugggugacaagagagcccuaugucucuugcgauccugacaaguguuaccaauucgcucuugggcagggaaccacacugaauaacgugcauagcaauaacaccguucgggaucgcacgccguauagaacacuccugaugaaugaacugggcgugcccuuucaccucgggaccaagcaggucugcaucgccugguccucuagcuccugucaugacggaaaagccuggcugcacgugugcauuacaggcgaugacaagaacgcuaccgccagcuucaucuacaauggccggcuuguugauucuguggucuccuggagcaaagagauucugcgcacccaggaaucugagugugugugcaucaacgggacauguacgguggucaugaccgacggauccgcuagcggcaaggccgauacaaaaauccucuuuauugaggaagggaagaucguucauaccuccacacugucuggaagcgcgcaacacguggaggaaugcuccugcuauccuagauaccccggcgugcggugugucugccgcgacaacuggaaggggagcaauagaccuauuguggauaucaacauuaaagaccacucuaucguuuccagcuacguguguucuggacuugucggcgacacgccccggaagaaugauagcuccucuagcucccauugccuggacccgaacaaugaggaaggcgggcacggagugaaaggcugggccuucgaugacgggaacgauguuuggaugggacgcaccaucaaugagacaagcagacucggcuaugagaccuuuaaggugauugaaggguggucuaacccuaaauccaagcugcagaugaaucggcaggucaucguggaccgcggaaacagaagcggcuacucuggcauuuucuccgucgaggggaaaagcuguaucaaucggugcuuuuauguggaacugauuagaggacgcaaggaggaaaccgagguucucuggacauccaacucuaucguggucuucuguggcaccagcgggacauacggaacgggcuccuggcccgauggggcugaccugaaucuuaugccuauuuga

SEQ ID NO: 216179 - RNA, 1410 nt, Artificial Sequence; identical to SEQ ID NO: 216178
  derived and/or modified CDS sequence (opt5) from neuraminidase__InfluenzaA__AHC59930

SEQ ID NO: 216180 - RNA, 1410 nt, Artificial Sequence; identical to SEQ ID NO: 216047
  derived and/or modified CDS sequence (opt5) from neuraminidase__InfluenzaA__AHC59942

SEQ ID NO: 216181 - RNA, 1410 nt, Artificial Sequence; identical to SEQ ID NO: 216092
  derived and/or modified CDS sequence (opt5) from neuraminidase__InfluenzaA__AHC59954

SEQ ID NO: 216182 - RNA, 1410 nt, Artificial Sequence
  derived and/or modified CDS sequence (opt5) from neuraminidase__InfluenzaA__AHC59966
augaaccccaaucagaagaucauuaccaucggcagcgugucccugacaauuucuacgaucugcuucuuuaugcaaauugccauccucaucaccacagucacccugcacuucaaacaguacgaguuuaacagcuccccuaauaaccagguuaugcuuugugaaccgacaauuaucgagagaaauauuaccgaaaucguguaucugacaaacaccacgauugagaaggaaaucugccccaaaccugcugaguaccggaauuggucuaagccccagugugacauuaccggguucgccccuuuuagcaaagauaacuccauccgccucucugcgggaggcgacaucugggugacaagagagcccuaugucagcugcgauccugacaaguguuaccaauucgcucuggggcagggaaccacacuuaauaacgugcauuccaauaacaccguucgggaucgcacgccguauagaacacugcucaugaaugaacugggcgugcccuuucaccuggggaccaagcaggucugcauugccuggucuagcuccagcugucaugacggaaaagccuggcuccacgugugcaucacaggcgaugacaagaacgcuaccgccucuuucauuuacaauggccggcugguugauuccguggucagcuggucuaaagagauccuucgcacccaggaauccgagugugugugcauuaacgggacauguacgguggucaugaccgacggaagcgcuuccggcaaggccgauacaaaaauccuguuuaucgaggaagggaagauuguucauaccucuacacucagcggauccgcgcaacacguggaggaaugcagcugcuauccuagauaccccggcgugcggugugucugccgcgacaacuggaaggggucuaauagaccuaucguggauauuaacaucaaagaccacuccauuguuagcucuuacguguguagcggacuggucggcgacacgccccggaagaaugauuccucuagcuccagccauugccuugacccgaacaaugaggaaggcgggcacggagugaaaggcugggccuucgaugacgggaacgauguuuggaugggacgcaccaucaaugagacaucuagacugggcuaugagaccuuuaaggugaucgaagggugguccaacccuaaaagcaagcuccagauuaaucggcaggucaucguggaccgcggagauggcucuggcuacuccgggauuuucagcgucgagggaaaauccuguaucaacagaugcuuuuauguggaacugauucggggcagaaaggaggaaaccgagguucuguggacaucuaauagcaucguggucuucugugggaccuccggaacauacggcacggggucuuggcccgacggcgcugaucucaaccugaugccuauuuga

SEQ ID NO: 216183 - RNA, 1410 nt, Artificial Sequence; identical to SEQ ID NO: 214994
  derived and/or modified CDS sequence (opt5) from neuraminidase__InfluenzaA__AHC59978

SEQ ID NO: 216184 - RNA, 1410 nt, Artificial Sequence; identical to SEQ ID NO: 212956
  derived and/or modified CDS sequence (opt5) from neuraminidase__InfluenzaA__AHC59990

SEQ ID NO: 216185 - RNA, 1410 nt, Artificial Sequence; identical to SEQ ID NO: 216092
  derived and/or modified CDS sequence (opt5) from neuraminidase__InfluenzaA__AHC60002

SEQ ID NO: 216186 - RNA, 1410 nt, Artificial Sequence; identical to SEQ ID NO: 216047
  derived and/or modified CDS sequence (opt5) from neuraminidase__InfluenzaA__AHC60014

SEQ ID NO: 216187 - RNA, 1410 nt, Artificial Sequence; identical to SEQ ID NO: 211590
  derived and/or modified CDS sequence (opt5) from neuraminidase__InfluenzaA__AHC60026

SEQ ID NO: 216188 - RNA, 1410 nt, Artificial Sequence; identical to SEQ ID NO: 216043
  derived and/or modified CDS sequence (opt5) from neuraminidase__InfluenzaA__AHC60038

SEQ ID NO: 216189 - RNA, 1410 nt, Artificial Sequence; identical to SEQ ID NO: 216043
  derived and/or modified CDS sequence (opt5) from neuraminidase__InfluenzaA__AHC60050

SEQ ID NO: 216190 - RNA, 1410 nt, Artificial Sequence
  derived and/or modified CDS sequence (opt5) from neuraminidase__InfluenzaA__AHC60062
augaaccccaaucagaagaucauuaccaucggcagcgugucccugacaauuucuacgaucugcuucuuuaugcaaauugccauccucaucaccacagucaccaugcacuucaaacaguacgaguuuaacagcccuccgaauaaccagguuaugcugugugaacccacaauuaucgagagaaauauuaccgaaaucguguaucuuacaaacaccacgauugagaaggaaaucugcccuaaacuggcugaguaccggaauugguccaagccccagugugacauuaccggguucgccccuuuuucuaaagauaacagcauccgccucuccgcgggaggcgacaucugggugacaagagagcccuaugucucuugcgauccugacaaguguuaccaauucgcucuggggcagggaaccacacuuaauaacgugcauagcaauaacaccguucgggaucgcacgccguauagaacacugcucaugaaugaacugggcgugcccuuucaccuggggaccaagcaggucugcauugccugguccucuagcuccugucaugacggaaaagccuggcuccacgugugcaucacaggcgaugacaagaacgcuaccgccagcuucauuuacaauggcaaacugguugauucuguggucuccuggagcaaggagauccuucggacccaggaaucugagugugugugcauuaacgggacauguacgguggucaugaccgacggauccgcuagcggcaaagccgauacaaagauccuguuuaucgaggaagggaagauuguucauaccuccacacucucuggaagcgcgcaacacguggaggaaugcuccugcuauccucgcuaccccggcgugagaugugucugccgggacaacuggaaagggagcaaucgcccuaucguggauauuaacaucaaggaccacucuauuguuuccagcuacguguguucuggacuggucggcgacacccccagaaagaaugauagcuccucuagcucccauugccuugacccgaacaaugaggaaggcgggcacggagugaagggcugggccuucgaugacgggaacgauguuuggaugggacggacgaucaaugagacaagccgccugggcuaugagaccuuuaaagugaucgaaggguggucuaacccuaaguccaaacuccagauuaauagacaggucaucguggaccggggaaaccgcagcggcuacucuggcauuuucuccgucgaggggaaaagcuguaucaauagaugcuuuuauguggaacugauucggggaagaaaggaggaaaccgagguucuguggacauccaacucuaucguggucuucuguggcaccagcgggacauacggaacgggcuccuggcccgauggggcugaccucaaucugaugccuauuuga

SEQ ID NO: 216191 - RNA, 1410 nt, Artificial Sequence; identical to SEQ ID NO: 214994
  derived and/or modified CDS sequence (opt5) from neuraminidase__InfluenzaA__AHC60074

SEQ ID NO: 216192 - RNA, 1410 nt, Artificial Sequence; identical to SEQ ID NO: 216047
  derived and/or modified CDS sequence (opt5) from neuraminidase__InfluenzaA__AHC60086

SEQ ID NO: 216193 - RNA, 1410 nt, Artificial Sequence
  derived and/or modified CDS sequence (opt5) from neuraminidase__InfluenzaA__AHC60098
augaaccccaaucagaagaucauuaccaucggcagcgugucccugacaauuucuacgaucugcuucuuuaugcaaauugccauccucaucaccacagucacccugcacuucaaacaguacgaguuuuauagcccuccgaacaaucagguuaugcuuugugaacccacaauuaucgagagaaacauuaccgaaaucguguaccugacaaauaccacgauugagaaggaaaucugcccuaaacucgcugaguaucggaacugguccaagccccagugugacauuaccggguucgccccuuuuucuaaagauaauagcauccgccuguccgcgggaggcgacaucugggugacaagagagcccuacgucucuugcgauccugacaaguguuaucaauucgcucuugggcagggaaccacacugaacaaugugcauagcaacaauaccguucgggaucgcacgccguacagaacacuccugaugaacgaacugggcgugcccuuucaccucgggaccaagcaggucugcauugccugguccucuagcuccugucaugacggaaaagccuggcugcacgugugcaucacaggcgaugacaagaaugcuaccgccagcuucauuuauaacggccggcuuguugauucuguggucuccuggagcaaagagauccugcgcacccaggaaucugagugugugugcauuaaugggacauguacgguggucaugaccgacggauccgcuagcggcaaggccgauacaaaaauccucuuuaucgaggaagggaagauuguucauaccuccacacugucuggaagcgcgcaacacguggaggaaugcuccugcuacccuagauaccccggcgugcggugugucugccgcgacaacuggaaggggagcaacagaccuaucguggauauuaauaucaaagaccacucuauuguuuccagcuauguguguucuggacuugucggcgacacgccccggaagaacgauagcuccucuagcucccauugccuggacccgaauaacgaggaaggcgggcacggagugaaaggcugggccuucgaugacgggaaugauguuuggaugggacgcaccaucgacgagacaagcagacucggcuacgagaccuuuaaggugaucgaaggguggucuaacccuaaauccaagcugcagauuaaucggcaggucaucguggaucgcggaaacagaagcggcuauucuggcauuuucuccgucgaggggaaaagcuguaucaaucggugcuuuuacguggaacugauuagaggacgcaaggaggaaaccgagguucucuggacauccaacucuaucguggucuucuguggcaccagcgggacauauggaacgggcuccuggcccgacggggcugaucugaaucuuaugccuauuuga

SEQ ID NO: 216194 - RNA, 1410 nt, Artificial Sequence; identical to SEQ ID NO: 216043
  derived and/or modified CDS sequence (opt5) from neuraminidase__InfluenzaA__AHC60110

SEQ ID NO: 216195 - RNA, 1410 nt, Artificial Sequence; identical to SEQ ID NO: 216120
  derived and/or modified CDS sequence (opt5) from neuraminidase__InfluenzaA__AHC60122

SEQ ID NO: 216196 - RNA, 1410 nt, Artificial Sequence; identical to SEQ ID NO: 216047
  derived and/or modified CDS sequence (opt5) from neuraminidase__InfluenzaA__AHC60134

SEQ ID NO: 216197 - RNA, 1410 nt, Artificial Sequence; identical to SEQ ID NO: 216101
  derived and/or modified CDS sequence (opt5) from neuraminidase__InfluenzaA__AHC60146

SEQ ID NO: 216198 - RNA, 1410 nt, Artificial Sequence; identical to SEQ ID NO: 216178
  derived and/or modified CDS sequence (opt5) from neuraminidase__InfluenzaA__AHC60158

SEQ ID NO: 216199 - RNA, 1410 nt, Artificial Sequence; identical to SEQ ID NO: 216043
  derived and/or modified CDS sequence (opt5) from neuraminidase__InfluenzaA__AHC60182

SEQ ID NO: 216200 - RNA, 1410 nt, Artificial Sequence
  derived and/or modified CDS sequence (opt5) from neuraminidase__InfluenzaA__AHC60206
augaaccccaaucagaagaucauuaccaucggcagcgugucccugacaauuucuaucauuugcuucuuuaugcaagucgccauccucaucacgaccguuacacugcacuucaaacaguacgaguuuaacagcccuccgaauaaccaggugaugcuuugugaacccaccauuaucgagagaaauauuacagaaaucguguaucugaccaacacaaccauugagaaggaaaucugcccuaaacucgcugaguaccggaauugguccaagccccagugugacauuacgggguucgccccuuuuucuaaagauaacagcauccgccuguccgcgggaggcgacaucugggucaccagagagcccuaugugucuugcgauccugacaaguguuaccaauucgcucuugggcagggaacaacccugaauaacguucauagcaauaacacagugcgggaucgcaccccguauagaacgcuccugaugaaugaacugggcguccccuuucaccucgggacaaaacaggugugcauugccugguccagcagcuccugucaugacggaaaagccuggcugcacguuugcaucaccggcgaugacaagaacgcuacagccagcuucauuuacaauggcaaacuuguggauucugucguguccuggagcaaggagauccugcggacccaggaaucugagugugugugcauuaacgggaccuguacagucguuaugacggacggauccgcuagcggcaaagccgauaccaagauccucuuuaucgaggaagggaagauugugcauacauccacccugucuggaagcgcgcaacacguggaggaaugcuccugcuauccucgcuaccccggcgucagaugugugugccgggacaacuggaaagggagcaaucgcccuaucguugauauuaacaucaaggaccacucuauuguguccagcuacgucuguucuggacuugugggcgacacacccagaaagaaugauagcuccucuagcucccauugccuggacccgaacaaugaggaaggcgggcacggaguuaagggcugggccuucgaugacgggaacgauguguggaugggacggaccaucaaugagacgagccgccucggcuaugagacauuuaaagucaucgaaggguggucuaacccuaaguccaaacugcagauuaauagacaggugaucgucgaccggggaaaccgcagcggcuacucuggcauuuucuccguggaggggaagucuuguaucaauagaugcuuuuauguugaacugauucggggaagaaaggaggaaaccgaggugcucuggaccuccaacucuaucgucguguucuguggcacaagcgggaccuacggaacaggcuccuggcccgauggggcugaccugaaucuuaugccuauuuga

SEQ ID NO: 216201 - RNA, 1410 nt, Artificial Sequence; identical to SEQ ID NO: 214994
  derived and/or modified CDS sequence (opt5) from neuraminidase__InfluenzaA__AHC60218

SEQ ID NO: 216202 - RNA, 1410 nt, Artificial Sequence; identical to SEQ ID NO: 211590
  derived and/or modified CDS sequence (opt5) from neuraminidase__InfluenzaA__AHC60230

SEQ ID NO: 216203 - RNA, 1410 nt, Artificial Sequence; identical to SEQ ID NO: 216043
  derived and/or modified CDS sequence (opt5) from neuraminidase__InfluenzaA__AHC60242

SEQ ID NO: 216204 - RNA, 1410 nt, Artificial Sequence; identical to SEQ ID NO: 216043
  derived and/or modified CDS sequence (opt5) from neuraminidase__InfluenzaA__AHC60254

SEQ ID NO: 216205 - RNA, 1410 nt, Artificial Sequence; identical to SEQ ID NO: 216043
  derived and/or modified CDS sequence (opt5) from neuraminidase__InfluenzaA__AHC60266

SEQ ID NO: 216206 - RNA, 1410 nt, Artificial Sequence; identical to SEQ ID NO: 216092
  derived and/or modified CDS sequence (opt5) from neuraminidase__InfluenzaA__AHC60278

SEQ ID NO: 216207 - RNA, 1410 nt, Artificial Sequence; identical to SEQ ID NO: 216043
  derived and/or modified CDS sequence (opt5) from neuraminidase__InfluenzaA__AHC60290

SEQ ID NO: 216208 - RNA, 1410 nt, Artificial Sequence
  derived and/or modified CDS sequence (opt5) from neuraminidase__InfluenzaA__AHC60302
augaaccccaaucagaagaucauuaccaucggcagcgugucccugacaauuucuacgaucugcuucuuuaugcaaauugccauccucaucaccacagucacccugcacuucaaacaguacgaguuuaacagcccuccgaauaaccagguuaugcuuugugaacccacaauuaucgagagaaauauuaccgaaaucguguaucugacaaacaccacgauugagaaggaaaucugcccuaaacucgcugaguaccggaauugguccaagccccagugugacauuaccggguucgccccuuuuucuaaagauaacagcauccgccuguccgcgggaggcgacaucugggugacaagagagcccuaugucucuugcgauccuaauaaguguuaccaauucgcucuugggcagggaaccacacugaacaaugugcauagcaacaauaccguucgggaccgcacgccguauagaacacuccugaugaacgaacugggcgugcccuuucaccucgggaccaagcaggucugcauugccugguccucuagcuccugucaugauggaaaagccuggcugcacgugugcaucacaggcgacgauaagaaugcuaccgccagcuucauuuacaacggcaaacuuguugacucuguggucuccuggagcaaggagauccugcggacccaggaaucugagugugugugcauuaacgggacauguacgguggucaugaccgauggauccgcuagcggcaaagccgacacaaagauccucuuuaucgaggaagggaagauuauccauaccuccacacugucuggaagcgcgcaacacguugaggaaugcuccugcuauccucgcuaccccggcgugagaugugugugccgggauaauuggaaagggagcaaccgcccuauugucgacaucaauauuaaggaucacucuaucguguccagcuacguuuguucuggacuugugggcgacacccccagaaagaacgacagcuccucuagcucccauugccuggauccgaauaacgaggaaggcgggcacggagucaagggcugggccuucgacgaugggaaugacguguggaugggacggacgaucaacgagacaagccgccucggcuaugagaccuuuaaaguuauugaaggguggucuaauccuaaguccaaacugcagaucaacagacaggugauugucgaucggggaaaucgcagcggcuacucuggcaucuucuccguggaggggaaaagcuguauuaacagaugcuuuuaugucgaacugauccggggaagaaaggaggaaaccgaggugcucuggacauccaauucuauuguuguguucuguggcaccagcgggacauacggaacgggcuccuggcccgacggggcugaucugaaccuuaugccuaucuga

SEQ ID NO: 216209 - RNA, 1410 nt, Artificial Sequence; identical to SEQ ID NO: 216043
  derived and/or modified CDS sequence (opt5) from neuraminidase__InfluenzaA__AHC60314

SEQ ID NO: 216210 - RNA, 1410 nt, Artificial Sequence; identical to SEQ ID NO: 216043
  derived and/or modified CDS sequence (opt5) from neuraminidase__InfluenzaA__AHC60326

SEQ ID NO: 216211 - RNA, 1410 nt, Artificial Sequence
  derived and/or modified CDS sequence (opt5) from neuraminidase__InfluenzaA__AHC60338
augaaccccaaucagaagaucauuaccaucggcagcgugucccugacaauuucuacgaucugcuucuuuaugcaaauugccauccucaucaccacagucacccugcacuucaaacaguacgaguuuaacagcccuccgaauaaccagguuaugcuuugugaacccacaauuaucgagagaaauauuaccgaaaucguguaucugacaaacaccacgauugagaaggaaaucugcccuaaacccgcugaguaccggaauugguccaagccucagugugacauuaccggguucgcccccuuuucuaaagauaacagcauccgccucuccgcgggaggcgacaucugggugacaagagagccuuaugucucuugcgauccggacaaguguuaccaauucgcucuggggcagggaaccacacuuaauaacgugcauagcaauaacaccguucgggaucgcacgcccuauagaacacugcucaugaaugaacugggcgugccuuuucaccuggggaccaagcaggucugcauugccugguccucuagcuccugucaugacggaaaagccuggcuccacgugugcaucacaggcgaugacaagaacgcuaccgccagcuucauuuacaauggccggcugguugauucuguggucuccuggagcaaagagauccuucgcacccaggaaucugagugugugugcauuaacgggacauguacgguggucaugaccgacggauccgcuagcggcaaggccgauacaaaaauccuguuuaucgaggaagggaagauuguucauaccuccacacucucuggaagcgcgcaacacguggaggaaugcuccugcuaucccagauacccuggcgugcggugugucugccgcgacaacuggaaggggagcaauagacccaucguggauauuaacaucaaagaccacucuauuguuuccagcuacguguguucuggacuggucggcgacaccccgcggaagaaugauagcuccucuagcucccauugccuugacccuaacaaugaggaaggcgggcacggagugaaaggcugggccuucgaugacggggaugacguuuggaugggacgcacgaucaacgagacaagcagacugggcuaugagaccuuuaaggugaucgaaggguggucuaaucccaaauccaagcuccagauuaaccggcaggucaucguggaucgcggagacagaagcggcuacucuggcauuuucuccgucgaggggaaaagcuguaucaaucggugcuuuuauguggaacugauuagaggacgcaaggaggaaaccgagguucuguggacauccaacucuaucguggucuucuguggcaccagcgggacauacggaacgggcuccuggccugauggggcugaccucaaucugaugcccauuuga

SEQ ID NO: 216212 - RNA, 1410 nt, Artificial Sequence; identical to SEQ ID NO: 212956
  derived and/or modified CDS sequence (opt5) from neuraminidase__InfluenzaA__AHC60350

SEQ ID NO: 216213 - RNA, 1410 nt, Artificial Sequence
  derived and/or modified CDS sequence (opt5) from neuraminidase__InfluenzaA__AHC60362
augaaccccaaucagaagaucauuaccaucggcagcgugucccugacaauuucuacgaucugcuucuuuaugcaagucgccauucucaucaccacaguuacccugcacuucaaacaguacgaguuuaacagcccuccgaauaaccaggugaugcuuuguaagcccacaaucauugaaagaaauaucaccgagauuguguaucugacaaacaccacgaucgaaaaagagauuugcccuaagcucgcugaauaccggaauugguccaaaccccagugugacaucaccggguucgccccuuuuucuaaggauaacagcauucgccuguccgcgggaggcgacaucugggucacaagagagcccuaugugucuugcgauccugacaaguguuaccaauucgcucuugggcagggaaccacacugaauaacguucauagcaauaacaccgugcgggaucgcacgccguauagaacacuccugaugaaugagcugggcguccccuuucaccucgggaccaaacaggugugcaucgccugguccagcagcuccugucaugacggaaaggccuggcugcacguuugcauuacaggcgaugacaaaaacgcuaccgccagcuucaucuacaauggcaaacuuguggauucugucguguccuggagcaaggaaauucugcggacccaggagucugaaugugugugcaucaacgggacauguacggucguuaugaccgacggauccgcuagcggcaaggccgauacaaagauucucuuuaucgaggaggggaaaaucgugcauaccuccacacugucuggaagcgcgcaacacguggaagagugcuccugcuauccucgcuaccccggcgucagaugugugugccgggacaacuggaaggggagcaaucgcccuauuguugauaucaacauuaaagaccacucuaucguguccagcuacgucuguucuggacuugugggcgacacccccagaaagaaugauagcuccucuagcucccauugccuggacccgaacaaugaagagggcgggcacggaguuaaaggcugggccuucgaugacgggaacgauguguggaugggacggacgauuaaugaaacaagccgccucggcuaugagaccuuuaaggucaucgagggguggucuaacccuaaauccaagcugcagaucaauagacaggugauugucgaccggggaaaccgcagcggcuacucuggcaucuucuccguggaagggaagucuuguauuaauagaugcuuuuauguugagcugauccggggaagaaaagaagagaccgaagugcucuggacauccaacucuauugucguguucuguggcaccagcgggacauacggaacgggcuccuggcccgauggggcugaccugaaucuuaugccuaucuga

SEQ ID NO: 216214 - RNA, 1410 nt, Artificial Sequence; identical to SEQ ID NO: 215955
  derived and/or modified CDS sequence (opt5) from neuraminidase__InfluenzaA__AHC60374

SEQ ID NO: 216215 - RNA, 1410 nt, Artificial Sequence; identical to SEQ ID NO: 211590
  derived and/or modified CDS sequence (opt5) from neuraminidase__InfluenzaA__AHC60386

SEQ ID NO: 216216 - RNA, 1410 nt, Artificial Sequence; identical to SEQ ID NO: 216047
  derived and/or modified CDS sequence (opt5) from neuraminidase__InfluenzaA__AHC60398

SEQ ID NO: 216217 - RNA, 1410 nt, Artificial Sequence; identical to SEQ ID NO: 216079
  derived and/or modified CDS sequence (opt5) from neuraminidase__InfluenzaA__AHC60410

SEQ ID NO: 216218 - RNA, 1410 nt, Artificial Sequence; identical to SEQ ID NO: 211590
  derived and/or modified CDS sequence (opt5) from neuraminidase__InfluenzaA__AHC60422

SEQ ID NO: 216219 - RNA, 1410 nt, Artificial Sequence; identical to SEQ ID NO: 216079
  derived and/or modified CDS sequence (opt5) from neuraminidase__InfluenzaA__AHC60434

SEQ ID NO: 216220 - RNA, 1410 nt, Artificial Sequence; identical to SEQ ID NO: 216047
  derived and/or modified CDS sequence (opt5) from neuraminidase__InfluenzaA__AHC60446

SEQ ID NO: 216221 - RNA, 1410 nt, Artificial Sequence
  derived and/or modified CDS sequence (opt5) from neuraminidase__InfluenzaA__AHC60458
augaaccccaaucagaagaucauuaccaucggcagcgugucccugacaauuucuacgaucugcuucuuuaugcaaauugccauccucaucaccacagucacccugcacuucaaacaguacgaguuuaacagcccuccgaauaaccagguuaugcuuugugaacccacaauuaucgagagaaauauuaccgaaaucguguaucugacaaacaccacgauugagaaggaaaucugcccuaaacucgcugaguaccggaauugguccaagccccagugugacauuaccggguucgccccuuuuucuaaagauaacagcauccgccuguccgcgggaggcgacaucugggugacaagagagcccuaugucucuugcgauccugacaaguguuaccaauucgcucuugggcagggaaccacacugaauaacgugcauagcaauaacaccguucgggaucgcacgccguauagaacacuccugaugaaugaacugggcgugcccuuucaccucgggaccaagcaggucugcauugccugguccucuagcuccugucaugacggaaaagccuggcugcacgugugcaucacaggcgaugacaagaacgcuaccgccagcuucauuuacaauggccggcuuguugauucuguggucuccuggagcaaagagauccugcgcacccaggaaucugagugugugugcauuaacgggacaugugcuguggucaugacggacggauccgccagcggcaaggcggauaccaaaauccucuuuaucgaggaagggaagauuguucauacauccacccugucuggaagcgcccaacacguggaggaaugcuccugcuauccuagauaccccggcgugcggugugucugccgcgacaacuggaaggggagcaauagaccuaucguggauauuaacaucaaagaccacucuauuguuuccagcuacguguguucuggacuugucggcgacacaccccggaagaaugauggcagcuccucuagccauugccuggacccgaacaaugaggaagggggacacggcgugaaagggugggcuuucgaugacggaaacgauguuuggaugggccgcaccaucaaugagacguccagacucggguaugagacauuuaaggugaucgaaggauggagcaacccuaaaucuaagcugcagauuaaucggcaggucaucguggaccgcggcaacagauccggcuacagcgggauuuucucugucgagggaaaauccuguaucaaucggugcuuuuauguggaacugauuagaggccgcaaggaggaaaccgagguucucuggaccagcaacuccaucguggucuucugugggacaucuggaaccuacggcacagggagcuggcccgauggcgccgaccugaaucuuaugccuauuuga

SEQ ID NO: 216222 - RNA, 1410 nt, Artificial Sequence; identical to SEQ ID NO: 216092
  derived and/or modified CDS sequence (opt5) from neuraminidase__InfluenzaA__AHC60470

SEQ ID NO: 216223 - RNA, 1410 nt, Artificial Sequence
  derived and/or modified CDS sequence (opt5) from neuraminidase__InfluenzaA__AHC60482
augaaccccaaucagaagaucauuaccaucggcagcgugucccugacaauuucuacgaucugcuucuuuaugcaaauugccauccucaccacaaccgucacacugcacuucaaacaguacgaguuuaacagcccuccgaauaaccagguuaugcuuugugaacccaccaucauugagagaaauaucacagaaauuguguaucugaccaacacgaccaucgagaaggaaauuugcccuaaacccgcugaguaccggaauugguccaagccucagugugacaucacaggguucgcccccuuuucuaaagauaacagcauucgccucuccgcgggaggcgacaucugggugaccagagagccuuaugucucuugcgauccggacaaguguuaccaauucgcucuggggcagggaacaacccuuaauaacgugcauagcaauaacacgguucgggaucgcacacccuauagaacccugcucaugaaugaacugggcgugccuuuucaccuggggacaaagcaggucugcaucgccugguccucuagcuccugucaugacggaaaagccuggcuccacgugugcauuaccggcgaugacaagaacgcuaccgccagcuucaucuacaauggccggcugguugauucuguggucuccuggagcaaagagauucuucgcacacaggaaucugagugugugugcaucaacgggacguguaccguggucaugacagacggauccgcuagcggcaaggccgauaccaaaauucuguuuaucgaggaagggaagaucguucauacauccacccucucuggaagcgcgcaacacguggaggaaugcuccugcuaucccagauacccuggcgugcggugugucugccgcgacaacuggaaggggagcaauagacccauuguggauaucaacauuaaagaccacucuaucguuuccagcuacguguguucuggacuggucggcgacacgccgcggaagaaugauagcuccucuagcucccauugccuugacccuaacaaugaggaaggcgggcacggagugaaaggcugggccuucgaugacgggaacgauguuuggaugggacgcacaauuaaugagaccagcagacugggcuaugagaccuuuaaggugaucgaaggguggucuaaccccaaauccaagcuccagaucaaucggcaggucauuguggaccgcggagauagaagcggcuacucuggcaucuucuccgucgaggggaaaagcuguauuaaccggugcuuuuauguggaacugaucagaggacgcaaggaggaaacagagguucuguggaccuccaauucuauuguggucuucuguggcacaagcgggacguacggaaccggcuccuggccugacggggcugaucucaaccugaugcccaucuga

SEQ ID NO: 216224 - RNA, 1410 nt, Artificial Sequence; identical to SEQ ID NO: 216043
  derived and/or modified CDS sequence (opt5) from neuraminidase__InfluenzaA__AHC60494

SEQ ID NO: 216225 - RNA, 1410 nt, Artificial Sequence; identical to SEQ ID NO: 216043
  derived and/or modified CDS sequence (opt5) from neuraminidase__InfluenzaA__AHC60506

SEQ ID NO: 216226 - RNA, 1410 nt, Artificial Sequence; identical to SEQ ID NO: 216047
  derived and/or modified CDS sequence (opt5) from neuraminidase__InfluenzaA__AHC60518

SEQ ID NO: 216227 - RNA, 1410 nt, Artificial Sequence; identical to SEQ ID NO: 216047
  derived and/or modified CDS sequence (opt5) from neuraminidase__InfluenzaA__AHC60542

SEQ ID NO: 216228 - RNA, 1410 nt, Artificial Sequence
  derived and/or modified CDS sequence (opt5) from neuraminidase__InfluenzaA__AHC60554
augaaccccaaucagaagaucauuaccaucggcagcgugucccugacaauuucuacgaucugcuucuuuaugcaaauugccauccucaucaccacagucacccugcacuucaaacaguacgaguuuuauagcccuccgaacaaucagguuaugcuuugugaacccacaaugauugagagaaacaucaccgaaauuguguaccugacaaauaccacgaucgagaaggaaauuugcccuaaacucgcugaguaucggaacugguccaagccccagugugacaucaccggguucgccccuuuuucuaaagauaauagcauucgccuguccgcgggaggcgacaucugggugacaagagagcccuacgucucuugcgauccugacaaguguuaucaauucgcucuugggcagggaaccacacugaacaaugugcauagcaacaauaccguucgggaucgcacgccguacagaacacuccugaugaacgaacugggcgugcccuuucaccucgggaccaagcaggucugcaucgccugguccucuagcuccugucaugacggaaaagccuggcugcacgugugcauuacaggcgaugacaagaaugcuaccgccagcuucaucuauaacggccggcuuguugauucuguggucuccuggagcaaagagauucugcgcacccaggaaucugagugugugugcaucaaugggacauguacgguggucaugaccgacggauccgcuagcggcaaggccgauacaaaaauucucuuuaucgaggaagggaagaucguucauaccuccacacugucuggaagcgcgcaacacguggaggaaugcuccugcuacccuagauaccccggcgugcggugugucugccgcgacaacuggaaggggagcaacagaccuauuguggauaucaauauuaaagaccacucuaucguuuccagcuauguguguucuggacuugucggcgacacgccccggaagaacgauagcuccucuagcucccauugccuggacccgaauaacgaggaaggcgggcacggagugaaaggcugggccuucgaugacgggaaugauguuuggaugggacgcaccauuaacgagacaagcagacucggcuacgagaccuuuaaggugaucgaaggguggucuaauccuaaauccaagcugcagaucaaccggcaggucauuguggaccgcggaaauagaagcggcuauucuggcaucuucuccgucgaggggaaaagcuguauuaaccggugcuuuuacguggaacugaucagaggacgcaaggaggaaaccgagguucucuggacauccaauucuauuguggucuucuguggcaccagcgggacauauggaacgggcaccuggcccgauggggcugaccugaaccuuaugccuaucuga

SEQ ID NO: 216229 - RNA, 1410 nt, Artificial Sequence
  derived and/or modified CDS sequence (opt5) from neuraminidase__InfluenzaA__AHC60566
augaaccccaaucagaagaucauuaccaucggcagcgugucccugacaauuucuacgaucugcuucuuuaugcaaauugccauccucaucaccacagucacccugcacuucaaacaguacgaguuuaacagcccuccgaauaaccagguuaugcuuugugaacccacaauuaucgagagaaauauuaccgaaaucguguaucugacaaacaccacgauugagaaggaaaucugcccuaaacccgcugaguaccggaauugguccaagccucagugugacauuaccggguucgcccccuuuucuaaagauaacagcauccgccucuccgcgggaggcgacaucugggugacaagagagccuuaugucucuugcgauccggacaaguguuaccaauucgcucuggggcagggaaccacacuuaauaacgugcauagcaauaacaccguucgggaucgcacgcccuauagaacacugcucaugaaugaacugggcgugccuuuucaccuggggaccaagcaggucugcauugccugguccucuagcuccugucaugacggaaaagccuggcuccacgugugcaucacaggcgaugacaagaacgcuaccgccagcuucauuuacaauggccggcugguugauucuguggucuccuggagcaaagagauccuucgcacccaggaaucugagugugugugcauuaacgggacauguacgguggucaugaccgacggauccgcuagcggcaaggccgauacaaaaauccuguuuaucgaggaagggaagauuguucauaccuccacacucucuggaagcgcgcaacacguggaggaaugcuccugcuaucccagauacccuggcgugcggugugucugccgcgacaacuggaaggggagcaauagacccaucguggauauuaacaucaaagaccacucuauuguuuccagcuacguguguucuggacuggucggcgacaccccgcggaagaaugauagcuccucuagcucccauugccuugacccuaacaaugaggaaggcgggcacggagugaaaggcugggccuucgaugacgggaacgauguuuggaugggacgcacgaucaaugagacaagcagacugggcuaugagaccuuuaaggugaucgaaggguggucuaaccccaaauccaagcuccaggucaaucgccaggugauugucgaccggggagauagaagcggcuacucuggcaucuucuccguggaggggaaaagcuguauuaaccggugcuuuuauguugaacugaucagaggacgcaaggaggaaaccgaggugcuguggacauccaauucuauugucguguucuguggcaccagcgggacauacggaacgggcuccuggccugacggggcugaucucaaccugaugcccaucuga

SEQ ID NO: 216230 - RNA, 1410 nt, Artificial Sequence; identical to SEQ ID NO: 214994
  derived and/or modified CDS sequence (opt5) from neuraminidase__InfluenzaA__AHC60578

SEQ ID NO: 216231 - RNA, 1410 nt, Artificial Sequence; identical to SEQ ID NO: 216043
  derived and/or modified CDS sequence (opt5) from neuraminidase__InfluenzaA__AHC60590

SEQ ID NO: 216232 - RNA, 1410 nt, Artificial Sequence
  derived and/or modified CDS sequence (opt5) from neuraminidase__InfluenzaA__AHC60602
augaaccccaaucagaagaucauuaccaucggcagcgugucccugacaauuucuacgaucugcuucuuuaugcaaauugccauccucaucaccacagucacccugcacuucaaacaguacgaguuuaacccuccgcccaauaaccagguugugcuuugugaaccuacaauuaucgagagaaauauuaccgaaaucguguaucugacaaacaccacgauugagaaggaaaucugccccaaaccugcugaguaccggaauuggagcaagccccagugugacauuaccggguucgccccuuuuuccaaagauaacucuauccgccucagcgcgggaggcgacaucugggucacaagagagccguauguguccugcgaucccgacaaguguuaccaauucgcucuggggcagggaaccacacuuaauaacguucauucuaauaacaccgugcgggaucgcacgccuuauagaacacugcucaugaaugaacugggcguccccuuucaccuggggaccaaacaggugugcauugccuggagcuccagcucuugucaugacggaaaggccuggcuccacguuugcaucacaggcgaugacaagaacgcuaccgccuccuucauuuacaauggccggcugguggauagcgucgugucuugguccaaagagauccuucgcacccaggaaagcgagugugugugcauuaacgggacauguacggucguuaugaccgacggaucugcuuccggcaaggccgauacaaaaauccuguuuaucgaggaagggaagauugugcauaccagcacacucuccggaucugcgcaacacguggaggaaugcagcugcuauccuagauaccccggcguccggugugugugccgcgacaacuggaagggguccaauagaccgaucguugauauuaacaucaaagaccacagcauugugucuuccuacgucuguagcggacuggugggcgacaccccucggaagaaugauucuagcuccucuagccauugccuugaccccaacaaugaggaaggcgggcacggaguuaaaggcugggccuucgaugacgggaacgauguguggaugggacgcacgaucaaugagacauccagacugggcuaugagaccuuuaaggucaucgaaggguggagcaacccuaaaucuaagcuccagauuaaucgccaggugaucgucgaccggggagauagauccggcuacagcggcauuuucucuguggaggggaaauccuguaucaaccggugcuuuuauguugaacugauuagaggacgcaaggaggaaaccgaggugcuguggacaagcaauuccaucgucguguucuguggcaccucugggacauacggaacgggcagcuggcccgacggggcugaucucaaccugaugcccauuuga

SEQ ID NO: 216233 - RNA, 1410 nt, Artificial Sequence; identical to SEQ ID NO: 211590
  derived and/or modified CDS sequence (opt5) from neuraminidase__InfluenzaA__AHC60614

SEQ ID NO: 216234 - RNA, 1410 nt, Artificial Sequence; identical to SEQ ID NO: 214994
  derived and/or modified CDS sequence (opt5) from neuraminidase__InfluenzaA__AHC60626

SEQ ID NO: 216235 - RNA, 1410 nt, Artificial Sequence
  derived and/or modified CDS sequence (opt5) from neuraminidase__InfluenzaA__AHC60650
augaaccccaaucagaagaucauuaccaucggcagcgugucccugacaauuucuacgaucugcuucuuuaugcaaauugccauccucaucaccacagucacccugcacuucaaacaguacgaguuuuauagcccuccgaacaaucagguuaugcuuugugaacccacaauuaucgagagaaacauuaccgaaaucguguaccugacaaauaccacgauugagaaggaaaucugcccuaaacucgcugaguaucggaacugguccaagccccagugugacauuaccggguucgccccuuuuucuaaagauaauagcauccgccuguccgcgggaggcgacaucugggugacaagagagcccuacgucucuugcgauccugacaaguguuaucaauucgcucuugggcagggaaccacacugaacaaugugcauagcaacaauaccguucgggaucgcacgccguacagaacacuccugaugaacgaacugggcgugcccuuucaccucgggaccaagcaggucugcauugccugguccagcagcuccugucaugacggaaaagccuggcugcacgugugcaucacaggcgaugacgagaaugcuaccgccagcuucauuuauaacggccggcuuguugauucuguggucuccuggagcaaggaaauccugcgcacccaggagucugagugugugugcauuaaugggacauguacgguggucaugaccgacggauccgcuagcggcaaagccgauacaaagauccucuuuaucgaagaggggaaaauuguucauaccuccacacugucuggaagcgcgcaacacguggaagagugcuccugcuacccuagauaccccggcgugcggugugucugccgcgacaacuggaaggggagcaacagaccuaucguggauauuaauaucaaggaccacucuauuguuuccagcuauguguguucuggacuugucggcgacacgccccggaaaaacgauagcuccucuagcucccauugccuggacccgaauaacgaagagggcgggcacggagugaagggcugggccuucgaugacgggaaugauguuuggaugggacgcaccaucaacgagacaagcagacucggcuacgaaaccuuuaaagugaucgagggguggucuaauccuaaguccaaacugcagauuaaccggcaggucaucguggaccgcggaaauagaagcggcuauucuggcauuuucuccgucgaagggaagucuuguaucaaccggugcuuuuacguggagcugauuagaggacgcaaagaagagaccgagguucucuggacauccaauucuaucguggucuucuguggcaccagcgggacauauggaacgggcuccuggcccgauggggcugaccugaaccuuaugccuauuuga

SEQ ID NO: 216236 - RNA, 1410 nt, Artificial Sequence; identical to SEQ ID NO: 216092
  derived and/or modified CDS sequence (opt5) from neuraminidase__InfluenzaA__AHC60662

SEQ ID NO: 216237 - RNA, 1410 nt, Artificial Sequence; identical to SEQ ID NO: 216047
  derived and/or modified CDS sequence (opt5) from neuraminidase__InfluenzaA__AHC60674

SEQ ID NO: 216238 - RNA, 1410 nt, Artificial Sequence; identical to SEQ ID NO: 211590
  derived and/or modified CDS sequence (opt5) from neuraminidase__InfluenzaA__AHC60686

SEQ ID NO: 216239 - RNA, 1410 nt, Artificial Sequence; identical to SEQ ID NO: 216047
  derived and/or modified CDS sequence (opt5) from neuraminidase__InfluenzaA__AHC60698

SEQ ID NO: 216240 - RNA, 1410 nt, Artificial Sequence; identical to SEQ ID NO: 216043
  derived and/or modified CDS sequence (opt5) from neuraminidase__InfluenzaA__AHC60710

SEQ ID NO: 216241 - RNA, 1410 nt, Artificial Sequence; identical to SEQ ID NO: 216092
  derived and/or modified CDS sequence (opt5) from neuraminidase__InfluenzaA__AHC60722

SEQ ID NO: 216242 - RNA, 1410 nt, Artificial Sequence
  derived and/or modified CDS sequence (opt5) from neuraminidase__InfluenzaA__AHC60734
augaaccccaaucagaagaucauuaccaucggcagcgugucccugacaauuucuacgaucugcuucuuuaugcaaauugccauccucaucaccacagucacccugcacuucaaacaguacgaguuuaacagcccuccgaauaaccagguuaugcuuugugaacccacaauuaucgagagaaauauuaccgaaaucguguaucugauuaacacaaccaucgagaaggaaauuugcccuaaacucgcugaguaccggaauugguccaagccccagugugacaucacgggguucgccccuuuuucuaaagauaacagcauccgccuguccgcgggaggcgacauuugggugaccagagagcccuaugucucuugcgauccuaauaaguguuaccaauucgcucuugggcagggaacaacccugaacaaugugcauagcaacaauacaguucgggaccgcaccccguauagaacgcuccugaugaacgaacugggcgugcccuuucaccucgggacaaagcaggucugcaucgccugguccucuagcuccugucaugauggaaaagccuggcugcacgugugcauuaccggcgacgauaagaaugcuacagccagcuucaucuacaacggcaaacuuguugacucuguggucuccuggagcaaggagauucugcggacccaggaaucugagugugugugcaucaacgggaccuguacaguggucaugacggauggauccgcuagcggcaaagccgacaccaagauccucuuuauugaggaagggaagaucguucauacauccacccugucuggaagcgcgcaacacguggaggaaugcuccugcuauccucgcuaccccggcgugagaugugucugccgggauaauuggaaagggagcaaccgcccuauuguggacaucaauauuaaggaucacucuaucguuuccagcuacguguguucuggacuugucggcgacacacccagaaagaacgacagcuccucuagcucccauugccuggauccgaauaacgaggaaggcgggcacggagugaagggcugggccuucgacgaugggaaugacguuuggaugggacggaccaucaacgagacgagccgccucggcuaugagacauuuaaagugauugaaggguggucuaauccuaaguccaaacugcagaucaacagacaggucauuguggaucggggaaaucgcagcggcuacucuggcaucuucuccgucgaggggaaaagcuguauuaacagaugcuuuuauguggaacugauccggggaagaaaggaggaaaccgagguucucuggaccuccaauucuauuguggucuucuguggcacaagcgggaccuacggaacaggcuccuggcccgacggggcugaucugaaccuuaugccuaucuga

SEQ ID NO: 216243 - RNA, 1410 nt, Artificial Sequence; identical to SEQ ID NO: 216079
  derived and/or modified CDS sequence (opt5) from neuraminidase__InfluenzaA__AHC60746

SEQ ID NO: 216244 - RNA, 1410 nt, Artificial Sequence; identical to SEQ ID NO: 216178
  derived and/or modified CDS sequence (opt5) from neuraminidase__InfluenzaA__AHC60770

SEQ ID NO: 216245 - RNA, 1410 nt, Artificial Sequence
  derived and/or modified CDS sequence (opt5) from neuraminidase__InfluenzaA__AHC60782
augaaccccaaucagaagaucauuaccaucggcagcgugucccugacaauuucuacgaucugcuucuuuaugcaaauugccauccucaucaccacagucacccugcacuucaaacaguacgaguuuaacagcccuccgaauaaccagguuaugcuuugugaacccacaauuaucgagagaaauauuaccgaaaucguguaucugacaaacaccacgauugagaaggaaaucugcccuaaacucgcugaguaccggaauugguccaagccccagugugacauuaccggguucgccccuuuuucuaaagauaacagcauccgccuguccgcgggaggcgacaucugggugacaagagagcccuaugucucuugcgauccugacaaguguuaccaauucgcucuugggcagggaaccacacugaauaacgugcauagcaauaacaccguucgggaucgcacgccguauagaacacuccugaugaaugaacugggcgugcccuuucaccucgggaccaagcaggucugcauugccugguccucuagcuccugucaugacggaaaagccuggcugcacgugugcaucacaggcgaugacaagaacgcuaccgccagcuucauuuacaauggccggcuuguugauucuguggucuccuggagcaaagagauccugcgcacccaggaaucugagugugugugcauuaacgggacauguacgguggucaugaccgacggauccgcuagcggcaaggccgauacaaaaauccucuuuaucgaggaagggaagauuguucauaccuccacacugucuggaagcgcgcaacacguggaggaaugcuccugcuauccuagauaccccggcgugcggugugucugccgcgacaacuggaaggggagcaauagaccuaucguggauauuaacaucaaagaccacucuauuguuuccggauacguguguagcggccuugucggcgacacgccccggaagaaugauucuagcuccucuagccauugccuggacccgaacaaugaggaagggggacacggcgugaaagggugggccuucgaugacggaaacgauguuuggaugggccgcaccaucaaugagacauccagacucggguaugagaccuuuaaggugaucgaaggauggagcaacccuaaaucuaagcugcagauuaaucggcaggucaucguggaccgcggcaacagauccggcuacagcgggauuuucucugucgagggaaaauccuguaucaaucggugcuuuuauguggaacugauuagaggccgcaaggaggaaaccgagguucucuggacaagcaacuccaucguggucuucugugggaccucuggaacauacggcacggggagcuggcccgauggcgcugaccugaaucuuaugccuauuuga

SEQ ID NO: 216246 - RNA, 1410 nt, Artificial Sequence; identical to SEQ ID NO: 216090
  derived and/or modified CDS sequence (opt5) from neuraminidase__InfluenzaA__AHC60794

SEQ ID NO: 216247 - RNA, 1410 nt, Artificial Sequence
  derived and/or modified CDS sequence (opt5) from neuraminidase__InfluenzaA__AHC60806
augaaccccaaucagaagaucauuaccaucggcagcgugucccugacaauuucuacgaucugcuucuuuaugcaaauugccauccucaucaccacagucacccugcacuucaaacagugugaguuuaacagcccuccgaauaaccagguuaugcuuugcgaacccacaauuaucgagagaaauauuaccgaaaucguguaccugacaaacaccacgauugagaaggaaaucuguccuaaacucgcugaguaucggaauugguccaagccccagugcgacauuaccggguucgccccuuuuucuaaagauaacagcauccgccuguccgcgggaggcgacaucugggugacaagagagcccuacgucucuugugauccuaauaagugcuaucaauucgcucuugggcagggaaccacacugaacaaugugcauagcaacaauaccguucgggaccgcacgccguacagaacacuccugaugaacgaacugggcgugcccuuucaccucgggaccaagcaggucuguauugccugguccucuagcuccugccaugauggaaaagccuggcugcacguguguaucacaggcgacgauaagaaugcuaccgccagcuucauuuauaacggcaaacuuguugacucuguggucuccuggagcaaggagauccugcggacccaggaaucugagugcguguguauuaacgggacaugcacgguggucaugaccgauggauccgcuagcggcaaagccgacacaaagauccucuuuaucgaggaagggaagauuguucauaccuccacacugucuggaagcgcgcaacacguggaggaaugcuccuguuacccucgcuaucccggcgugagaugcgucugucgggauaauuggaaagggagcaaccgcccuaucguggacauuaauaucaaggaucacucuauuguuuccagcuacgugugcucuggacuugucggcgacacccccagaaagaacgacagcuccucuagcucccauugucuggauccgaauaacgaggaaggcgggcacggagugaagggcugggccuucgacgaugggaaugacguuuggaugggacggacgaucaacgagacaagccgccucggcuacgagaccuuuaaagugaucgaaggguggucuaauccuaaguccaaacugcagauuaacagacaggucaucguggaucggggaaaucgcagcggcuauucuggcauuuucuccgucgaggggaaaagcugcaucaacagauguuuuuacguggaacugauucggggaagaaaggaggaaaccggcguucucuggacauccaauucuaucguggucuucugcgggaccagcggaacauauggcacgggguccuggcccgacggcgcugaucugaaccuuaugccuauuuga

SEQ ID NO: 216248 - RNA, 1410 nt, Artificial Sequence; identical to SEQ ID NO: 212956
  derived and/or modified CDS sequence (opt5) from neuraminidase__InfluenzaA__AHC60818

SEQ ID NO: 216249 - RNA, 1410 nt, Artificial Sequence; identical to SEQ ID NO: 216047
  derived and/or modified CDS sequence (opt5) from neuraminidase__InfluenzaA__AHC60830

SEQ ID NO: 216250 - RNA, 1410 nt, Artificial Sequence; identical to SEQ ID NO: 216228
  derived and/or modified CDS sequence (opt5) from neuraminidase__InfluenzaA__AHC60842

SEQ ID NO: 216251 - RNA, 1410 nt, Artificial Sequence; identical to SEQ ID NO: 216047
  derived and/or modified CDS sequence (opt5) from neuraminidase__InfluenzaA__AHC60854

SEQ ID NO: 216252 - RNA, 1410 nt, Artificial Sequence; identical to SEQ ID NO: 216092
  derived and/or modified CDS sequence (opt5) from neuraminidase__InfluenzaA__AHC60866

SEQ ID NO: 216253 - RNA, 1410 nt, Artificial Sequence; identical to SEQ ID NO: 216079
  derived and/or modified CDS sequence (opt5) from neuraminidase__InfluenzaA__AHC60878

SEQ ID NO: 216254 - RNA, 1410 nt, Artificial Sequence; identical to SEQ ID NO: 216079
  derived and/or modified CDS sequence (opt5) from neuraminidase__InfluenzaA__AHC60890

SEQ ID NO: 216255 - RNA, 1410 nt, Artificial Sequence; identical to SEQ ID NO: 216178
  derived and/or modified CDS sequence (opt5) from neuraminidase__InfluenzaA__AHC60902

SEQ ID NO: 216256 - RNA, 1410 nt, Artificial Sequence; identical to SEQ ID NO: 216043
  derived and/or modified CDS sequence (opt5) from neuraminidase__InfluenzaA__AHC60914

SEQ ID NO: 216257 - RNA, 1410 nt, Artificial Sequence; identical to SEQ ID NO: 216047
  derived and/or modified CDS sequence (opt5) from neuraminidase__InfluenzaA__AHC60926

SEQ ID NO: 216258 - RNA, 1410 nt, Artificial Sequence; identical to SEQ ID NO: 216043
  derived and/or modified CDS sequence (opt5) from neuraminidase__InfluenzaA__AHC60938

SEQ ID NO: 216259 - RNA, 1410 nt, Artificial Sequence; identical to SEQ ID NO: 216047
  derived and/or modified CDS sequence (opt5) from neuraminidase__InfluenzaA__AHC60950

SEQ ID NO: 216260 - RNA, 1410 nt, Artificial Sequence
  derived and/or modified CDS sequence (opt5) from neuraminidase__InfluenzaA__AHC60962
augaaccccaaucagaagaucauuaccaucggcagcgugucccugacaauuucuacgaucugcuucuuuaugcaaauugccauccucaucaccacagucacccugcacuucaaacaguacgaguuuuauagcccuccgaacaaucagguuaugcuuugugaacccacaauuaucgagagaaacauuaccgaaaucguguaccugacaaauaccacgauugagaaggaaaucugcccuaaacucgcugaguaucggaacugguccaagccccagugugacauuaccggguucgccccuuuuucuaaagauaauagcauccgccuguccgcgggaggcgacaucugggugacaagagagcccuacgucucuugcgauccugacaaguguuaucaauucgcucuugggcagggaaccacacugaacaaugugcauagcaacaauaccguucgggaucgcacgccguacagaacacuccugaugaacgaacugggcgugcccuuucaccucgggaccaagcaggucugcauugccugguccucuagcuccugucaugacggaaaagccuggcugcacgugugcguuacaggcgaugacaagaaugcuaccgccagcuucaucuauaacggccggcuuguggauucugucguguccuggagcaaagagauucugcgcacccaggaaucugagugugugugcaucaaugggacauguacggucguuaugaccgacggauccgcuagcggcaaggccgauacaaaaauucucuuuaucgaggaagggaagaucgugcauaccuccacacugucuggaagcgcgcaacacguggaggaaugcuccugcuacccuagauaccccggcguccggugugugugccgcgacaacuggaaggggagcaacagaccuauuguugauaucaauauuaaagaccacucuaucguguccagcuaugucuguucuggacuugugggcgacacgccccggaagaacgauagcuccucuagcucccauugccuggacccgaauaacgaggaaggcgggcacggaguuaaaggcugggccuucgaugacgggaaugauguguggaugggacgcaccauuaacgagacaagcagacucggcuacgagaccuuuaaggucaucgaaggguggucuaauccuaaauccaagcugcagaucaaccgccaggugauugucgaccggggaaauagaagcggcuauucuggcaucuucuccguggaggggaaaagcuguauuaaccggugcuuuuacguugaacugaucagaggacgcaaggaggaaaccgaggugcucuggacauccaauucuauugucguguucuguggcaccagcgggacauauggaacgggcuccuggcccgauggggcugaccugaaccuuaugccuaucuga

SEQ ID NO: 216261 - RNA, 1410 nt, Artificial Sequence; identical to SEQ ID NO: 216092
  derived and/or modified CDS sequence (opt5) from neuraminidase__InfluenzaA__AHC60974

SEQ ID NO: 216262 - RNA, 1410 nt, Artificial Sequence; identical to SEQ ID NO: 216043
  derived and/or modified CDS sequence (opt5) from neuraminidase__InfluenzaA__AHC60986

SEQ ID NO: 216263 - RNA, 1410 nt, Artificial Sequence; identical to SEQ ID NO: 216190
  derived and/or modified CDS sequence (opt5) from neuraminidase__InfluenzaA__AHC60998

SEQ ID NO: 216264 - RNA, 1410 nt, Artificial Sequence; identical to SEQ ID NO: 216090
  derived and/or modified CDS sequence (opt5) from neuraminidase__InfluenzaA__AHC61010

SEQ ID NO: 216265 - RNA, 1410 nt, Artificial Sequence
  derived and/or modified CDS sequence (opt5) from neuraminidase__InfluenzaA__AHC61022
augaaccccaaucagaagaucauuaccaucggcagcgugucccugacaauuucuacgaucugcuucuuuaugcaaauugccauccucaucaccacagucacccugcacuucaaacaguacgaguuuaacagcccuccgaauaaccagguuaugcuuugugaacccacaauuaucgagagaaauauuaccgaaaucguguaucugacaaacaccacgauugagaaggaaaucugcccuaaacucgcugaguaccggaauugguccaagccccagugugacauuaccggguucgccccuuuuucuaaagauaacagcauccgccuguccgcgggaggcgacaucugggugacaagagagcccuaugucucuugcgauccugacaaguguuaccaauucgcucuugggcagggaaccacacugaauaacgugcauagcaauaacaccguucgggaucgcacgccguauagaacacuccugaugaaugaacugggcgugcccuuucaccucgggaccaagcaggucugcauugccugguccucuagcuccugucaugacggaaaagccuggcugcacgugugcaucacaggcgaugacaagaacgcuaccgccagcuucauuuacaauggccggcuuguugauucuguggucuccuggagcaaagagauccugcgcacccaggaaucugagugugugugcauuaacgggacauguacgguggucaugaccgacggauccgcuagcggcaaggccgauacaaaaauccucuuuaucgaggaagggaagauuguucauaccuccacacugucuggaagcgcgcaacacguggaggaaugcuccugcuauccuagauaccccggcgugcggugugucugccgcgacaacuggaaggggagcaauagaccuaucguggauauuaacaucaaagaccacucuauuguuuccagcuacguguguucuggacuugucggcgacacgccccggaagaaugauagcuccucuaucagccauugccuggacccgaacaaugaggaaggcgggcacggagugaaaggcugggccuucgaugacgggaacgauguuuggaugggacgcaccaucaaugagacauccagacucggcuaugagaccuuuaaggugauugaaggguggagcaacccuaaaucuaagcugcagaucaaucggcaggucauuguggaccgcggaaacagauccggcuacagcggcaucuucucugucgaggggaaauccuguauuaaucggugcuuuuauguggaacugaucagaggacgcaaggaggaaaccgagguucucuggacaagcaacuccauuguggucuucuguggcaccucugggacauacggaacgggcagcuggcccgauggggcugaccugaaucuuaugccuaucuga

SEQ ID NO: 216266 - RNA, 1410 nt, Artificial Sequence; identical to SEQ ID NO: 211590
  derived and/or modified CDS sequence (opt5) from neuraminidase__InfluenzaA__AHC61034

SEQ ID NO: 216267 - RNA, 1410 nt, Artificial Sequence; identical to SEQ ID NO: 216043
  derived and/or modified CDS sequence (opt5) from neuraminidase__InfluenzaA__AHC61046

SEQ ID NO: 216268 - RNA, 1410 nt, Artificial Sequence; identical to SEQ ID NO: 216092
  derived and/or modified CDS sequence (opt5) from neuraminidase__InfluenzaA__AHC61058

SEQ ID NO: 216269 - RNA, 1410 nt, Artificial Sequence; identical to SEQ ID NO: 215955
  derived and/or modified CDS sequence (opt5) from neuraminidase__InfluenzaA__AHC61070

SEQ ID NO: 216270 - RNA, 1410 nt, Artificial Sequence
  derived and/or modified CDS sequence (opt5) from neuraminidase__InfluenzaA__AHC61082
augaaccccaaucagaagaucauuaccaucggcagcgugucccugacaauuucuacgaucugcuucuuuaugcaaauugccauccucaucaccacagucacccugcacuucaaacaguacgaguuuaacagcccuccgaauaaccagguugugcuuugugaacccacaauuaucgagagaaauauuaccgaaaucguguaucugacaaacaccacgauugagaaggaaaucugcccuaaacccgcugaguaccggaauugguccaagccucagugugacauuaccggguucgcccccuuuucuaaagauaacagcauccgccucuccgcgggaggcgacaucugggucacaagagagccuuaugugucuugcgauccggacaaguguuaccaauucgcucuggggcagggaaccacacuuaauaacguucauagcaauaacaccgugcgggaucgcacgcccuauagaacacugcucaugaaugaacugggcgucccuuuucaccuggggaccaaacaggugugcauugccugguccucuagcuccugucaugacggaaaggccuggcuccacguuugcaucacaggcgaugacaagaacgcuaccgccagcuucauuuacaauggccggcugguggauucugucguguccuggagcaaagagauccuucgcacccaggaaucugagugugugugcauuaacgggacauguacggucguuaugaccgacggauccgcuagcggcaaggccgauacaaaaauccuguuuaucgaggaagggaagauugugcauaccuccacacucucuggaagcgcgcaacacguggaggaaugcuccugcuaucccagauacccuggcguccggugugugugccgcgacaacuggaaggggagcaauagacccaucguugauauuaacaucaaagaccacucuauuguguccagcuacgucuguucuggacuggugggcgacaccccgcggaagaaugauagcuccucuagcucccauugccuugacccuaacaaugaggaaggcgggcacggaguuaaaggcugggccuucgaugacgggaacgauguguggaugggacgcacgaucaaugagacaagcagacugggcuaugagaccuuuaaggucaucgaaggguggucuaaccccaaauccaagcuccagauuaaucgccaggugaucgucgaccggggagauagaagcggcuacucuggcauuuucuccguggaggggaaaagcuguaucaaccggugcuuuuauguugaacugauuagaggacgcaaggaggaaaccggcgugcuguggacauccaauucuaucgucguguucugugggaccagcggaacauacggcacgggguccuggccugacggcgcugaucucaaccugaugcccauuuga

SEQ ID NO: 216271 - RNA, 1410 nt, Artificial Sequence; identical to SEQ ID NO: 211590
  derived and/or modified CDS sequence (opt5) from neuraminidase__InfluenzaA__AHC61094

SEQ ID NO: 216272 - RNA, 1410 nt, Artificial Sequence; identical to SEQ ID NO: 216079
  derived and/or modified CDS sequence (opt5) from neuraminidase__InfluenzaA__AHC61106

SEQ ID NO: 216273 - RNA, 1410 nt, Artificial Sequence; identical to SEQ ID NO: 216079
  derived and/or modified CDS sequence (opt5) from neuraminidase__InfluenzaA__AHC61118

SEQ ID NO: 216274 - RNA, 1410 nt, Artificial Sequence; identical to SEQ ID NO: 216043
  derived and/or modified CDS sequence (opt5) from neuraminidase__InfluenzaA__AHC61130

SEQ ID NO: 216275 - RNA, 1410 nt, Artificial Sequence; identical to SEQ ID NO: 216190
  derived and/or modified CDS sequence (opt5) from neuraminidase__InfluenzaA__AHC61142

SEQ ID NO: 216276 - RNA, 1410 nt, Artificial Sequence; identical to SEQ ID NO: 216079
  derived and/or modified CDS sequence (opt5) from neuraminidase__InfluenzaA__AHC61154

SEQ ID NO: 216277 - RNA, 1410 nt, Artificial Sequence
  derived and/or modified CDS sequence (opt5) from neuraminidase__InfluenzaA__AHC61166
augaaccccaaucagaagaucauuaccaucggcagcgugucccugacaauuucuacgaucugcuucuuuaugcaagucgccauucucaucaccacaguuacccugcacuucaaacaguacgaguuuaacagcccuccgaauaaccaggugaugcuuugugaacccacaaucauugagagaaauaucaccgaaauuguguaucugacaaacaccacgaucgagaaggaaauuugcccuaaacucgcugaguaccggaauugguccaagccccagugugacaucaccggguucgccccuuuuucuaaagauaacagcauucgccuguccgcgggaggcgacaucugggucacaagagagcccuaugugucuugcgauccugacaaguguuaccaauucgcucuugggcagggaaccacacugaauaacguucauagcaauaacaccgugcgggaucgcacgccguauagaacacuccugaugaaugaacugggcguccccuuucaccucgggaccaaacaggugugcaucgccugguccagcagcuccugucaugacggaaaagccuggcugcacguuugcauuacaggcgaugacaagaacgcuaccgccagcuucaucuacaauggcaaacuuguggauucugucguguccuggagcaaggagauucugcggacccaggaaucugagugugugugcaucaacgggacauguacggucguuaugaccgacggauccgcuagcggcaaagccgauacaaagauucucuuuaucgaggaagggaagaucgugcauaccuccacacugucuggaagcgcgcaacacguggaggaaugcuccugcuauccucgcuaccccggcgucagaugugugugccgggacaacuggaaagggagcaaucgcccuauuguugauaucaacauuaaggaccacucuaucguguccagcuacgucuguucuggacuugugggcgacacccccagaaagaaugauagcuccucuagcucccauugccuggacccgaacaaugaggaaggcgggcacggaguuaagggcugggccuucgaugacgggaacgauguguggaugggacggacgauuaaugagacaagccgccucggcuaugagaccuuuaaagucaucgaaggguggucuaacccuaaguccaaacugcagaccaauagacaggugaucgucgaccggggaaaccgcagcggcuacucuggcauuuucuccguggaggggaagucuuguaucaauagaugcuuuuauguugaacugauucggggaagaaaggaggaaacagaggugcucuggaccuccaacucuaucgucguguucuguggcacaagcgggacguacggaaccggcuccuggcccgauggggcugaccugaaucuuaugccuauuuga

SEQ ID NO: 216278 - RNA, 1410 nt, Artificial Sequence; identical to SEQ ID NO: 216043
  derived and/or modified CDS sequence (opt5) from neuraminidase__InfluenzaA__AHC61178

SEQ ID NO: 216279 - RNA, 1410 nt, Artificial Sequence; identical to SEQ ID NO: 216079
  derived and/or modified CDS sequence (opt5) from neuraminidase__InfluenzaA__AHC61190

SEQ ID NO: 216280 - RNA, 1410 nt, Artificial Sequence; identical to SEQ ID NO: 216092
  derived and/or modified CDS sequence (opt5) from neuraminidase__InfluenzaA__AHC61202

SEQ ID NO: 216281 - RNA, 1410 nt, Artificial Sequence; identical to SEQ ID NO: 216047
  derived and/or modified CDS sequence (opt5) from neuraminidase__InfluenzaA__AHC61214

SEQ ID NO: 216282 - RNA, 1410 nt, Artificial Sequence; identical to SEQ ID NO: 216092
  derived and/or modified CDS sequence (opt5) from neuraminidase__InfluenzaA__AHC61226

SEQ ID NO: 216283 - RNA, 1410 nt, Artificial Sequence; identical to SEQ ID NO: 216079
  derived and/or modified CDS sequence (opt5) from neuraminidase__InfluenzaA__AHC61238

SEQ ID NO: 216284 - RNA, 1410 nt, Artificial Sequence; identical to SEQ ID NO: 216260
  derived and/or modified CDS sequence (opt5) from neuraminidase__InfluenzaA__AHC61250

SEQ ID NO: 216285 - RNA, 1410 nt, Artificial Sequence; identical to SEQ ID NO: 216043
  derived and/or modified CDS sequence (opt5) from neuraminidase__InfluenzaA__AHC61262

SEQ ID NO: 216286 - RNA, 1410 nt, Artificial Sequence; identical to SEQ ID NO: 216047
  derived and/or modified CDS sequence (opt5) from neuraminidase__InfluenzaA__AHC61274

SEQ ID NO: 216287 - RNA, 1410 nt, Artificial Sequence; identical to SEQ ID NO: 211590
  derived and/or modified CDS sequence (opt5) from neuraminidase__InfluenzaA__AHC61286

SEQ ID NO: 216288 - RNA, 1410 nt, Artificial Sequence; identical to SEQ ID NO: 216091
  derived and/or modified CDS sequence (opt5) from neuraminidase__InfluenzaA__AHC61298

SEQ ID NO: 216289 - RNA, 1410 nt, Artificial Sequence
  derived and/or modified CDS sequence (opt5) from neuraminidase__InfluenzaA__AHC61310
augaaccccaaucagaagaucauuaccaucggcagcgugucccugacaauuucuacgaucugcuucuuuaugcaaauugccauccucaucaccacagucacccugcacuucaaacaguacgaguuuaacagcccuccgaauaaccagguuaugcuuugugaacccacaauuaucgagagaaauauuaccgaaaucguguaucugacaaacaccacgauugagaaggaaaucugcccuaaacucgcugaguaccggaauugguccaagccccagugugacauuaccggguucgccccuuuuucuaaagauaacagcauccgccuguccgcgggaggcgacaucugggugacaagagagcccuaugucucuugcgauccuaauaaguguuaccaauucgcucuugggcagggaaccacacugaacaaugugcauagcaacaauaccguucgggaccgcacgccguauagaacacuccugaugaacgaacugggcgugcccuuucaccucgggaccaagcaggucugcauugccugguccucuagcuccugucaugauggaaaagccuggcugcacgugugcaucacaggcgacgauaagaaugcuaccgccagcuucauuuacaacggcaaacuuguugacucuguggucuccuggagcaaggagauccugcggacccaggaaucugagugugugugcauuaacgggacauguacgguggucaugaccgauggauccgcuagcggcaaagccgacacaaagauccucuuuaucgaggaagggaagauuguucauaccuccacacugucuggaagcgcgcaacacguggaggaaugcuccugcuauccucgcuaccccggcgugagaugugucugccgggauaauuggaaagggagcaaccgcccuaucguggacauuaauaucaaggaucacucuauuguuuccagcuacguguguucuggacuugucggcgacacccccagaaagaacgacagcuccucuagcucccauugccuggauccgaauaacgaggaaggcgggcacggagugaagggcugggccuucgacgaugggaaugacguuuggaugggacggacgaucaacgagacaagccgccucggcuaugagaccuuuaaagugaucgaaggguggucuaauccuaaguccaaacugcagauuaacagacaggucaucauugaucggggaaaucgcagcggcuacucuggcaucuucuccguggaggggaaaagcuguauuaacagaugcuuuuaugucgaacugauccggggaagaaaggaggaaaccgaggugcucuggacauccucuagcauuguuguguucuguggcaccuccgggacauacggaacgggcucuuggcccgacggggcugaucugaaucuuaugccuaucuga

SEQ ID NO: 216290 - RNA, 1410 nt, Artificial Sequence; identical to SEQ ID NO: 216120
  derived and/or modified CDS sequence (opt5) from neuraminidase__InfluenzaA__AHC61322

SEQ ID NO: 216291 - RNA, 1410 nt, Artificial Sequence; identical to SEQ ID NO: 216079
  derived and/or modified CDS sequence (opt5) from neuraminidase__InfluenzaA__AHC61334

SEQ ID NO: 216292 - RNA, 1410 nt, Artificial Sequence; identical to SEQ ID NO: 216047
  derived and/or modified CDS sequence (opt5) from neuraminidase__InfluenzaA__AHC61346

SEQ ID NO: 216293 - RNA, 1410 nt, Artificial Sequence
  derived and/or modified CDS sequence (opt5) from neuraminidase__InfluenzaA__AHC61358
augaaccccaaucagaagaucauuaccaucggcagcgugucccugacaauuucuacgaucugcuucuuuaugcaaauugccauccucaucaccacagucacccugcacuucaaacaguacgaguuuaacagcccuccgaauaaccagguuaugcuuugugaacccacaauuaucgagagaaauauuaccgaaaucguguaucugacaaacaccacgauugagaaggaaaucugcccuaaacucgcugaguaccggaauugguccaagccccagugugacauuaccggguucgccccuuuuucuaaagauaacagcauccgccuguccgcgggaggcgacaucugggugacaagagagcccuaugucucuugcgauccugacaaguguuaccaauucgcucuugggcagggaaccacacugaauaacgugcauagcaauaacaccguucgggaucgcacgccguauagaacacuccugaugaaugaacugggcgugcccuuucaccucgggaccaagcaggucugcauugccugguccucuagcuccugucaugacggaaaagccuggcugcacgugugcaucacaggcgaugacaagaacgcuaccgccagcuucauuuacaauggccggcuuguugauucuguggucuccuggagcaaagagauccugcgcacccaggaaucugagugugugugcauuaacgggacauguacgguggucaugaccgacggauccgcuagcggcaaggccgauacaaaaauccucuuuaucgaggaagggaagauuguucauaccuccacacugucuggaagcgcgcaacacguggaggaaugcuccugcuauccuagauaccccggcgugcggugugucugccgcgacaacuggaaggggagcaauagaccuaucguggauauuaacaucaaagaccacucuauuguuuccagcuacguguguucuggacuugucggcgacacgccccggaagaaugauaucagcuccucuagccauugccuggacccgaacaaugaggaaggcgggcacggagugaaaggcugggccuucgaugacgggaacgauguuuggaugggacgcaccaucaaugagacauccagacucggcuaugagaccuuuaaggugauuaaaggguggagcaacccuaagucuaaacugcagaucaaucggcaggucauuguggaccgcggaaacagauccggcuacagcggcaucuucucugucgaagggaaguccuguauuaaucggugcuuuuauguggagcugaucagaggacgcaaggaagagaccgaaguucucuggacaagcaacuccauuguggucuucuguggcaccucugggacauacggaacgggcagcuggcccgauggggcugaccugaaucuuaugccuaucuga

SEQ ID NO: 216294 - RNA, 1410 nt, Artificial Sequence; identical to SEQ ID NO: 216092
  derived and/or modified CDS sequence (opt5) from neuraminidase__InfluenzaA__AHC61370

SEQ ID NO: 216295 - RNA, 1410 nt, Artificial Sequence; identical to SEQ ID NO: 216120
  derived and/or modified CDS sequence (opt5) from neuraminidase__InfluenzaA__AHC61382

SEQ ID NO: 216296 - RNA, 1410 nt, Artificial Sequence; identical to SEQ ID NO: 216092
  derived and/or modified CDS sequence (opt5) from neuraminidase__InfluenzaA__AHC61394

SEQ ID NO: 216297 - RNA, 1410 nt, Artificial Sequence; identical to SEQ ID NO: 216120
  derived and/or modified CDS sequence (opt5) from neuraminidase__InfluenzaA__AHC61406

SEQ ID NO: 216298 - RNA, 1410 nt, Artificial Sequence; identical to SEQ ID NO: 216079
  derived and/or modified CDS sequence (opt5) from neuraminidase__InfluenzaA__AHC61418

SEQ ID NO: 216299 - RNA, 1410 nt, Artificial Sequence; identical to SEQ ID NO: 211590
  derived and/or modified CDS sequence (opt5) from neuraminidase__InfluenzaA__AHC61430

SEQ ID NO: 216300 - RNA, 1410 nt, Artificial Sequence; identical to SEQ ID NO: 216092
  derived and/or modified CDS sequence (opt5) from neuraminidase__InfluenzaA__AHC61442

SEQ ID NO: 216301 - RNA, 1410 nt, Artificial Sequence; identical to SEQ ID NO: 216092
  derived and/or modified CDS sequence (opt5) from neuraminidase__InfluenzaA__AHC61454

SEQ ID NO: 216302 - RNA, 1410 nt, Artificial Sequence
  derived and/or modified CDS sequence (opt5) from neuraminidase__InfluenzaA__AHC61466
augaaccccaaucagaagaucauuaccaucggcagcgugucccugacaauuucuacgaucugcuucuuuaugcaaauugccauccucaucaccacagucacccugcacuucaaacaguacgaguuuaacagcccuccgaauaaccagguuaugcuuugugaacccacaauuaucgagagaaauaccacagaaauuguguaucugaccaacacgaccaucgagaaggaaauuugcccuaaacucgcugaguaccggaauugguccaagccccagugugacaucacaggguucgccccuuuuucuaaagauaacagcauucgccuguccgcgggaggcgacaucugggugaccagagagcccuaugucucuugcgauccugacaaguguuaccaauucgcucuugggcagggaacaacccugaauaacgugcauagcaauaacacgguucgggaucgcacaccguauagaacccuccugaugaaugaacugggcgugcccuuucaccucgggacaaagcaggucugcaucgccugguccagcagcuccugucaugacggaaaagccuggcugcacgugugcauuaccggcgaugacaagaacgcuaccgccagcuucaucuacaauggccggcuuguugauucuguggucuccuggagcaaagagauucugcgcacacaggaaucugagugugugugcaucaacgggacguguaccguggucaugacagacggauccgcuagcggcaaggccgauaccaaaauucucuuuaucgaggaagggaagaucguucauacauccacccugucuggaagcgcgcaacacguggaggaaugcuccugcuauccuagauaccccggcgugcggugugucugccgcgacaacuggaaggggagcaauagaccuauuguggauaucaacauuaaagaccacucuaucguuuccagcuacguguguucuggacuugucggcgacacgccccggaagaaugauagcuccucuagcucccauugccuggacccgaacaaugaggaaggcgggcacggagugaaaggcugggccuucgaugacgggaacgauguuuggaugggacgcacaauuaaugagaccagcagacucggcuaugagaccuuuaaggugaucgaaggguggucuaacccuaaauccaagcugcagaucaaucggcaggucauuguggacaaaggaaaccgcagcggcuacucuggcaucuucuccgucgaggggaagucuuguauuaauagaugcuuuuauguggaacugauccggggaagaaaggaggaaacagagguucucuggaccuccaacucuauuguggucuucuguggcacaagcgggacguacggaaccggcuccuggcccgauggggcugaccugaaucuuaugccuaucuga

SEQ ID NO: 216303 - RNA, 1410 nt, Artificial Sequence; identical to SEQ ID NO: 216043
  derived and/or modified CDS sequence (opt5) from neuraminidase__InfluenzaA__AHC61478

SEQ ID NO: 216304 - RNA, 1410 nt, Artificial Sequence; identical to SEQ ID NO: 216079
  derived and/or modified CDS sequence (opt5) from neuraminidase__InfluenzaA__AHC61490

SEQ ID NO: 216305 - RNA, 1410 nt, Artificial Sequence; identical to SEQ ID NO: 216043
  derived and/or modified CDS sequence (opt5) from neuraminidase__InfluenzaA__AHC61502

SEQ ID NO: 216306 - RNA, 1410 nt, Artificial Sequence; identical to SEQ ID NO: 216092
  derived and/or modified CDS sequence (opt5) from neuraminidase__InfluenzaA__AHC61514

SEQ ID NO: 216307 - RNA, 1410 nt, Artificial Sequence; identical to SEQ ID NO: 214994
  derived and/or modified CDS sequence (opt5) from neuraminidase__InfluenzaA__AHC61526

SEQ ID NO: 216308 - RNA, 1410 nt, Artificial Sequence
  derived and/or modified CDS sequence (opt5) from neuraminidase__InfluenzaA__AHC61538
augaaccccaaucagaagaucauuaccaucggcagcgugucccugacaauuucuacgaucugcuucuuuaugcaaauugccauccucaucaccacagucacccugcacuucaaacaguacgaguuuaacagcccuccgaauaaccagguuaugcuuugugaacccacaauuaucgagagaaauauuaccgaaaucguguaucugacaaacaccacgauugagaaggaaaucugcccuaaacucgcugaguaccggaauugguccaagccccagugugacauuaccggguucgccccuuuuucuaaagauaacagcauccgccuguccgcgggaggcgacaucugggugacaagagagcccuaugucucuugcgauccuaauaaguguuaccaauucgcucuugggcagggaaccacacugaacaaugugcauagcaacaauaccguucgggaccgcacgccguauagaacacuccugaugaacgaacugggcgugcccuuucaccucgggaccaagcaggucugcauugccugguccucuagcuccugucaugauggaaaagccuggcugcacgugugcaucacaggcgacgauaagaaugcuaccgccagcuucauuuacaacggcaaacuuguugacucuguggucuccuggagcaaggagauccugcggacccaggaaucugagugugugugcauuaacgggacauguacgguggucaugaccgauggauccgcuagcggcaaagccgacacaaagauccucuuuaucgaggaagggaagauuguucauaccuccacacugucuggaagcgcgcaacacguggaggaaugcuccugcuauccucgcuaccccggcgugagaugugucugccgggauaauuggaaagggagcaaccgcccuaucguggacauuaauaucaaggaucacucuauuguuuccagcuacguguguucuggacuugucggcgacacccccagaaagaacgacagcuccucuagcucccauugccuggauccgaauaacgaggaaggcagccacggggugaaaggaugggccuucgacgauggcaaugacguuuggauggggcggacgaucaacgagacaucucgccucggauaugagaccuuuaaagugaucgaaggcugguccaauccuaagagcaaacugcagauuaacagacaggucaucguggaucgggggaaucgcucuggauacuccggcauuuucagcgucgagggcaaguccuguaucaacagaugcuuuuauguggaacugauucgggggagaaaggaggaaaccgagguucucuggacaucuaauagcaucguggucuucuguggaaccuccggcacauacgggacgggaucuuggcccgacggcgcugaucugaaccuuaugccuauuuga

SEQ ID NO: 216309 - RNA, 1410 nt, Artificial Sequence; identical to SEQ ID NO: 216092
  derived and/or modified CDS sequence (opt5) from neuraminidase__InfluenzaA__AHC61550

SEQ ID NO: 216310 - RNA, 1410 nt, Artificial Sequence
  derived and/or modified CDS sequence (opt5) from neuraminidase__InfluenzaA__AHC61562
augaaccccaaucagaagaucauuaccaucggcagcgugucccugacaauuucuacgaucugcuucuuuaugcaaauugccauccucaucaccacagucacccugcacuucaaacaguacgaguuuuauagcccuccgaacaaucagguuaugcuuugugaacccacaaugauugagagaaacaucaccgaaauuguguaccugacaaauaccacgaucgagaaggaaauuugcccuaaacucgcugaguaucggaacugguccaagccccagugugacaucaccggguucgccccuuuuucuaaagauaauagcauucgccuguccgcgggaggcgacaucugggugacaagagagcccuacgucucuugcgauccugacaaguguuaucaauucgcucuugggcagggaaccacacugaacaaugugcauagcaacaauaccguucgggaucgcacgccguacagaacacuccugaugaacgaacugggcgugcccuuucaccucgggaccaagcaggucugcaucgccugguccucuagcuccugucaugacggaaaagccuggcugcacgugugcauuacaggcgaugacaagaaugcuaccgccagcuucaucuauaacggccggcuuguugauucuguggucuccuggagcaaagagauucugcgcacccaggaaucugagugugugugcaucaaugggacauguacgguggucaugaccgacggauccgcuagcggcaaggccgauacaaaaauucucuuuaucgaggaagggaagaucguucauaccuccacacugucuggaagcgcgcaacacguggaggaaugcuccugcuacccuagauaccccggcgugcggugugucugccgcgacaacuggaaggggagcaacagaccuauuguggauaucaauauuaaagaccacucuaucguuuccagcuauguguguucuggacuugucggcgacacgccccggaagaacgauagcuccucuagcucccauugccuggacccgaauaacgaggaaggcgggcacggagugaaaggcugggccuucgaugacgggaaugauguuuggaugggacgcaccauuaacgagacaagcagacucggcuacgagaccuuuaaggugaucgaaggguggucuaauccuaaauccaagcugcagaucaaccggcaggucauuguggaccgcggaaauagaagcggcuauucuggcaucuucuccgucgagagcaaauccuguauuaaccggugcuuuuacguggaacugaucagagggcgcaaggaggaaaccgagguucucuggacaucuaauagcauuguggucuucuguggaaccuccggcacauaugggacgggaaccuggcccgauggcgcugaccugaaccuuaugccuaucuga

SEQ ID NO: 216311 - RNA, 1410 nt, Artificial Sequence; identical to SEQ ID NO: 216091
  derived and/or modified CDS sequence (opt5) from neuraminidase__InfluenzaA__AHC61574

SEQ ID NO: 216312 - RNA, 1410 nt, Artificial Sequence; identical to SEQ ID NO: 216092
  derived and/or modified CDS sequence (opt5) from neuraminidase__InfluenzaA__AHC61586

SEQ ID NO: 216313 - RNA, 1410 nt, Artificial Sequence; identical to SEQ ID NO: 214994
  derived and/or modified CDS sequence (opt5) from neuraminidase__InfluenzaA__AHC61598

SEQ ID NO: 216314 - RNA, 1410 nt, Artificial Sequence; identical to SEQ ID NO: 216043
  derived and/or modified CDS sequence (opt5) from neuraminidase__InfluenzaA__AHC61610

SEQ ID NO: 216315 - RNA, 1410 nt, Artificial Sequence; identical to SEQ ID NO: 216091
  derived and/or modified CDS sequence (opt5) from neuraminidase__InfluenzaA__AHC61622

SEQ ID NO: 216316 - RNA, 1410 nt, Artificial Sequence; identical to SEQ ID NO: 211590
  derived and/or modified CDS sequence (opt5) from neuraminidase__InfluenzaA__AHC61634

SEQ ID NO: 216317 - RNA, 1410 nt, Artificial Sequence; identical to SEQ ID NO: 211590
  derived and/or modified CDS sequence (opt5) from neuraminidase__InfluenzaA__AHC61646

SEQ ID NO: 216318 - RNA, 1410 nt, Artificial Sequence; identical to SEQ ID NO: 211590
  derived and/or modified CDS sequence (opt5) from neuraminidase__InfluenzaA__AHC61658

SEQ ID NO: 216319 - RNA, 1410 nt, Artificial Sequence; identical to SEQ ID NO: 214994
  derived and/or modified CDS sequence (opt5) from neuraminidase__InfluenzaA__AHC61670

SEQ ID NO: 216320 - RNA, 1410 nt, Artificial Sequence; identical to SEQ ID NO: 216047
  derived and/or modified CDS sequence (opt5) from neuraminidase__InfluenzaA__AHC61682

SEQ ID NO: 216321 - RNA, 1410 nt, Artificial Sequence; identical to SEQ ID NO: 214994
  derived and/or modified CDS sequence (opt5) from neuraminidase__InfluenzaA__AHC61694

SEQ ID NO: 216322 - RNA, 1410 nt, Artificial Sequence
  derived and/or modified CDS sequence (opt5) from neuraminidase__InfluenzaA__AHC61706
augaaccccaaucagaagaucauuaccaucggcagcgugucccugacaauuucuacgaucugcuucuuuaugcaaauugccauccucaucaccacagucacccugcacuucaaacaguacgaguuuaacagcccuccgaauaaccagguuaugcuuugugaacccacaauuaucgagagaaauauuaccgaaaucguguaucugacaaacaccacgauugagaaggaaaucugcccuaaacucgcugaguaccggaauugguccaagccccagugugacauuaccggguucgccccuuuuucuaaagauaacagcauccgccuguccgcgggaggcgacaucugggugacaagagagcccuaugucucuugcgauccugacaaguguuaccaauucgcucuugggcagggaaccacacugaauaacgugcauagcaauaacaccguucgggaucgcacgccguauagaacacuccugaugaaugaacugggcgugcccuuucaccucgggaccaagcaggucugcauugccugguccucuagcuccugucaugacggaaaagccuggcugcacgugugcaucacaggcgaugacaagaacgcuaccgccagcuucauuuacaauggccggcuuguugauucuguggucuccuggagcaaagagauccugcgcacccaggaaucugagugugugugcauuaacgggacauguacgguggucaugaccgacggauccgcuagcggcaaggccgauacaaaaauccucuuuaucgaggaagggaagauuguucauaccuccacacugucuggaagcgcgcaacacguggaggaaugcuccugcuauccuagauaccccggcgugcggugugucugccgcgacaacuggaaggggagcaauagaccuaucguggauauuaacaucaaagagcacucuauuguuuccagcuacguguguucuggacuugucggcgacacgccccggaagaaugacagcuccucuagcucccauugccuggauccgaacaaugaagagggcgggcacggagugaaaggcugggccuucgacgaugggaacgacguuuggaugggacgcaccaucaaugagacaagcagacucggcuaugaaaccuuuaaggugaucgagggguggucuaacccuaaauccaagcugcagauuaaucggcaggucaucguggaucgcggaaacagaagcggcuacucuggcauuuucuccgucgaagggaaaagcuguaucaaucggugcuuuuauguggagcugauuagaggacgcaaggaagagaccgagguucucuggacauccaacucuaucguggucuucuguggcaccagcgggacauacggaacgggcuccuggcccgacggggcugaucugaaucuuaugccuauuuga

SEQ ID NO: 216323 - RNA, 1410 nt, Artificial Sequence
  derived and/or modified CDS sequence (opt5) from neuraminidase__InfluenzaA__AHC61718
augaaccccaaucagaagaucauuaccaucggcagcgugucccugacaauuucuacgaucugcuucuuuaugcaaauugccauccucaucaccacagucacccugcacuucaaacagugugaguuuaacagcccuccgaauaaccagguuaugcuuugcgaacccacaauuaucgagagaaauauuaccgaaaucguguaccugacaaacaccacgauugagaaggaaaucuguccuaaacucaccgaguaucggaauugguccaagccccagugcgacauuacaggguucgcuccuuuuucuaaagauaacagcauccgccuguccgccggaggcgacaucugggugaccagagagcccuacgucucuugugauccuaauaagugcuaucaauucgcgcuugggcagggaacaacccugaacaaugugcauagcaacaauacgguucgggaccgcacaccguacagaacccuccugaugaacgaacugggcgugcccuuucaccucgggacaaagcaggucuguauugcuugguccucuagcuccugccaugauggaaaagccuggcugcacguguguaucaccggcgacgauaagaaugccaccgcuagcuucauuuauaacggcaaacuuguugacucuguggucuccuggagcaaggagauccugcggacacaggaaucugagugcguguguauuaacgggacgugcaccguggucaugacagauggauccgccagcggcaaagcugacaccaagauccucuuuaucgaggaagggaagauuguucauacauccacccugucuggaagcgcccaacacguggaggaaugcuccuguuacccucgcuaucccggcgugagaugcgucugucgggauaauuggaaagggagcaaccgcccuaucguggacauuaauaucaaggaucacucuauuguuuccagcuacgugugcucuggacuugucggcgacacgcccagaaagaacgacagcuccucuagcucccauugucuggauccgaauaacgaggaaggcgggcacggagugaagggcugggcguucgacgaugggaaugacguuuggaugggacggacaaucaacgagaccagccgccucggcuacgagaccuuuaaagugaucgaaggguggucuaauccuaaguccaaacugcagauuaacagacaggucaucguggaucggggaaaucgcagcggcuauucuggcauuuucuccgucgaggggaaaagcugcaucaacagauguuuuuacguggaacugauucggggaagaaaggaggaaacaggcguucucuggaccuccaauucuaucguggucuucugcgggacaagcggaacguauggcaccggguccuggcccgacggcgccgaucugaaccuuaugccuauuuga

SEQ ID NO: 216324 - RNA, 1410 nt, Artificial Sequence; identical to SEQ ID NO: 216043
  derived and/or modified CDS sequence (opt5) from neuraminidase__InfluenzaA__AHC61730

SEQ ID NO: 216325 - RNA, 1410 nt, Artificial Sequence; identical to SEQ ID NO: 216092
  derived and/or modified CDS sequence (opt5) from neuraminidase__InfluenzaA__AHC61742

SEQ ID NO: 216326 - RNA, 1410 nt, Artificial Sequence; identical to SEQ ID NO: 216043
  derived and/or modified CDS sequence (opt5) from neuraminidase__InfluenzaA__AHC61754

SEQ ID NO: 216327 - RNA, 1410 nt, Artificial Sequence; identical to SEQ ID NO: 211590
  derived and/or modified CDS sequence (opt5) from neuraminidase__InfluenzaA__AHC61766

SEQ ID NO: 216328 - RNA, 1410 nt, Artificial Sequence; identical to SEQ ID NO: 216079
  derived and/or modified CDS sequence (opt5) from neuraminidase__InfluenzaA__AHC61778

SEQ ID NO: 216329 - RNA, 1410 nt, Artificial Sequence; identical to SEQ ID NO: 216117
  derived and/or modified CDS sequence (opt5) from neuraminidase__InfluenzaA__AHC61790

SEQ ID NO: 216330 - RNA, 1410 nt, Artificial Sequence; identical to SEQ ID NO: 216047
  derived and/or modified CDS sequence (opt5) from neuraminidase__InfluenzaA__AHC61802

SEQ ID NO: 216331 - RNA, 1410 nt, Artificial Sequence; identical to SEQ ID NO: 216043
  derived and/or modified CDS sequence (opt5) from neuraminidase__InfluenzaA__AHC61814

SEQ ID NO: 216332 - RNA, 1410 nt, Artificial Sequence
  derived and/or modified CDS sequence (opt5) from neuraminidase__InfluenzaA__AHC61826
augaaccccaaucagaagaucauuaccaucggcagcgugucccugacaauuucuacgaucugcuucuuuaugcaaauugccauccucaucaccacagucacccugcacuucaaacaguacgaguuuaacagcccuccgaauaaccagguugugcuuugugaacccacaauuaucgagagaaauauuaccgaaaucguguaucugacaaacaccacgauugagaaggaaaucugcccuaaacccgcugaguaccggaauugguccaagccucagugugacauuaccggguucgcccccuuuucuaaagauaacagcauccgccucuccgcgggaggcgacaucugggucacaagagagccuuaugugucuugcgauccggacaaguguuaccaauucgcucuggggcagggaaccacacuuaauaacguucauagcaauaacaccgugcgggaucgcacgcccuauagaacacugcucaugaaugaacugggcgucccuuuucaccuggggaccaaacaggugugcauugccugguccucuagcuccugucaugacggaaaggccuggcuccacguuugcaucacaggcgaugacaagaacgcuaccgccagcuucauuuacaauggccggcugguggauucugucguguccuggagcaaagagauccuucgcacccaggaaucugagugugugugcauuaacgggacauguacggucguuaugaccgacggauccgcuagcggcaaggccgauacaaaaauccuguuuaucgaggaagggaagauugugcauaccuccacacucucuggaagcgcgcaacacguggaggaaugcuccugcuaucccagauacccuggcguccggugugugugccgcgacaacuggaaggggagcaauagacccaucguugauauuaacaucaaagaccacucuauuguguccagcuacgucuguucuggacuggugggcgacaccccgcggaagaaugauagcuccucuagcucccauugccuugacccuaacaaugaggaaggcgggcacggaguuaaaggcugggccuucgaugacgggaacgauguguggaugggacgcacgaucaaugagacaagcagacugggcuaugagaccuuuaaggucaucgaaggguggucuaaccccaaauccaagcuccagauuaaucgccaggugaucgucgaccggagcgauagaucuggauacuccggcauuuucagcguggagggcaaauccuguaucaaccggugcuuuuauguugaacugauuagagggcgcaaggaggaaaccgaggugcuguggacaucuaauagcaucgucguguucuguggaaccuccggcacauacgggacgggaucuuggccugacggcgcugaucucaaccugaugcccauuuga

SEQ ID NO: 216333 - RNA, 1410 nt, Artificial Sequence; identical to SEQ ID NO: 216043
  derived and/or modified CDS sequence (opt5) from neuraminidase__InfluenzaA__AHC61838

SEQ ID NO: 216334 - RNA, 1410 nt, Artificial Sequence; identical to SEQ ID NO: 216079
  derived and/or modified CDS sequence (opt5) from neuraminidase__InfluenzaA__AHC61850

SEQ ID NO: 216335 - RNA, 1410 nt, Artificial Sequence; identical to SEQ ID NO: 216092
  derived and/or modified CDS sequence (opt5) from neuraminidase__InfluenzaA__AHC61862

SEQ ID NO: 216336 - RNA, 1410 nt, Artificial Sequence; identical to SEQ ID NO: 216043
  derived and/or modified CDS sequence (opt5) from neuraminidase__InfluenzaA__AHC61874

SEQ ID NO: 216337 - RNA, 1410 nt, Artificial Sequence
  derived and/or modified CDS sequence (opt5) from neuraminidase__InfluenzaA__AHC61886
augaaccccaaucagaagaucauuaccaucggcagcgugucccugacaauuucuacgaucugcuucuuuaugcaaauugccauccucaucaccacagucacccugcacuucaaacaguacgaguuuaacccuccgcccaauaaccagguugugcuuugugaaccuacaauuaucgagagaaauauuaccgaaaucguguaucugacaaacaccacgauugagaaggaaaucugccccaaaccugcugaguaccggcauuggagcaagccccagugugacauuaccggguucgccccuuuuuccaaagauaauucuauccgccucagcgcgggaggcgacaucugggucacaagagagccguauguguccugcgaucccgacaaguguuaccaauucgcucuggggcagggaaccacacuuaacaauguucacucuaacaauaccgugcgggaucgcacgccuuauagaacacugcucaugaacgaacugggcguccccuuucaucuggggaccaaacaggugugcauugccuggagcuccagcucuugucacgacggaaaggccuggcuccauguuugcaucacaggcgaugacaagaaugcuaccgccuccuucauuuacaacggccggcugguggauagcgucgugucuugguccaaagagauccuucgcacccaggaaagcgagugugugugcauuaaugggacauguacggucguuaugaccgacggaucugcuuccggcaaggccgauacaaaaauccuguuuaucgaggaagggaagauugugcacaccagcacacucuccggaucugcgcaacacguggaggaaugcagcugcuauccuagauaccccggcguccggugugugugccgcgacaacuggaagggguccaacagaccgaucguugauauuaauaucaaagaccauagcauugugucuuccuacgucuguagcggacuggugggcgacaccccucggaagaacgauucuagcuccucuagccacugccuugaccccaauaacgaggaaggcgggcauggaguuaaaggcugggccuucgaugacgggaaugauguguggaugggacgcacgaucaacgagacauccagacugggcuaugagaccuuuaaggucaucgaaggguggagcaauccuaaaucuaagcuccagauuaaccgccaggugaucgucgaccggggagauagauccggcuacagcggcauuuucucuguggaggggaaauccuguaucaaucggugcuuuuauguugaacugauuagaggacgcaaggaggaaaccgaggugcuguggacaagcaacuccaucgucguguucuguggcaccucugggacauacggaacgggcagcuggcccgacggggcugaucucaaucugaugcccauuuga

SEQ ID NO: 216338 - RNA, 1410 nt, Artificial Sequence; identical to SEQ ID NO: 216047
  derived and/or modified CDS sequence (opt5) from neuraminidase__InfluenzaA__AHC61898

SEQ ID NO: 216339 - RNA, 1410 nt, Artificial Sequence; identical to SEQ ID NO: 216079
  derived and/or modified CDS sequence (opt5) from neuraminidase__InfluenzaA__AHC61910

SEQ ID NO: 216340 - RNA, 1410 nt, Artificial Sequence; identical to SEQ ID NO: 211590
  derived and/or modified CDS sequence (opt5) from neuraminidase__InfluenzaA__AHC61934

SEQ ID NO: 216341 - RNA, 1410 nt, Artificial Sequence
  derived and/or modified CDS sequence (opt5) from neuraminidase__InfluenzaA__AHC61946
augaaccccaaucagaagaucauuaccaucggcagcgugucccugacaauuucuacgaucugcuucuuuaugcaaauugccauccucaucaccacagucacccugcacuucaaacaguacgagagcuauuccccuccgaacaaucagguuaugcuuugugaacccacaauuaucgagagaaacauuaccgaaaucguguaccugacaaauaccacgauugagaaggaaaucugcccuaaacucgcugaguaucggaacuggucuaagccccagugugacauuaccggguuugccccuuucagcaaagauaauuccauccgccugucugcgggaggcgacaucugggugacaagagagcccuacgucagcugcgauccugacaaguguuaucaauuugcucuugggcagggaaccacacugaacaaugugcauuccaacaauaccguucgggaucgcacgccguacagaacacuccugaugaacgaacugggcgugcccuuccaccucgggaccaagcaggucugcauugccuggucuagcuccagcugucaugacggaaaagccuggcugcacgugugcaucacaggcgaugacaagaaugcuaccgccucuuuuauuuauaacggccggcuuguugauuccguggucagcuggucuaaagagauccugcgcacccaggaauccgagugugugugcauuaaugggacauguacgguggucaugaccgacggaagcgcuuccggcaaggccgauacaaaaauccucuucaucgaggaagggaagauuguucauaccucuacacugagcggauccgcgcaacacguggaggaaugcagcugcuacccuagaaaccccggcgugcggugugucugccgcgacaacuggaaggggucuaauagaccuaucguggauauuaacaucaaagaccacuccauuguuagcucuuacguguguagcggacuugucggcgacacgccccggaagaaugauuccucuagcuccagccauugccuggacccgaacaaugaggaaggcgggcacggagugaaaggcugggccuuugaugacgggaacgauguuuggaugggacgcaccaucaaugagacaucuagacucggcuaugagaccuucaaggugaucgaagggugguccaacccuaaaagcaagcugcagauuaaucggcaggucaucguggaccgcggaaacagaucuggcuacuccggcauuuuuagcgucgaggggaaauccuguaucaaucggugcuucuauguggaacugauuagaggacgcaaggaggaaaccgagguucucuggacaucuaacagcaucguggucuuuuguggcaccuccgggacauacggaacgggcucuuggcccgauggggcugaccugaaucuuaugccuauuuga

SEQ ID NO: 216342 - RNA, 1410 nt, Artificial Sequence; identical to SEQ ID NO: 214994
  derived and/or modified CDS sequence (opt5) from neuraminidase__InfluenzaA__AHC61958

SEQ ID NO: 216343 - RNA, 1410 nt, Artificial Sequence; identical to SEQ ID NO: 216043
  derived and/or modified CDS sequence (opt5) from neuraminidase__InfluenzaA__AHC61970

SEQ ID NO: 216344 - RNA, 1410 nt, Artificial Sequence
  derived and/or modified CDS sequence (opt5) from neuraminidase__InfluenzaA__AHC61982
augaaccccaaucagaagaucauuaccaucggcagcgugucccugacaauuucuacgaucugcuucuuuaugcaaauugccauccucaucaccacagucacccugcacuucaaacaguacgaguuuaacagcccuccgaauaaccagguuaugcuuugugaacccacaauuaucgagagaaauauuaccgaaaucguguaucugacaaacaccacgauugagaaggaaaucugcccuaaacucgcugaguaccggaauugguccaagccccagugugacauuaccggguucgccccuuuuucuaaagauaacagcauccgccuguccgcgggaggcgacaucugggugacaagagagcccuaugucucuugcgauccugacaaguguuaccaauucgcucuugggcagggaaccacacugaauaacgugcauagcaauaacaccguucgggaucgcacgccguauagaacacuccugaugaaugaacugggcgugcccuuucaccucgggaccaagcaggucugcauugccugguccucuagcuccugucaugacggaaaagccuggcugcacgugugcaucacaggcgaugacaagaacgcuaccgccagcuucauuuacaauggccggcuuguugauucuguggucuccuggagcaaagagauccugcgcacccaggaaucugagugugugugcauuaacgggacaugugcuguggucaugacggacggauccgccagcggcaaggcggauaccaaaauccucuuuaucgaggaagggaagauuguucauacauccacccugucuggaagcgcccaacacguggaggaaugcuccugcuauccuagauaccccggcgugcggugugucugccgcgacaacuggaaggggagcaauagaccuaucguggauauuaacaucaaagaccacggaauuguuucuuccuacguguguagcggccuugucggcgacacaccccggaagaaugauucuagcuccucuagccauugccuggacccgaacaaugaggaagggggacacggcgugaaagggugggcuuucgaugacggaaacgauguuuggaugggccgcaccaucaaugagacguccagacucggguaugagacauuuaaggugaucgaaggauggagcaacccuaaaucuaagcugcagauuaaucggcaggucaucguggaccgcggcaacagauccggcuacagcgggauuuucucugucgagggaaaauccuguaucaaucggugcuuuuauguggaacugauuagaggccgcaaggaggaaaccgagguucucuggaccagcaacuccaucguggucuucugugggacaucuggaaccuacggcacagggagcuggcccgauggcgccgaccugaaucuuaugccuauuuga

SEQ ID NO: 216345 - RNA, 1410 nt, Artificial Sequence; identical to SEQ ID NO: 216047
  derived and/or modified CDS sequence (opt5) from neuraminidase__InfluenzaA__AHC61994

SEQ ID NO: 216346 - RNA, 1410 nt, Artificial Sequence; identical to SEQ ID NO: 216079
  derived and/or modified CDS sequence (opt5) from neuraminidase__InfluenzaA__AHC62006

SEQ ID NO: 216347 - RNA, 1410 nt, Artificial Sequence; identical to SEQ ID NO: 216043
  derived and/or modified CDS sequence (opt5) from neuraminidase__InfluenzaA__AHC62018

SEQ ID NO: 216348 - RNA, 1410 nt, Artificial Sequence; identical to SEQ ID NO: 214994
  derived and/or modified CDS sequence (opt5) from neuraminidase__InfluenzaA__AHC62030

SEQ ID NO: 216349 - RNA, 1410 nt, Artificial Sequence; identical to SEQ ID NO: 216047
  derived and/or modified CDS sequence (opt5) from neuraminidase__InfluenzaA__AHC62042

SEQ ID NO: 216350 - RNA, 1410 nt, Artificial Sequence; identical to SEQ ID NO: 216120
  derived and/or modified CDS sequence (opt5) from neuraminidase__InfluenzaA__AHC62053

SEQ ID NO: 216351 - RNA, 1410 nt, Artificial Sequence
  derived and/or modified CDS sequence (opt5) from neuraminidase__InfluenzaA__AHC62065
augaaccccaaucagaagaucauuaccaucggcagcgugucccugacaauuucuacgaucugcuucuuuaugcaaauugccauccucgucaccacaguuacccugcacuucaaacaguacgaguuuaacagcccuccgaauaaccaggugaugcuuugugaacccacaaucauugagagaaauaucaccgaaauuguguaucugacaaacaccacgaucgagaaggaaauuugcccuaaacccgcugaguaccggaauugguccaagccucagugugacaucaccggguucgcccccuuuucuaaagauaacagcauucgccucuccgcgggaggcgacaucugggucacaagagagccuuaugugucuugcgauccggacaaguguuaccaauucgcucuggggcagggaaccacacuuaauaacguucauagcaauaacaccgugcgggaucgcacgcccuauagaacacugcucaugaaugaacugggcgucccuuuucaccuggggaccaaacaggugugcaucgccugguccucuagcuccugucaugacggaaaggccuggcuccacguuugcauuacaggcgaugacaagaacgcuaccgccagcuucaucuacaauggccggcugguggauucugucguguccuggagcaaagagauucuucgcacccaggaaucugagugugugugcaucaacgggacauguacggucguuaugaccgacggauccgcuagcggcaaggccgauacaaaaauucuguuuaucgaggaagggaagaucgugcauaccuccacacucucuggaagcgcgcaacacguggaggaaugcuccugcuaucccagauacccuggcguccggugugugugccgcgacaacuggaaggggagcaauagacccauuguugauaucaacauuaaagaccacucuaucguguccagcuacgucuguucuggacuggugggcgacaccccgcggaagaaugauagcuccucuagcucccauugccuugacccuaacaaugaggaaggcgggcacggaguuaaaggcugggccuucgaugacgggaacgauguguggaugggacgcacgauuaaugagacaagcagacugggcuaugagaccuuuaaggucaucgaaggguggucuaaccccaaauccaagcuccagaucaaucgccaggugauugucgaccggggagauagaagcggcuacucuggcaucuucuccguggaggggaaaagcuguauuaaccggugcuuuuauguugaacugaucagaggacgcaaggaggaaaccgaggugcuguggacauccaauucuauugucguguucuguggcaccagcgggacauacggaacgggcuccuggccugacggggcugaucucaaccugaugcccaucuga

SEQ ID NO: 216352 - RNA, 1410 nt, Artificial Sequence; identical to SEQ ID NO: 216178
  derived and/or modified CDS sequence (opt5) from neuraminidase__InfluenzaA__AHC62077

SEQ ID NO: 216353 - RNA, 1410 nt, Artificial Sequence; identical to SEQ ID NO: 216092
  derived and/or modified CDS sequence (opt5) from neuraminidase__InfluenzaA__AHC62089

SEQ ID NO: 216354 - RNA, 1410 nt, Artificial Sequence; identical to SEQ ID NO: 216043
  derived and/or modified CDS sequence (opt5) from neuraminidase__InfluenzaA__AHC62101

SEQ ID NO: 216355 - RNA, 1410 nt, Artificial Sequence; identical to SEQ ID NO: 216092
  derived and/or modified CDS sequence (opt5) from neuraminidase__InfluenzaA__AHC62113

SEQ ID NO: 216356 - RNA, 1410 nt, Artificial Sequence
  derived and/or modified CDS sequence (opt5) from neuraminidase__InfluenzaA__AHC62125
augaaccccaaucagaagaucauuaccaucggcagcgugucccugacaauuucuacgaucugcuucuuuaugcaaauugccauccucaucaccacagucacccugcacuucaaacaguacgaguuuaacagcccuccgaauaaccagguuaugcuuugugaacccacaauuaucgagagaaauauuaccgaaaucguguaucugacaaacaccacgauugagaaggaaaucugcccuaaacucgcugaguaccggaauugguccaagccccagugugacauuaccggguucgccccuuuuucuaaagauaacagcauccgccuguccgcgggaggcgacaucugggugacaagagagcccuaugucucuugcgauccuaauaaguguuaccaauucgcucuugggcagggaaccacacugaacaaugugcauagcaacaauaccguucgggaccgcacgccguauagaacacuccugaugaacgaacugggcgugcccuuucaccucgggaccaagcaggucugcauugccugguccucuagcuccugucaugauggaaaagccuggcugcacgugugcaucacaggcgacgauaagaaugcuaccgccagcuucauuuacaacggcaaacuuguugacucuguggucuccuggagcaaggagauccugcggacccaggaaucugagugugugugcauuaacgggacauguacgguggucaugaccgauggauccgcuagcggcaaagccgacacaaagauccucuuuaucgaggaagggaagauuguucauaccuccacacugucuggaagcgcgcaacacguggaggaaugcuccugcuauccucgcuaccccggcgugagaugugucugccgggauaauuggaaagggagcaaccgcccuaucguggacauuaauaucaaggaucacucuauuguuuccagcuacguguguucuggacuugucggcgacacccccagaaagaacgacagcuccucuagcucccauugccuggauccgaauaacgaggaaggcgggcacggagugaagggcugggccuucgacgaugggaaugacguuuggaugggacggacgaucaacgagacaagccgccucggcuaugagaccuuuaaagugaucgaaggguggucuaauccuaaguccaaacugcagauuaacagacaggucaucguggaucggggaaauaagagcggcuacucuggcauuuucuccgucgaggggaaaagcuguaucaaccgcugcuuuuauguggaacugauuagaggacggaaagaggaaaccgagguucucuggacauccaauucuaucguggucuucuguggcaccagcgggacauacggaacgggcuccuggcccgacggggcugaucugaaccuuaugccuauuuga

SEQ ID NO: 216357 - RNA, 1410 nt, Artificial Sequence
  derived and/or modified CDS sequence (opt5) from neuraminidase__InfluenzaA__AHC62137
augaaccccaaucagaagaucauuaccaucggcagcgugucccugacaauuucuacgaucugcuucuuuaugcaaauugccauccucaucaccacagucacccugcacuucaaacaguacgaguuuaacagcccuccgaauaaccagguuaugcuuugugaacccacaauuaucgagagaaauauuaccgaaaucguguaucugacaaacaccacgauugagaaggaaaucugcccuaaacucgcugaguaccggaauugguccaagccccagugugacauuaccggguucgccccuuuuucuaaagauaacagcauccgccuguccgcgggaggcgacaucugggugacaagagagcccuaugucucuugcgauccugacaaguguuaccaauucgcucuugggcagggaaccacacugaauaacgugcauagcaauaacaccguucgggaucgcacgccguauagaacacuccugaugaaugaacugggcgugcccuuucaccucgggaccaagcaggucugcauugccugguccucuagcuccugucaugacggaaaagccuggcugcacgugugcaucacaggcgaugacaagaacgcuaccgccagcuucauuuacaauggccggcuuguugauucuguggucuccuggagcaaagagauccugcgcacccaggaaucugagugugugugcauuaacgggacauguacgguggucaugaccgacggauccgcuagcggcaaggccgauacaaaaauccucuuuaucgaggaagggaagauuguucauaccuccacacugucuggaagcgcgcaacacguggaggaaugcuccugcuauccuagauaccccggcgugcggugugucugccgcgacaacuggaaggggagcaauagaccuaucguggauauuaacaucaaagaccacucuauuguuuccagcuacguguguucuggacuugucggcgacacgccccggaagaaugauagcuccucuagcucccauugccuggacccgaacaaugaggaaggcgggcacggagugaaaggcugggccuucgaugacgggaacgauguuuggaugggacgcaccaucaaugagacaagcagacucggcuaugagaccuuuaaggugaucgaaggguggucuaacccuaaauccaagcugcagauuaaucggcaggucaucguggaccgcggagauagaagcggcuacucuggcauuuucuccgucgaggggaaaagcuguaucaaccggugcuuuuauguggaacugauuagaggacgcaaggaggaaaccgagguucucuggacauccaauucuaucguggucuucuguggcaccagcgggacauacggaacgggcuccuggcccgacggggcugaucugaaccuuaugccuauuuga

SEQ ID NO: 216358 - RNA, 1410 nt, Artificial Sequence
  derived and/or modified CDS sequence (opt5) from neuraminidase__InfluenzaA__AHC62149
augaaccccaaucagaagaucauuaccaucggcagcgugucccugacaauuucuacgaucugcuucuuuaugcaaauugccauccucaucaccacagucacccugcacuucaaacaguacgaguuuaacagcccuccgaauaaccagguuaugcuuugugaacccacaauuaucgagagaaauauuaccgaaaucguguaucugacaaacaccacgauugagaaggaaaucugcccuaaacccgcugaguaccggaauugguccaagccucagugugacauuaccggguucgcccccuuuucuaaagauaacagcauccgccucuccgcgggaggcgacaucugggugacaagagagccuuaugucucuugcgauccggacaaguguuaccaauucgcucuggggcagggaaccacacuuaauaacgugcauagcaauaacaccguucgggaucgcacgcccuauagaacacugcucaugaaugaacugggcgugccuuuucaccuggggaccaagcaggucugcauugccugguccagcagcuccugucaugacggaaaagccuggcuccacgugugcaucacaggcgaugacaagaacgcuaccgccagcuucauuuacaauggccggcugguugauucuguggucuccuggagcaaagagauccuucgcacccaggaaucugagugugugugcauuaacgggacauguacgguggucaugaccgacggauccgcuagcggcaaggccgauacaaaaauccuguuuaucgaggaagggaagauuguucauaccuccacacucucuggaagcgcgcaacacguggaggaaugcuccugcuaucccagauacccuggcgugcggugugucugccgcgacaacuggaaggggagcaauagacccaucguggauauuaacauccgggaccacucuauuguuuccagcuacguguguucuggacuggucggcgacaccccgcgcaaaaaugauagcuccucuagcucccauugccuugacccuaacaaugaggaaggcgggcacggagugaagggcugggccuucgaugacgggaacgauguuuggaugggaagaacgaucaaugagacaagccggcugggcuaugagaccuuuaaagugaucgaaggguggucuaaccccaaguccaaacuccagauuaaucgccaggucaucguggacagaggagaucggagcggcuacucuggcauuuucuccgucgaggggaagucuuguaucaacagaugcuuuuauguggaacugauucgcggacggaaagaggaaaccgagguucuguggacauccaauucuaucguggucuucuguggcaccagcgggacauacggaacgggcuccuggccugacggggcugaucucaaccugaugcccauuuga

SEQ ID NO: 216359 - RNA, 1410 nt, Artificial Sequence; identical to SEQ ID NO: 216079
  derived and/or modified CDS sequence (opt5) from neuraminidase__InfluenzaA__AHC62161

SEQ ID NO: 216360 - RNA, 1410 nt, Artificial Sequence
  derived and/or modified CDS sequence (opt5) from neuraminidase__InfluenzaA__AHC62173
augaaccccaaucagaagaucauuaccaucggcagcgugucccugacaauuucuacgaucugcuucuuuaugcaaauugccauccucaucaccacagucacccugcacuucaaacagugugaguuuaacagcccuccgaauaaccagguuaugcuuugcgaacccacaauuaucgagagaaauauuaccgaaaucguguaccugacaaacaccacgauugagaaggaaaucuguccuaaacucgcugaguaucggaauugguccaagccccagugcgacauuaccggguucgccccuuuuucuaaagauaacagcauccgccuguccgcgggaggcgacaucugggugacaagagagcccuacgucucuugugauccuaauaagugcuaucaauucgcucuugggcagggaaccacacugaacaaugugcauagcaacaauaccguucgggaccgcacgccguacagaacacuccugaugaacgaacugggcgugcccuuucaccucgggaccaagcaggucuguauugccugguccucuagcuccugccaugauggaaaagccuggcugcacguguguaucacaggcgacgauaagaaugcuaccgccagcuucauuuauaacggcaaacuuguugacucuguggucuccuggagcaaggagauccugcggacccaggaaucugagugcguguguauuaacgggacaugcacgguggucaugaccgauggauccgcuagcggcaaagccgacacaaagauccucuuuaucgaggaagggaagauuguucauaccuccacacugucuggaagcgcgcaacacguggaggaaugcuccuguuacccucgcuaucccggcgugagaugcgucugucgggauaauuggaaagggagcaaccgcccuaucguggacauuaauaucaaggaucacucuauuguuuccagcuacgugugcucuggacuugucggcgacacccccagaaagaacgacagcuccucuagcucccauugucuggauccgaauaacgaggaaggcgggcacggagugaagggcugggccuucgacgaugggaaugacguuuggaugggacggacgaucaacgagacaagccgccucggcuacgagaccuuuaaagugaucgaaggguggucuaauccuaaguccaaacugcagauuaacagacaggucaucguggaucggggaaaucgcagcggcuauucuggcauuuucuccgucgaggggaaaagcugcaucaacagauguuuuuacguggaacugauucggggaagaaaggaggaaaccgagguucucuggacauccaauucuaucguggucuucugcggcaccagcgggacauauggaacgggcuccuggcccgacggggcugaucugaaccuuaugccuauuuga

SEQ ID NO: 216361 - RNA, 1410 nt, Artificial Sequence; identical to SEQ ID NO: 216092
  derived and/or modified CDS sequence (opt5) from neuraminidase__InfluenzaA__AHC62185

SEQ ID NO: 216362 - RNA, 1410 nt, Artificial Sequence; identical to SEQ ID NO: 214994
  derived and/or modified CDS sequence (opt5) from neuraminidase__InfluenzaA__AHC62197

SEQ ID NO: 216363 - RNA, 1410 nt, Artificial Sequence
  derived and/or modified CDS sequence (opt5) from neuraminidase__InfluenzaA__AHC62209
augaaccccaaucagaagaucauuaccaucggcagcgugucccugacaauuucuacgaucugcuucuuuaugcaaauugccauccucaucaccacagucacccugcacuucaaacaguacgaguuuaacagcccuccgaauaaccagguuaugcuuugugaacccacaauuaucgagagaaauauuaccgaaaucguguaucugacaaacaccacgauugagaaggaaaucugcccuaaacccgcugaguaccggaauugguccaagccucagugugacauuaccggguucgcccccuuuucuaaagauaacagcauccgccucuccgcgggaggcgacaucugggugacaagagagccuuaugucucuugcgauccggacaaguguuaccaauucgcucuggggcagggaaccacacuuaauaacgugcauagcaauaacaccguucgggaucgcacgcccuauagaacacugcucaugaaugaacugggcgugccuuuucaccuggggaccaagcaggucugcauugccugguccucuagcuccugucaugacggaaaagccuggcuccacgugugcaucacaggcgaugacaagaacgcuaccgccagcuucauuuacaauggccggcugguugauucuguggucuccuggagcaaagagauccuucgcacccaggaaucugagugugugugcauuaacgggacauguacgguggucaugaccgacggauccgcuagcggcaaggccgauacaaaaauccuguuuaucgaggaagggaagauuguucauaccuccacacucucuggaagcgcgcaacacguggaggaaugcuccugcuaucccagauacccuggcgugcggugugucugccgcgacaacuggaaggggagcaauagacccaucguggauauuaacaucaaaaaucacucuauuguuuccagcuacguguguucuggacuggucggcgacaccccgcggaagaacgacagcuccucuagcucccauugccuugauccuaauaacgaggaaggcgggcacggagugaaaggcugggccuucgacgaugggaaugacguuuggaugggacgcacgaucaacgagacaagcagacugggcuaugagaccuuuaaggugaucgaaggguggucuaaucccaaauccaagcuccagauuaaccggcaggucaucguggaucgcggagacagaagcggcuacucuggcauuuucuccgucgaggggaaaagcuguaucaaucggugcuuuuauguggaacugauuagaggacgcaaggaggaaaccgagguucuguggacauccaacucuaucguggucuucuguggcaccagcgggacauacggaacgggcuccuggccugauggggcugaccucaaucugaugcccauuuga

SEQ ID NO: 216364 - RNA, 1410 nt, Artificial Sequence; identical to SEQ ID NO: 216047
  derived and/or modified CDS sequence (opt5) from neuraminidase__InfluenzaA__AHC62221

SEQ ID NO: 216365 - RNA, 1410 nt, Artificial Sequence; identical to SEQ ID NO: 211590
  derived and/or modified CDS sequence (opt5) from neuraminidase__InfluenzaA__AHC62233

SEQ ID NO: 216366 - RNA, 1410 nt, Artificial Sequence; identical to SEQ ID NO: 216043
  derived and/or modified CDS sequence (opt5) from neuraminidase__InfluenzaA__AHC62245

SEQ ID NO: 216367 - RNA, 1410 nt, Artificial Sequence
  derived and/or modified CDS sequence (opt5) from neuraminidase__InfluenzaA__AHC62257
augaaccccaaucagaagaucauuaccaucggcagcgugucccugacaauuucuacgaucugcuucuuuaugcaaauugccauccucaucaccacagucacccugcacuucaaacaguacgaguuuaacagcccuccgaauaaccagguuaugcuuugugaacccacaauuaucgagagaaauauuaccgaaaucguguaucugacaaacaccacgauugagaaggaaaucugcccuaaacccgcugaguaccggaauugguccaagccucagugugacauuaccggguucgcccccuuuucuaaagauaacagcauccgccucuccgcgggaggcgacaucugggugacaagagagccuuaugucucuugcgauccggacaaguguuaccaauucgcucuggggcagggaaccacacuuaauaacgugcauagcaauaacaccguucgggaucgcacgcccuauagaacacugcucaugaaugaacugggcgugccuuuucaccuggggaccaagcaggucugcauugccugguccucuagcuccugucaugacggaaaagccuggcuccacgugugcaucacaggcgaugacaagaacgcuaccgccagcuucauuuacaauggccggcugguugauucuguggucuccuggagcaaagagauccuucgcacccaggaaucugagugugugugcauuaacgggacauguacgguggucaugaccgacggauccgcuagcggcaaggccgauacaaaaauccuguuuaucgaggaagggaagauuguucauaccuccacacucucuggaagcgcgcaacacguggaggaaugcuccugcuaucccagauacccuggcgugcggugugucugccgcgacaacuggaaggggagcaauagacccaucguggauauuaacaucaaagaccacucuauuguuuccagcuacguguguucuggacuggucggcgacaccccgcggaagaaugauagcuccucuagcucccauugccuugacccuaacaaugaggaaggcgggcacggagugaaaggcugggccuucgaugacgggaacgauguuuggaugggacgcacgaucaaugagacaagcagacugggcuaugagaccuuuaaggugaucgaaggguggucuaaccccaaauccaagcuccagauuaaucggcaggucaucgugggacgcggcgacagaagcggcuacucugggauuuucuccgucgagggaaaaagcuguaucaaccggugcuuuuauguggaacugauuagaggccgcaaggaggaaaccgagguucuguggacauccaauucuaucguggucuucugugggaccagcggaacauacggcacgggguccuggccugauggcgcugaccucaaccugaugcccauuuga

SEQ ID NO: 216368 - RNA, 1410 nt, Artificial Sequence; identical to SEQ ID NO: 216120
  derived and/or modified CDS sequence (opt5) from neuraminidase__InfluenzaA__AHC62269

SEQ ID NO: 216369 - RNA, 1410 nt, Artificial Sequence; identical to SEQ ID NO: 216092
  derived and/or modified CDS sequence (opt5) from neuraminidase__InfluenzaA__AHC62281

SEQ ID NO: 216370 - RNA, 1410 nt, Artificial Sequence; identical to SEQ ID NO: 216047
  derived and/or modified CDS sequence (opt5) from neuraminidase__InfluenzaA__AHC62293

SEQ ID NO: 216371 - RNA, 1410 nt, Artificial Sequence; identical to SEQ ID NO: 211590
  derived and/or modified CDS sequence (opt5) from neuraminidase__InfluenzaA__AHC62305

SEQ ID NO: 216372 - RNA, 1410 nt, Artificial Sequence; identical to SEQ ID NO: 216043
  derived and/or modified CDS sequence (opt5) from neuraminidase__InfluenzaA__AHC62317

SEQ ID NO: 216373 - RNA, 1410 nt, Artificial Sequence
  derived and/or modified CDS sequence (opt5) from neuraminidase__InfluenzaA__AHC62329
augaaccccaaucagaagaucauuaccaucggcagcgugucccugacaauuucuacgaucugcuucuuuaugcaaauugccauccucaucaccacagucacccugcacuucaaacaguacgaguuuaacagcccuccgaauaaccagguuaugcuuugugaacccacaauuaucgagagaaauauuaccgaaaucguguaucugacaaacaccacgauugagaaggaaaucugcccuaaacccgcugaguaccggaauugguccaagccucagugugacauuaccggguucgcccccuuuucuaaagauaacagcauccgccucuccgcgggaggcgacaucugggugacaagagagccuuaugucucuugcgauccggacaaguguuaccaauucgcucuggggcagggaaccacacuuaauaacgugcauagcaauaacaccguucgggaucgcacgcccuauagaacacugcucaugaaugaacugggcgugccuuuucaccuggggaccaagcaggucugcauugccugguccucuagcuccugucaugacggaaaagccuggcuccacgugugcaucacaggcgaugacaagaacgcuaccgccagcuucauuuacaauggccggcugguugauucuguggucuccuggagcaaagagauccuucgcacccaggaaucugagugugugugcauuaacgggacauguacgguggucaugaccgacggauccgcuagcggcaaggccgauacaaaaauccuguuuaucgaggaagggaagauuguucauaccuccacacucucuggaagcgcgcaacacguggaggaaugcuccugcuaucccagauacccuggcgugcggugugucugccgcgacaacuggaaggggagcaauagacccaucguggauauuaacaucaaagaccacucuauuguuuccagcuacguguguucuggacuggucggcgacaccccgcggaagaaugauagcuccucuagcucccauugccuugacccuaacaaugaggaaggcgggcacggagugaaaggcugggccuucgaugacgggaacgauguuuggaugggacgcacgaucaaugagacaagcagacugggcuaugagaccuuuaaggugaucgaaggguggucuaaccccaaauccaagcuccagauuaaucggcaggucaucgcugaccgcggagauagaagcggcuacucuggcauuuucuccguggaggggaaaagcuguaucaaccggugcuuuuaugucgaacugauuagaggacgcaaggaggaaaccgaggugcuguggacauccaauucuaucguuguguucuguggcaccagcgggacauacggaacgggcuccuggccugacggggccgaucucaaccugaugcccauuuga

SEQ ID NO: 216374 - RNA, 1410 nt, Artificial Sequence; identical to SEQ ID NO: 216043
  derived and/or modified CDS sequence (opt5) from neuraminidase__InfluenzaA__AHC62341

SEQ ID NO: 216375 - RNA, 1410 nt, Artificial Sequence
  derived and/or modified CDS sequence (opt5) from neuraminidase__InfluenzaA__AHC62353
augaaccccaaucagaagaucauuaccaucggcagcgugucccugacaauuucuacgaucugcuucuuuaugcaaauugccauccucaucaccacagucacccugcacuucaaacaguacgaguuuaacagcccuccgaauaaccagguuaugcuuugugaacccacaauuaucgagagaaauauuaccgaaaucguguaucugacaaacaccacgauugagaaggaaaucugcccuaaacucgcugaguaccggaauugguccaagccccagugugacauuaccggguucgccccuuuuucuaaagauaacagcauccgccuguccgcgggaggcgacaucugggugacaagagagcccuaugucucuugcgauccugacaaguguuaccaauucgcucuugggcagggaaccacacugaauaacgugcauagcaauaacaccguucgggaucgcacgccguauagaacacuccugaugaaugaacugggcgugcccuuucaccucgggaccaagcaggucugcauugccugguccucuagcuccugucaugacggaaaagccuggcugcacgugugcaucacaggcgaugacaagaacgcuaccgccagcuucauuuacaauggccggcuuguugauucuguggucuccuggagcaaagagauccugcgcacccaggaaucugagugugugugcauuaacgggacauguacgguggucaugaccgacggauccgcuagcggcaaggccgauacaaaaauccucuuuaucgaggaagggaagauuguucauaccuccacacugucuggaagcgcgcaacacguggaggaaugcuccugcuauccuagauaccccggcgugcggugugucugccgcgacaacuggaaggggagcaauagaccuaucguggauauuaacaucaaagaccacucuauuguuuccagcuacguguguucuggacuugucggcgacacgccccggaagaccgauagcuccucuagcucccauugccuggacccgaauaacgaggaaggcgggcacggagugaaaggcugggccuucgaugacgggaaugauguuuggaugggacgcacaaucaacgagaccagcagacucggcuaugagaccuuuaaggugaucgaaggguggucuaauccuaaauccaagcugcagauuaaccggcaggucaucguggaccgcggaaauagaagcggcuacucuggcauuuucuccgucgaggggaaaagcuguaucaaccggugcuuuuauguggaacugauuagaggacgcaaggaggaaacagagguucucuggaccuccaauucuaucguggucuucuguggcacaagcgggacguacggaaccggcuccuggcccgauggggcugaccugaaccuuaugccuauuuga

SEQ ID NO: 216376 - RNA, 1410 nt, Artificial Sequence; identical to SEQ ID NO: 216043
  derived and/or modified CDS sequence (opt5) from neuraminidase__InfluenzaA__AHC62365

SEQ ID NO: 216377 - RNA, 1410 nt, Artificial Sequence; identical to SEQ ID NO: 216260
  derived and/or modified CDS sequence (opt5) from neuraminidase__InfluenzaA__AHC62377

SEQ ID NO: 216378 - RNA, 1410 nt, Artificial Sequence; identical to SEQ ID NO: 216092
  derived and/or modified CDS sequence (opt5) from neuraminidase__InfluenzaA__AHC62389

SEQ ID NO: 216379 - RNA, 1410 nt, Artificial Sequence; identical to SEQ ID NO: 216092
  derived and/or modified CDS sequence (opt5) from neuraminidase__InfluenzaA__AHC62401

SEQ ID NO: 216380 - RNA, 1410 nt, Artificial Sequence; identical to SEQ ID NO: 216120
  derived and/or modified CDS sequence (opt5) from neuraminidase__InfluenzaA__AHC62413

SEQ ID NO: 216381 - RNA, 1410 nt, Artificial Sequence; identical to SEQ ID NO: 216178
  derived and/or modified CDS sequence (opt5) from neuraminidase__InfluenzaA__AHC62425

SEQ ID NO: 216382 - RNA, 1410 nt, Artificial Sequence; identical to SEQ ID NO: 211590
  derived and/or modified CDS sequence (opt5) from neuraminidase__InfluenzaA__AHC62437

SEQ ID NO: 216383 - RNA, 1410 nt, Artificial Sequence; identical to SEQ ID NO: 216092
  derived and/or modified CDS sequence (opt5) from neuraminidase__InfluenzaA__AHC62449

SEQ ID NO: 216384 - RNA, 1410 nt, Artificial Sequence; identical to SEQ ID NO: 216047
  derived and/or modified CDS sequence (opt5) from neuraminidase__InfluenzaA__AHC62461

SEQ ID NO: 216385 - RNA, 1410 nt, Artificial Sequence; identical to SEQ ID NO: 216043
  derived and/or modified CDS sequence (opt5) from neuraminidase__InfluenzaA__AHC62473

SEQ ID NO: 216386 - RNA, 1410 nt, Artificial Sequence; identical to SEQ ID NO: 214218
  derived and/or modified CDS sequence (opt5) from neuraminidase__InfluenzaA__AHC62485

SEQ ID NO: 216387 - RNA, 1410 nt, Artificial Sequence; identical to SEQ ID NO: 216092
  derived and/or modified CDS sequence (opt5) from neuraminidase__InfluenzaA__AHC62509

SEQ ID NO: 216388 - RNA, 1410 nt, Artificial Sequence
  derived and/or modified CDS sequence (opt5) from neuraminidase__InfluenzaA__AHC62521
augaaccccaaucagaagaucauuaccaucggcagcgugucccugacaauuucuacgaucugcuucuuuaugcaaauugccauccucaucaccacagucacccugcacuucaaacaguacgaguuuaacagcccuccgaauaaccagguuaugcuuugugaacccacaauuaucgagagaaauauuaccgaaaucguguaucugacaaacaccacgauugagaaggaaaucugcccuaaacucgcugaguaccggaauugguccaagccccagugugacauuaccggguucgccccuuuuucuaaagauaacagcauccgccuguccgcgggaggcgacaucugggugacaagagagcccuaugucucuugcgauccuaauaaguguuaccaauucgcucuugggcagggaaccacacugaacaaugugcauagcaacaauaccguucgggaccgcacgccguauagaacacuccugaugaacgaacugggcgugcccuuucaccucgggaccaagcaggucugcauugccugguccucuagcuccugucaugauggaaaagccuggcugcacgugugcaucacaggcgacgauaagaaugcuaccgccagcuucauuuacaacggcaaacuuguugacucuguggucuccuggagcaaggagauccugcggacccaggaaucugagugugugugcauuaacgggacauguacgguggucaugaccgauggauccgcuagcggcaaagccgacacaaagauccucuuuaucgaggaagggaagauuguucauaccuccacacugucuggaagcgcgcaacacguggaggaaugcuccugcuauccucgcuaccccggcgugagaugugucugccgggauaauuggaaagggagcaaccgcccuaucguggacauuaauaucaaggaucacucuauuguuuccagcuacguguguucuggacuugucggcgacacccccagaaagaacgacagcuccucuagcucccauugccuggauccgaauaacgaggaaggcgggcacggagugaagggcugggccuucgacgaugggaaugacguuuggaugggacggacgaucaacgagacaagccgccucggcuaugagaccuuuaaagugaucgaaggguggucuaauccuaaguccaaacugcagauuaacagacaggucaucguggaucggggaaaucgcagcggcuacucuggcauuuucuccgucgaggggaaaagcuguaucaacagaugcuuuuauguggaacugauucggggaagaaaggaggaaaccgagguucucuggacauccaauucuaucauuguguucuguggcaccagcgggacauacggaacgggcuccuggcccgacggggcugaucugaaccuuaugccuaucuga

SEQ ID NO: 216389 - RNA, 1410 nt, Artificial Sequence
  derived and/or modified CDS sequence (opt5) from neuraminidase__InfluenzaA__AHC62533
augaaccccaaucagaagaucauuaccaucggcagcgugucccugacaauuucuacgaucugcuucuuuaugcaagucgccauucucaucaccacaguuacccugcacuucaaacaguacgaguuuaacagcccuccgaauaaccaggugaugcuuugugaacccacaaucauugagagaaauaucaccgaaauucuguaucucacaaacaccacgaucgagaaggaaauuugcccuaaacuggcugaguaccggaauugguccaagccccagugugacaucaccggguucgccccuuuuucuaaagauaacagcauucgccuuuccgcgggaggcgacaucugggugacaagagagcccuaugucucuugcgauccugacaaguguuaccaauucgcucuggggcagggaaccacacucaauaacgugcauagcaauaacaccguucgggaucgcacgccguauagaacacugcugaugaaugaacucggcgugcccuuucaccuggggaccaagcaggucugcaucgccugguccucuagcuccugucaugacggaaaagccuggcuucacgugugcauuacaggcgaugacaagaacgcuaccgccagcuucaucuacaauggcaaacugguugauucuguggucuccuggagcaaggagauucuccggacccaggaaucugagugugugugcaucaacgggacauguacgguggucaugaccgacggauccgcuagcggcaaagccgauacaaagauucuguuuaucgaggaagggaagaucguucauaccuccacacuuucuggaagcgcgcaacacguggaggaaugcuccugcuauccucgcuaccccggcgugagaugugucugccgggacaacuggaaagggagcaaucgcccuauuguggauaucaacauuaaggaccacucuaucguuuccagcuacguguguucuggacuggucggcgacacccccagaaagaaugauagcuccucuagcucccauugccucgacccgaacaaugaggaaggcgggaacggagugaagggcugggccuucgaugacgggaaugauguuuggaugggacggacgauuaacgagacaagccgccugggcuaugagaccuuuaaagugaucgaaggguggucuaauccuaaguccaaacugcagaucaacagacaggucauuguggaccggggaaaucgcagcggcuacucuggcaucuucuccgucgaggggaaaagcuguauuaacagaugcuuuuauguggaacucauccggggaagaaaggaggaaaccgagguucuguggacauccaauucuauuguggucuucuguggcaccagcgggacauacggaacgggcuccuggcccgauggggcugaccuuaaccugaugccuaucuga

SEQ ID NO: 216390 - RNA, 1410 nt, Artificial Sequence; identical to SEQ ID NO: 216247
  derived and/or modified CDS sequence (opt5) from neuraminidase__InfluenzaA__AHC62545

SEQ ID NO: 216391 - RNA, 1410 nt, Artificial Sequence; identical to SEQ ID NO: 216092
  derived and/or modified CDS sequence (opt5) from neuraminidase__InfluenzaA__AHC62557

SEQ ID NO: 216392 - RNA, 1410 nt, Artificial Sequence; identical to SEQ ID NO: 216043
  derived and/or modified CDS sequence (opt5) from neuraminidase__InfluenzaA__AHC62569

SEQ ID NO: 216393 - RNA, 1410 nt, Artificial Sequence; identical to SEQ ID NO: 216092
  derived and/or modified CDS sequence (opt5) from neuraminidase__InfluenzaA__AHC62581

SEQ ID NO: 216394 - RNA, 1410 nt, Artificial Sequence
  derived and/or modified CDS sequence (opt5) from neuraminidase__InfluenzaA__AHC62593
augaaccccaaucagaagaucauuaccaucggcagcgugucccugacaauuucuacgaucugcuucuuuaugcaaauugccauccucaucaccacagucacccugcacuucaaacaguacgaguuuaacagcccuccgaauaaccagguuaugcuuugugaacccacaauuaucgagagaaauauuaccgaaaucguguaucugacaaacaccacgauugagaaggaaaucugcccuaaacucgcugaguaccggaauugguccaagccccagugugacauuaccggguucgccccuuuuucuaaagauaacagcauccgccuguccgcgggaggcaauaucugggugacaagagagcccuaugucucuugcgacccugauaaguguuaccaauucgcucuugggcagggaaccacacugaacaaugugcauagcaacaauaccguucgggaccgcacgccguauagaacacuccugaugaacgaacugggcgugcccuuucaccucgggaccaagcaggucugcauugccugguccucuagcuccugucaugauggaaaagccuggcugcacgugugcaucacaggcgacgauaagaaugcuaccgccagcuucauuuacaacggccggcuuguugacucuguggucuccuggagcaaagagauccugcgcacccaggaaucugagugugugugcauuaacgggacauguacgguggucaugaccgauggauccgcuagcggcaaggccgacacaaaaauccucuuuaucgaggaagggaagauuguucauaccuccacacugucuggaagcgcgcaacacguggaggaaugcuccugcuauccuagauaccccggcgugcggugugucugccgcgauaauuggaaggggagcaacagaccuaucguggacauuaauaucaaagaucacucuauuguuuccagcuacguguguucuggacuugucggcgacacgccccggaagaacgacagcuccucuagcucccauugccuggauccgaauaacgaggaaggcgggcacggagugaaaggcugggccuucgacgaugggaaugacguuuggaugggacgcaccaucaacgagacaagcagacucggcuaugagaccuuuaaggugaucgaaggguggucuaauccuaaauccaagcugcagauuaaccggcaggucaucguggaucgcggaaauagaagcggcuacucuggcauuuucuccgucgaggggaaaagcuguaucaaccggugcuuuuauguggaacugauuagaggacgcaaggaggaaaccgagguucucuggacauccaauucuaucguggucuucuguggcaccagcgggacauacggaacgggcuccuggcccgacggggcugaucugaaccuuaugccuauuuga

SEQ ID NO: 216395 - RNA, 1410 nt, Artificial Sequence; identical to SEQ ID NO: 216079
  derived and/or modified CDS sequence (opt5) from neuraminidase__InfluenzaA__AHC62605

SEQ ID NO: 216396 - RNA, 1410 nt, Artificial Sequence
  derived and/or modified CDS sequence (opt5) from neuraminidase__InfluenzaA__AHC62617
augaaccccaaucagaagaucauuaccaucggcagcgugucccugacaauuucuacgaucugcuucuuuaugcaaauugccauccucaucaccacagucacccugcacuucaaacaguacgaguuuaacagcccuccgaauaaccagguuaugagaugugaacccacaauuaucgagcggaauauuaccgaaaucguguaucuuacaaacaccacgauugagaaggaaaucugcccuaaacuggcugaguaccgcaauugguccaagccccagugugacauuaccggguucgccccuuuuucuaaagauaacagcaucagacucuccgcgggaggcgacaucugggugacacgggagcccuaugucucuugcgauccuaauaaguguuaccaauucgcucuggggcagggaaccacacuuaacaaugugcauagcaacaauaccguucgcgacagaacgccguaucggacacugcucaugaacgaacugggcgugcccuuucaccuggggaccaagcaggucugcauugccugguccagcagcuccugucaugauggaaaagccuggcuccacgugugcaucacaggcgacgauaagaaugcuaccgccagcuucauuuacaacggcaaacugguugacucuguggucuccuggagcaaggagauccuucgcacccaggaaucugagugugugugcauuaacgggacauguacgguggucaugaccgauggauccgcuagcggcaaagccgacacaaagauccuguuuaucgaggaagggaagauuguucauaccuccacacucucuggaagcgcgcaacacguggaggaaugcuccugcuauccuagauaccccggcgugcggugugucugccgcgauaauuggaaagggagcaacagaccuaucguggacauuaauaucaaggaucacucuauuguuuccagcuacguguguucuggacuggucggcgacacgccccggaaaaacgacagcuccucuagcucccauugccuugauccgaauaacgaggaaggcgggcacggagugaagggcugggccuucgacgaugggaaugacguuuggaugggacgcaccaucaacgagacaagcagacugggcuaugagaccuuuaaagugaucgaaggguggucuaauccuaaguccaaacuccagauuaaccggcaggucaucguggaucgcggaaauagaagcggcuacucuggcauuuucuccgucgaggggaagucuuguaucaaccggugcuuuuauguggaacugauuagaggacgcaaggaggaaaccgagguucuguggacauccaauucuaucguggucuucuguggcaccagcgggacauacggaacgggcuccuggcccgacggggcugaucucaaccugaugccuauuuga

SEQ ID NO: 216397 - RNA, 1410 nt, Artificial Sequence; identical to SEQ ID NO: 216047
  derived and/or modified CDS sequence (opt5) from neuraminidase__InfluenzaA__AHC62629

SEQ ID NO: 216398 - RNA, 1410 nt, Artificial Sequence
  derived and/or modified CDS sequence (opt5) from neuraminidase__InfluenzaA__AHC62641
augaaccccaaucagaagaucauuaccaucggcagcgugucccugacaauuucuacggucugcuucuuuaugcaaguugccauccucauuaccacagugacccugcacuucaaacaguacgaguuuaacagcccuccgaauaaccaggugaugcuuugugaacccacaaucaucgagagaaauauuaccgaaauccuguaucucacaaacaccacgauugagaaggaaaucugcccuaaacuggcugaguaccggaauugguccaagccccagugugacauuaccggguucgccccuuuuucuaaagauaacagcauccgccuuuccgcgggaggcgacauuugggucacaagagagcccuaugugucuugcgauccugacaaguguuaccaauucgcucuggggcagggaaccacacucaauaacguucauagcaauaacaccgugcgggaucgcacgccguauagaacacugcugaugaaugaacucggcguccccuuucaccuggggaccaaacaggugugcaucgccugguccagcagcuccugucaugacggaaaagccuggcuucacguuugcaucacaggcgaugacaagaacgcuaccgccagcuucauuuacaauggcaaacugguggauucugucguguccuggagcaaggagauccuccggacccaggaaucugagugugugugcauuaacgggacauguacggucguuaugaccgacggauccgcuagcggcaaagccgauacaaagauccuguuuauugaggaagggaagaucgugcauaccuccacacuuucuggaagcgcgcaacacguggaggaaugcuccugcuauccucgcuaccccggcgucagaugugugugccgggacaacuggaaagggagcaaucgcccuaucguugauauuaacaucaaggaccacucuauuguguccagcuacgucuguucuggacuggugggcgacacccccagaaagaaugauagcuccucuagcucccauugccucgacccgaacaaugaggaaggcgggcacggaguuaagggcugggccuucgaugacgggaacgauguguggaugggacggacgaucaaugagacaagccgccugggcuaugagaccuuuaaagucauugaaggguggucuaacccuaaguccaaacugcagaucaauagacaggugaucgucgaccggggaaaccgcagcggcuacucuggcauuuucuccguggaggggaagucuuguaucaauagaugcuuuuauguugaacucauucggggaagaaaggaggaaaccgaggugcuguggacauccaacucuaucgucguguucuguggcaccagcgggacauacggaacgggcuccuggcccgauggggcugaccuuaaucugaugccuauuuga

SEQ ID NO: 216399 - RNA, 1410 nt, Artificial Sequence; identical to SEQ ID NO: 216047
  derived and/or modified CDS sequence (opt5) from neuraminidase__InfluenzaA__AHC62653

SEQ ID NO: 216400 - RNA, 1410 nt, Artificial Sequence; identical to SEQ ID NO: 216047
  derived and/or modified CDS sequence (opt5) from neuraminidase__InfluenzaA__AHC62665

SEQ ID NO: 216401 - RNA, 1410 nt, Artificial Sequence
  derived and/or modified CDS sequence (opt5) from neuraminidase__InfluenzaA__AHC62677
augaaccccaaucagaagaucauuaccaucggcagcgugucccugacaauuucuacgaucugcuucuuuaugcaaauugccauccucaucaccacagucacccugcacuucaaacaguacgaguuuaacagcccuccgaauaaccagguuaugcuuugugaacccacaauuaucgagagaaauauuaccgaaaucguguaucugacaaacaccacgauugagaaggaaaucugcccuaaacucgcugaguaccggaauugguccaagccccagugugacauuaccggguucgccccuuuuucuaaagauaacagcauccgccuguccgcgggaggcgacaucugggugacaagagagcccuaugucucuugcgauccuaauaaguguuaccaauucgcucuugggcagggaaccacacugaacaaugugcauagcaacaauaccguucgggaccgcacgccguauagaacacuccugaugaacgaacugggcgugcccuuucaccucgggaccaagcaggucugcauugccugguccucuagcuccugucaugauggaaaagccuggcugcacgugugcaucacaggcgacgauaagaaugcuaccgccagcuucauuuacaacggcaaacuuguugacucuguggucuccuggagcaaggagauccugcggacccaggaaucugagugugugugcauuaacgggacauguacgguggucaugaccgauggauccgcuagcggcaaagccgacacaaagauccucuuuaucgaggaagggaagauuguucauaccuccacacugucuggaagcgcgcaacacguggaggaaugcuccugcuauccucgcuaccccggcgugagaugugucugccgggauaauuggaaagggagcaaccgcccuaucguggacauuaauaucaaggaucacucuauuguuuccagcuacguguguucuggacuugucggcgacacccccagaaagaacgacaucagcuccucuagccauugccuggauccgaauaacgaggaaggcgggcacggagugaaaggcugggccuucgacgaugggaaugacguuuggaugggacggacgaucaacgagacaucccgccucggcuaugagaccuuuaaagugauugaaggguggagcaauccuaagucuaaacugcagaucaacagacaggucauuguggaucggggaaaucgcuccggcuacagcggcaucuucucugucgaggggaaguccuguauuaacagaugcuuuuauguggaacugauccggggaagaaaggaggaaaccgagguucucuggacaagcaauuccauuguggucuucuguggcaccucugggacauacggaacgggcagcuggcccgacggggcugaucugaaccuuaugccuaucuga

SEQ ID NO: 216402 - RNA, 1398 nt, Artificial Sequence
  derived and/or modified CDS sequence (opt5) from neuraminidase__InfluenzaA__AHF20560
augaaccccaaucagaagauccugugcaccagcgccacagcuauuaucauuggcgccaucacggugcucauugggaucgcgaaccugggacuuaauaucggccugcaccucaaaccuggguguaacugcucccauucucaaccggagaccacaaauaccagccagacaauuaucaacaauuacuauaacgaaaccaauacaaccaacauucagauggaggaaagaacgucccggaauuucaacaaucugaccaagggacuuuguacaaucaacucuuggcacauuuacggcaaagacaaugcuguccgcaucggggagagcuccgauguucuggugaccagagaacccuaugugucuugcgacccugaugagugucgguuuuacgcccucagccagggaacaaccauucgcggcaagcauuccaacggcacgauccacgacagaagccaauaucgggcccugaucucuuggccccuguccagcccucccacagucuacaacucucgcguggagugcauugggugguccagcaccucuugucaugauggaaaauccagaaugagcaucugcauuuccggcccuaauaacaaugcuucugccguugugugguauaaccggcgcccggucgcugaaaucaauacaugggccagaaacauucuccggacccaggagagcgaaugugugugccacaaugggguuugucccguggucuucaccgacggauccgcgacaggcccugccgauacgcgcaucuacuacuuuaaggaggggaagauccugaaaugggagagccuuaccggaacagcuaagcacauugaagagugcucuugcuauggcgaaagaaccggcaucacauguaccugccgggacaacuggcagggguccaaucgccccgugauucagaucgauccuguggccaugacgcauacaagccaauacauuuguucucccguccugaccgacaacccgagaccuaaugaucccaacaucggaaaaugcaaugacccuuaucccggcaacaauaacaacgggguuaagggauucagcuaccucgauggcgcuaauaccuggcuggggcggacaaucuccaccgccucuagaagcggauaugagaugcuuaaagugcccaacgcgcugacagacgaccgcuccaagccuauucagggccagacgaucgugcucaaugccgauuggagcggcuacucuggguccuuuauggacuauugggcugaaggagauuguuaccgggccugcuucuacgucgagcugauuagaggccgcccgaaggaggacaaagugugguggaccagcaacucuaucguuuccauguguagcuccacagaauuucuggagcaguggaauuggcccgauggggcuaagauugaauauuuccucuga

SEQ ID NO: 216403 - RNA, 1398 nt, Artificial Sequence; identical to SEQ ID NO: 215526
  derived and/or modified CDS sequence (opt5) from neuraminidase__InfluenzaA__AHF20570

SEQ ID NO: 216404 - RNA, 1413 nt, Artificial Sequence; identical to SEQ ID NO: 208704
  derived and/or modified CDS sequence (opt5) from neuraminidase__InfluenzaA__AHG96111

SEQ ID NO: 216405 - RNA, 1413 nt, Artificial Sequence; identical to SEQ ID NO: 208704
  derived and/or modified CDS sequence (opt5) from neuraminidase__InfluenzaA__AHG96123

SEQ ID NO: 216406 - RNA, 1413 nt, Artificial Sequence; identical to SEQ ID NO: 208704
  derived and/or modified CDS sequence (opt5) from neuraminidase__InfluenzaA__AHG96135

SEQ ID NO: 216407 - RNA, 1413 nt, Artificial Sequence; identical to SEQ ID NO: 208704
  derived and/or modified CDS sequence (opt5) from neuraminidase__InfluenzaA__AHG96147

SEQ ID NO: 216408 - RNA, 1413 nt, Artificial Sequence; identical to SEQ ID NO: 208704
  derived and/or modified CDS sequence (opt5) from neuraminidase__InfluenzaA__AHG96159

SEQ ID NO: 216409 - RNA, 1413 nt, Artificial Sequence; identical to SEQ ID NO: 208704
  derived and/or modified CDS sequence (opt5) from neuraminidase__InfluenzaA__AHG96171

SEQ ID NO: 216410 - RNA, 1413 nt, Artificial Sequence; identical to SEQ ID NO: 208704
  derived and/or modified CDS sequence (opt5) from neuraminidase__InfluenzaA__AHG96183

SEQ ID NO: 216411 - RNA, 1413 nt, Artificial Sequence; identical to SEQ ID NO: 208704
  derived and/or modified CDS sequence (opt5) from neuraminidase__InfluenzaA__AHG96195

SEQ ID NO: 216412 - RNA, 1413 nt, Artificial Sequence; identical to SEQ ID NO: 208704
  derived and/or modified CDS sequence (opt5) from neuraminidase__InfluenzaA__AHG96207

SEQ ID NO: 216413 - RNA, 1413 nt, Artificial Sequence; identical to SEQ ID NO: 208704
  derived and/or modified CDS sequence (opt5) from neuraminidase__InfluenzaA__AHG96219

SEQ ID NO: 216414 - RNA, 1413 nt, Artificial Sequence; identical to SEQ ID NO: 208704
  derived and/or modified CDS sequence (opt5) from neuraminidase__InfluenzaA__AHG96231

SEQ ID NO: 216415 - RNA, 1413 nt, Artificial Sequence; identical to SEQ ID NO: 208704
  derived and/or modified CDS sequence (opt5) from neuraminidase__InfluenzaA__AHG96243

SEQ ID NO: 216416 - RNA, 1413 nt, Artificial Sequence; identical to SEQ ID NO: 208704
  derived and/or modified CDS sequence (opt5) from neuraminidase__InfluenzaA__AHG96255

SEQ ID NO: 216417 - RNA, 1413 nt, Artificial Sequence; identical to SEQ ID NO: 208704
  derived and/or modified CDS sequence (opt5) from neuraminidase__InfluenzaA__AHG96267

SEQ ID NO: 216418 - RNA, 1413 nt, Artificial Sequence; identical to SEQ ID NO: 208704
  derived and/or modified CDS sequence (opt5) from neuraminidase__InfluenzaA__AHG96279

SEQ ID NO: 216419 - RNA, 1413 nt, Artificial Sequence; identical to SEQ ID NO: 208704
  derived and/or modified CDS sequence (opt5) from neuraminidase__InfluenzaA__AHG96291

SEQ ID NO: 216420 - RNA, 1413 nt, Artificial Sequence; identical to SEQ ID NO: 208704
  derived and/or modified CDS sequence (opt5) from neuraminidase__InfluenzaA__AHG96303

SEQ ID NO: 216421 - RNA, 1410 nt, Artificial Sequence; identical to SEQ ID NO: 208528
  derived and/or modified CDS sequence (opt5) from neuraminidase__InfluenzaA__AHG96362

SEQ ID NO: 216422 - RNA, 1410 nt, Artificial Sequence; identical to SEQ ID NO: 208528
  derived and/or modified CDS sequence (opt5) from neuraminidase__InfluenzaA__AHG96374

SEQ ID NO: 216423 - RNA, 1410 nt, Artificial Sequence; identical to SEQ ID NO: 208528
  derived and/or modified CDS sequence (opt5) from neuraminidase__InfluenzaA__AHG96386

SEQ ID NO: 216424 - RNA, 1413 nt, Artificial Sequence; identical to SEQ ID NO: 208704
  derived and/or modified CDS sequence (opt5) from neuraminidase__InfluenzaA__AHG96398

SEQ ID NO: 216425 - RNA, 1410 nt, Artificial Sequence; identical to SEQ ID NO: 208528
  derived and/or modified CDS sequence (opt5) from neuraminidase__InfluenzaA__AHG96410

SEQ ID NO: 216426 - RNA, 1410 nt, Artificial Sequence; identical to SEQ ID NO: 208528
  derived and/or modified CDS sequence (opt5) from neuraminidase__InfluenzaA__AHG96422

SEQ ID NO: 216427 - RNA, 1410 nt, Artificial Sequence; identical to SEQ ID NO: 208528
  derived and/or modified CDS sequence (opt5) from neuraminidase__InfluenzaA__AHG96434

SEQ ID NO: 216428 - RNA, 1410 nt, Artificial Sequence; identical to SEQ ID NO: 208528
  derived and/or modified CDS sequence (opt5) from neuraminidase__InfluenzaA__AHG96446

SEQ ID NO: 216429 - RNA, 1410 nt, Artificial Sequence; identical to SEQ ID NO: 208528
  derived and/or modified CDS sequence (opt5) from neuraminidase__InfluenzaA__AHG96458

SEQ ID NO: 216430 - RNA, 1410 nt, Artificial Sequence; identical to SEQ ID NO: 208528
  derived and/or modified CDS sequence (opt5) from neuraminidase__InfluenzaA__AHG96470

SEQ ID NO: 216431 - RNA, 1410 nt, Artificial Sequence; identical to SEQ ID NO: 208528
  derived and/or modified CDS sequence (opt5) from neuraminidase__InfluenzaA__AHG96482

SEQ ID NO: 216432 - RNA, 1410 nt, Artificial Sequence; identical to SEQ ID NO: 208528
  derived and/or modified CDS sequence (opt5) from neuraminidase__InfluenzaA__AHG96494

SEQ ID NO: 216433 - RNA, 1410 nt, Artificial Sequence; identical to SEQ ID NO: 208528
  derived and/or modified CDS sequence (opt5) from neuraminidase__InfluenzaA__AHG96506

SEQ ID NO: 216434 - RNA, 1413 nt, Artificial Sequence; identical to SEQ ID NO: 208704
  derived and/or modified CDS sequence (opt5) from neuraminidase__InfluenzaA__AHG96518

SEQ ID NO: 216435 - RNA, 1413 nt, Artificial Sequence; identical to SEQ ID NO: 208704
  derived and/or modified CDS sequence (opt5) from neuraminidase__InfluenzaA__AHG96530

SEQ ID NO: 216436 - RNA, 1413 nt, Artificial Sequence; identical to SEQ ID NO: 208704
  derived and/or modified CDS sequence (opt5) from neuraminidase__InfluenzaA__AHG96542

SEQ ID NO: 216437 - RNA, 1413 nt, Artificial Sequence; identical to SEQ ID NO: 208704
  derived and/or modified CDS sequence (opt5) from neuraminidase__InfluenzaA__AHG96554

SEQ ID NO: 216438 - RNA, 1413 nt, Artificial Sequence; identical to SEQ ID NO: 208704
  derived and/or modified CDS sequence (opt5) from neuraminidase__InfluenzaA__AHG96566

SEQ ID NO: 216439 - RNA, 1413 nt, Artificial Sequence; identical to SEQ ID NO: 208704
  derived and/or modified CDS sequence (opt5) from neuraminidase__InfluenzaA__AHG96578

SEQ ID NO: 216440 - RNA, 1413 nt, Artificial Sequence; identical to SEQ ID NO: 208704
  derived and/or modified CDS sequence (opt5) from neuraminidase__InfluenzaA__AHG96590

SEQ ID NO: 216441 - RNA, 1413 nt, Artificial Sequence; identical to SEQ ID NO: 208704
  derived and/or modified CDS sequence (opt5) from neuraminidase__InfluenzaA__AHG96602

SEQ ID NO: 216442 - RNA, 1413 nt, Artificial Sequence; identical to SEQ ID NO: 208704
  derived and/or modified CDS sequence (opt5) from neuraminidase__InfluenzaA__AHG96614

SEQ ID NO: 216443 - RNA, 1413 nt, Artificial Sequence; identical to SEQ ID NO: 208704
  derived and/or modified CDS sequence (opt5) from neuraminidase__InfluenzaA__AHG96626

SEQ ID NO: 216444 - RNA, 1413 nt, Artificial Sequence; identical to SEQ ID NO: 208704
  derived and/or modified CDS sequence (opt5) from neuraminidase__InfluenzaA__AHG96638

SEQ ID NO: 216445 - RNA, 1413 nt, Artificial Sequence; identical to SEQ ID NO: 208704
  derived and/or modified CDS sequence (opt5) from neuraminidase__InfluenzaA__AHG96650

SEQ ID NO: 216446 - RNA, 1413 nt, Artificial Sequence; identical to SEQ ID NO: 208704
  derived and/or modified CDS sequence (opt5) from neuraminidase__InfluenzaA__AHG96662

SEQ ID NO: 216447 - RNA, 1413 nt, Artificial Sequence; identical to SEQ ID NO: 208704
  derived and/or modified CDS sequence (opt5) from neuraminidase__InfluenzaA__AHG96674

SEQ ID NO: 216448 - RNA, 1413 nt, Artificial Sequence; identical to SEQ ID NO: 208704
  derived and/or modified CDS sequence (opt5) from neuraminidase__InfluenzaA__AHG96686

SEQ ID NO: 216449 - RNA, 1410 nt, Artificial Sequence; identical to SEQ ID NO: 208528
  derived and/or modified CDS sequence (opt5) from neuraminidase__InfluenzaA__AHG96698

SEQ ID NO: 216450 - RNA, 1410 nt, Artificial Sequence; identical to SEQ ID NO: 208528
  derived and/or modified CDS sequence (opt5) from neuraminidase__InfluenzaA__AHG96710

SEQ ID NO: 216451 - RNA, 1410 nt, Artificial Sequence; identical to SEQ ID NO: 208528
  derived and/or modified CDS sequence (opt5) from neuraminidase__InfluenzaA__AHG96722

SEQ ID NO: 216452 - RNA, 1410 nt, Artificial Sequence; identical to SEQ ID NO: 208528
  derived and/or modified CDS sequence (opt5) from neuraminidase__InfluenzaA__AHG96734

SEQ ID NO: 216453 - RNA, 1410 nt, Artificial Sequence; identical to SEQ ID NO: 208528
  derived and/or modified CDS sequence (opt5) from neuraminidase__InfluenzaA__AHG96746

SEQ ID NO: 216454 - RNA, 1410 nt, Artificial Sequence; identical to SEQ ID NO: 208528
  derived and/or modified CDS sequence (opt5) from neuraminidase__InfluenzaA__AHG96758

SEQ ID NO: 216455 - RNA, 1410 nt, Artificial Sequence; identical to SEQ ID NO: 208528
  derived and/or modified CDS sequence (opt5) from neuraminidase__InfluenzaA__AHG96770

SEQ ID NO: 216456 - RNA, 1410 nt, Artificial Sequence; identical to SEQ ID NO: 208528
  derived and/or modified CDS sequence (opt5) from neuraminidase__InfluenzaA__AHG96782

SEQ ID NO: 216457 - RNA, 1410 nt, Artificial Sequence; identical to SEQ ID NO: 208528
  derived and/or modified CDS sequence (opt5) from neuraminidase__InfluenzaA__AHG96794

SEQ ID NO: 216458 - RNA, 1410 nt, Artificial Sequence; identical to SEQ ID NO: 208528
  derived and/or modified CDS sequence (opt5) from neuraminidase__InfluenzaA__AHG96806

SEQ ID NO: 216459 - RNA, 1410 nt, Artificial Sequence; identical to SEQ ID NO: 208528
  derived and/or modified CDS sequence (opt5) from neuraminidase__InfluenzaA__AHG96818

SEQ ID NO: 216460 - RNA, 1410 nt, Artificial Sequence; identical to SEQ ID NO: 208528
  derived and/or modified CDS sequence (opt5) from neuraminidase__InfluenzaA__AHG96830

SEQ ID NO: 216461 - RNA, 1410 nt, Artificial Sequence; identical to SEQ ID NO: 208528
  derived and/or modified CDS sequence (opt5) from neuraminidase__InfluenzaA__AHG96842

SEQ ID NO: 216462 - RNA, 1410 nt, Artificial Sequence; identical to SEQ ID NO: 208528
  derived and/or modified CDS sequence (opt5) from neuraminidase__InfluenzaA__AHG96854

SEQ ID NO: 216463 - RNA, 1410 nt, Artificial Sequence; identical to SEQ ID NO: 208528
  derived and/or modified CDS sequence (opt5) from neuraminidase__InfluenzaA__AHG96866

SEQ ID NO: 216464 - RNA, 1410 nt, Artificial Sequence; identical to SEQ ID NO: 208528
  derived and/or modified CDS sequence (opt5) from neuraminidase__InfluenzaA__AHG96878

SEQ ID NO: 216465 - RNA, 1410 nt, Artificial Sequence; identical to SEQ ID NO: 208528
  derived and/or modified CDS sequence (opt5) from neuraminidase__InfluenzaA__AHG96890

SEQ ID NO: 216466 - RNA, 1410 nt, Artificial Sequence; identical to SEQ ID NO: 208528
  derived and/or modified CDS sequence (opt5) from neuraminidase__InfluenzaA__AHG96902

SEQ ID NO: 216467 - RNA, 1410 nt, Artificial Sequence; identical to SEQ ID NO: 208528
  derived and/or modified CDS sequence (opt5) from neuraminidase__InfluenzaA__AHG96914

SEQ ID NO: 216468 - RNA, 1410 nt, Artificial Sequence; identical to SEQ ID NO: 208528
  derived and/or modified CDS sequence (opt5) from neuraminidase__InfluenzaA__AHG96926

SEQ ID NO: 216469 - RNA, 1410 nt, Artificial Sequence; identical to SEQ ID NO: 208528
  derived and/or modified CDS sequence (opt5) from neuraminidase__InfluenzaA__AHG96938

SEQ ID NO: 216470 - RNA, 1410 nt, Artificial Sequence; identical to SEQ ID NO: 208528
  derived and/or modified CDS sequence (opt5) from neuraminidase__InfluenzaA__AHG96950

SEQ ID NO: 216471 - RNA, 1410 nt, Artificial Sequence; identical to SEQ ID NO: 208528
  derived and/or modified CDS sequence (opt5) from neuraminidase__InfluenzaA__AHG96962

SEQ ID NO: 216472 - RNA, 1410 nt, Artificial Sequence; identical to SEQ ID NO: 208528
  derived and/or modified CDS sequence (opt5) from neuraminidase__InfluenzaA__AHG96974

SEQ ID NO: 216473 - RNA, 1410 nt, Artificial Sequence; identical to SEQ ID NO: 208528
  derived and/or modified CDS sequence (opt5) from neuraminidase__InfluenzaA__AHG96986

SEQ ID NO: 216474 - RNA, 1410 nt, Artificial Sequence; identical to SEQ ID NO: 208528
  derived and/or modified CDS sequence (opt5) from neuraminidase__InfluenzaA__AHG96998

SEQ ID NO: 216475 - RNA, 1410 nt, Artificial Sequence; identical to SEQ ID NO: 208528
  derived and/or modified CDS sequence (opt5) from neuraminidase__InfluenzaA__AHG97010

SEQ ID NO: 216476 - RNA, 1410 nt, Artificial Sequence; identical to SEQ ID NO: 208528
  derived and/or modified CDS sequence (opt5) from neuraminidase__InfluenzaA__AHG97022

SEQ ID NO: 216477 - RNA, 1410 nt, Artificial Sequence; identical to SEQ ID NO: 208528
  derived and/or modified CDS sequence (opt5) from neuraminidase__InfluenzaA__AHG97034

SEQ ID NO: 216478 - RNA, 1410 nt, Artificial Sequence; identical to SEQ ID NO: 208528
  derived and/or modified CDS sequence (opt5) from neuraminidase__InfluenzaA__AHG97046

SEQ ID NO: 216479 - RNA, 1410 nt, Artificial Sequence
  derived and/or modified CDS sequence (opt5) from neuraminidase__InfluenzaA__AHH00872
augaaccccaaucagaagaucauuaccaucggcagcgugucccugacaauugccacgaucugcuuccucaugcaaauugcuauccuggucaccacaguuacccuucacuuuaaacaguacgaguguaacccuccgcccaauaaccaggugaugcugugcgaaccuacaaucauugagagaaauaucaccgaaauuguguaucucacaaacaccacgaucgagaaggaaauuugucccaaacuggccgaguaccggaauuggucuaagccucagugcaacaucaccggguucgcgcccuuuagcaaagacaauuccauucgccuuucugcuggaggcgauaucugggucacaagagagccuuaugugagcugugacccggauaagugcuaccaauucgcccuggggcagggaaccacacucaacaauggccauuccaacgacaccguucacgaucggacgcccuaucgcacacugcugaugaaugaacucggggugccuuuucaucugggaaccaagcaggucuguaucgccuggucuagcuccagcugccacgacggcaaagccuggcuucauguguguguuacaggcgaugacgagaacgcuaccgcuucuuucauuuacaaugggagacugguggauuccaucggaagcuggucuaagaaaauucuccggacccaggaauccgagugcgucuguaucaacggcacaugcacggugauuaugaccgacgggagcgccucuggaaaggcggauacaaaaauccuguuuaucgaggaaggcaagauugugcacaccagcccccuuuccggguccgcccaacacgucgaggaaugcucuuguuauccucgcuaccccggaguuagaugcgugugucgggacaacuggaagggcagcaaucgcccgaucguggauauuaacgucaaagacuacuccaucgugagcucuuauguuugcuccggccuggugggggacacaccuagaaagaaugauagcucuagcuccucucauugucucgaccccaacaaugaggaaggaggccacggggucaaaggaugggcuuucgaugacggcaacgauguguggauggggcggaccauuagcgagaagucccgcagcggauacgagacguuuaaaguuaucgaaggcuggucuaagccuaauuccaaacugcagaucaacagacaggugauuaucgaccggggcaaucgcagcggguauucuggaauuuucuccgucgagggcaagagcugcaucaacagauguuuuuacguggaacugauucgggggagaaagcaggagacagaaguccucuggaccuccaauucuaucgugguuuucugcggaaccagcggcacauaugggaccggcuccuggcccgauggagccgaccugaaccuuaugcccauuuga

SEQ ID NO: 216480 - RNA, 1416 nt, Artificial Sequence
  derived and/or modified CDS sequence (opt5) from neuraminidase__InfluenzaA__AHI43497
augaaccccaaucagaagcuguucgcccucagcggcguggcuaucgcccuguccauucuuaaccugcucaucgggauuucuaaugucggacugaacaucagccuucaccugaaaggcaaggggccuaaacaagaggaaaaucugaccugcacaacgauuaaccagaauaacaccacaguuguggagaauaccuacgugaacaauacaaccaucaucacaaaggaaaccgacuggaacacgccguccuaucuccugcucaauaaaucucuguguaacgucgagggaugggugguuauugcgaaggauaaugcuaucagauuuggcgaaagcgagcagauuaucgugacccgggagcccuacgucuccugcgacccuacaggguguaagauguaugcccuucaucagggaaccacaauucgcaacaaacacucuaacggcaccauccaugauagaacggccuuccggggccugauuagcacaccccucgggaccccucccacaguguccaauagcggauuuaugugcguuggcuggucuuccaccaccugucacgacgggaucggacgcaugacaaucugcauucaaggcaacaaugauaacgcuacggccaccguguacuauaaugggagacugacaaccacaaucaagaccugggcucggaacauucuucgcacgcaggaaagcgagugugucugccauaauggaacaugugccguggugaugaccgacggcucugcguccagccaggccuacaccaaagucauguauuuccacaagggccugguuaucaaagaagaggcucucagagggucugcccggcacauugaggaaugcuccuguuacggacauagccagcgcgugacaugcgugugcagagauaacuggcaaggcgcuaaucggccuaucaucgagauugacaugaacacccuggaacacacaucccgcuacgucuguacggggauccugaccgauacaucuagaccgggagacaagagcuccggcgauugcagcaaucccauuaccgggucuccuggagcccagggcgugaagggcuuuggguuccucaacggagacaauacauggcugggccggaccaucagcccccgcuccagaucuggguuugagaugcuuaaaauuccuaacgcgggaacggaucccaauagccggaucgccgaaagacaggagaucguugacaacaacaauugguccggcuauucugggagcuucauugacuacuggaacaauaacuccgaguguuauaauccgugcuuuuacguggaacugauccgcggccggccugaggaagcuaaguaugucugguggaccagcaacucucucauugcccuguguggaucccccuucccugugggcagcgggucuuuucccgauggagcucagauccaauacuucuccuga

SEQ ID NO: 216481 - RNA, 1410 nt, Artificial Sequence
  derived and/or modified CDS sequence (opt5) from neuraminidase__InfluenzaA__AHJ57439
augaaccccaaucagaagaucauuaccaucggcagcgugucccugauuaucucuacaauuugcuucuuuaugcaagucgccauccuccugacgaccguuacacuucacuucaaacaguacgaguuuaacagcccuccgaauaaccaggugaugcugugugaacccaccaucauugagagaaauaucacagaaauuguguaucucaccaacacaaccaucgagaaggaaauuugcccuaaacccgcugaguaccggaauugguccaagccucagugugacaucacgggguucgcccccuuuucuaaagauaacagcauucgccuguccgcgggaggcgacaucugggucaccagagagccuuaugugucuugcgauccggacaaguguuaccaauucgcucuugggcagggaacaacccugaauaacguucauagcaauaacacagugcgggaucgcacccccuauagaacgcuccugaugaaugaacugggcgucccuuuucaccucgggacaaaacaggugugcaucgccugguccucuagcuccugucaugacggaaaggccuggcugcacguuugcauuaccggcgaugacaagaacgcuacagccagcuucaucuacaauggccggcuuguggauucugucguguccuggagcaaagacauucugcgcacccaggagucugaaugugugugcaucaacgggaccuguacagucguuaugacggauggauccgcuagcggcaaggccgacaccaaaauucucuuuaucgaggaggggaagaucgugcauacauccacccugucuggaagcgcgcaacacguggaagagugcuccugcuaucccagauacccuggcguccggugugugugccgcgauaacuggaaggggagcaauagacccauuguugacaucaacauuaaagaccacucuaucguguccagcuacgucuguucuggacuugugggcgauacaccgcggaagaaugacagcuccucuagcucccauugccuggauccuaacaaugaagagggcgggcacggaguuaaaggcugggccuucgacgaugggaacgacguguggaugggacgcaccauuaaugaaacgagcagacucggcuaugagacauuuaaggucaucgagggguggucuaaccccaaauccaagcugcagaucaaucgccaggugauugucgaucggggaaacagaagcggcuacucuggcaucuucuccguggaagggaaaagcuguauuaaucggugcuuuuauguugagcugaucagaggacgcaaggaagagaccgaagugcucuggaccuccaacucuauugucguguucuguggcacaagcgggaccuacggaacaggcuccuggccugacggggcugauaucaaucugaugcccauuuga

SEQ ID NO: 216482 - RNA, 1410 nt, Artificial Sequence
  derived and/or modified CDS sequence (opt5) from neuraminidase__InfluenzaA__AHJ57440
augaaccccaaucagaagaucauuaccaucggcagcgugucccugauuaucucuacaauuugcuucuuuaugcaaaucgccauccucauuacgaccgucacacugcacuucaaacaguacgaguuuaacagcccuccgaauaaccagaugaugcuuugugaacccaccaucauugagagaaauaucacagaaauuguuuaucugaccaacacaaccaucgagaaggaaauuugcccuaaacccgcugaguaccggaauugguccaagccucagugugacaucacgggguucgcccccuuuucuaaagauaacagcauccgccucuccgcgggaggcgacauuugggugaccagagagccuuaugugucuugcgauccggacaaguguuaccaauucgcucuggggcagggaacaacccuuaauaacggccauagcaauaacacaguccgggaucgcacccccuauagaacgcugcucaugaaugaacugggggugccuuuucaccugggaacaaagcagguuugcaucgccugguccucuagcuccugucaugacggcaaagccuggcuccacgugugcauuaccggcgaugacaagaacgcuacagccagcuucaucuacaaugggcggcuggucgauucugugguuuccuggagcaaagagauucuucgcacccaggaaucugagugugugugcaucaacggaaccuguacagucgugaugacggacggcuccgcuagcgggaaggccgauaccaaaauccuguuuauugaggaaggaaagaucgugcauacauccacccucucuggcagcgcgcaacacgucgaggaaugcuccugcuaucccagauacccugggguucggugugugugccgcgacaacuggaagggaagcaauagacccauuguggauaucaacauuaaagaccacucuaucgucuccagcuacguguguucuggccugguuggcgacacaccgcggaagaaugauagcuccucuagcucccauugccuugacccuaacaaugaggaagggggacacggcgugaaagggugggccuucgaugacggaaacgaugucuggaugggccgcaccaucaaugagacgagcagacugggguaugagacauuuaaggugauugaaggauggucuaaccccaaauccaagcuccagaucaaucggcagguuauuguggaccgcggcgauagaagcggcuacucugggaucuucuccgucgagggaaaaagcuguauuaaccggugcuuuuauguggaacugaucagaggccgcaaggaggaaaccgagguccuguggaccuccaauucuauugugguuuucugugggacaagcggaaccuacggcacaggguccuggccugacggcgcugauaucaaccucaugcccaucuga

SEQ ID NO: 216483 - RNA, 1410 nt, Artificial Sequence
  derived and/or modified CDS sequence (opt5) from neuraminidase__InfluenzaA__AHJ57441
augaaccccaaucagaagaucauuaccaucggcagcgugucccugauuaucucuacaauuugcuucuuuaugcaaaucgccauccucauuacgaccgucacacugcacuucaaacaguacgaguuuaacagcccuccgaauaaccagguuaugcuuugugaacccaccaucauugagagaaauaagacagaaaucguguaucugaccaacacaaccauugagaaagaaaucugcccuaagcccgcugaguaccggaauugguccaaaccucagugugacauuacgggguucgcccccuuuucuaaggauaacagcauccgccucuccgcgggaggcgacaucugggugaccagagagccuuaugucucuugcgauccggacaaguguuaccaauucgcucuggggcagggaacaacccuuaauaacgugcauagcaauaacacaguucacgaucggacccccuaucgcacgcugcucaugaaugaacugggcgugccuuuucaucuggggacaaaacaggucugcauugccugguccucuagcuccugucacgacggaaaggccuggcuccaugugugcaucaccggcgaugacaaaaacgcuacagccagcuucauuuacaauggcagacugguugauucuguggucuccuggagcaaggagauccuucggacccaggaaucugagugugugugcauuaacgggaccuguacaguggucaugacggacggauccgcuagcggcaaagccgauaccaagauccuguuuaucgaggaagggaagauuguucacacauccacccucucuggaagcgcgcaacacguggaggaaugcuccugcuauccccgcuacccuggcgugagaugugucugccgggacaacuggaaagggagcaaucgccccaucguggauauuaacaucaaggaccauucuauuguuuccagcuacguguguucuggacuggucggcgacacaccgagaaagaaugauagcuccucuagcucccacugccuugacccuaacaaugaggaaggcgggcauggagugaagggcugggccuucgaugacgggaacgauguuuggaugggacggaccaucaaugagacgagccgccugggcuaugagacauuuaaagugaucgaaggguggucuaaccccaaguccaaacuccagauuaauagacaggucaucguggaccggggaaaccgcagcggcuacucuggcauuuucuccgucgaggggaaaagcuguaucaauagaugcuuuuauguggaacugauucggggaagaaaggaggaaaccgagguucuguggaccuccaacucuaucguggucuucuguggcacaagcgggaccuacggaacaggcuccuggccugauggggcugacauuaaucucaugcccaucuga

SEQ ID NO: 216484 - RNA, 1413 nt, Artificial Sequence
  derived and/or modified CDS sequence (opt5) from neuraminidase__InfluenzaA__AHJ57654
augaaccccaaucagaagauuaccugcaucagcgccacaggcaugacgcuguccguggucucucuccugaucgggauugcuaaccuuggacugaauaucggccuccacuacaaaguuagcgacuccaccaacauuaauaucccuaacaugaaugagacaucuccgaccacaaccaucauuaacaaucauccccaaaacaauuucacaaacaucaccaauauuaucaugaacaagaaugaagaggggaacuuucugaaccuuacgaaaccucugugugaagugaauagcuggcacauucucuccaaggauaacgccaucagaauuggagagaaugcgcauauccuggugacccgggaacccuaucugucuugcgacccucagggcugucgcauguucgcucucagccaggggacaacccugagaggacggcacgccaacggcacaauccaugaucgcucccccuuuagagcccuuauuagcugggagaugggccaggcuccuucuccguacaaugcccgggucgagugcaucgggugguccagcaccucuugucacgacggaauuucccgcaugagcaucugcauuucuggccccaacaauaacgcuuccgccgugguuugguaugggggaagaccugugacggaaauccccagcugggcgggcaauauccugcggacacaagaguccgaaugugucugccacgggggaauuuguccugugguuaugaccgauggccccgccaacaaucgcgcugagacaaaaaucauuuacuucaaggagggcaaggugcagaaaaucgaggaacucaaggggaacgcccagcauauugaagagugcucuuguuauggagcuagcggcaugaucaaaugcaucugcagagacaauuggaagggggccaaccggccggucauuaccaucgauccugaaaugaugacccacacauccaaauaccuguguagcaagauucuuacggacaccucucgccccaaugauccuacaaacggaaacugcgacgcgcccaucaccggcgggucccccgauccuggagugaagggcuuugccuuccuggacggcgagaauagcuggcucgggagaacaauuucuaaagauagccgguccggauaugagaugcugaagaucccgaacgcugaaaccgacacgcagucuggcgccauuagccaucaaaucaucgugaauaaccagaauugguccggguacagcggagcuuuuauugacuacugggccaacaaagaguguuucaaucccugcuuuuaugucgaacugauccgcggcagaccuaaggagucuuccguucucuggacaagcaacucuauuguggcccugugugggucccgggaaagacuuggcagcugguccuggcacgauggagcugagaucauuuacuucaaauga

SEQ ID NO: 216485 - RNA, 1410 nt, Artificial Sequence
  derived and/or modified CDS sequence (opt5) from neuraminidase__InfluenzaA__AHJ57666
augaaccccaaucagaagaucauuaccaucggcagcgugucccugacaauugccacggucucuuuccucaugcaaaucgcuauucugaccacaaccguuacacuucacuuuaaacauaacgagugcaauaugccuccgaagaaccaggugaugagcugugaacccaucaucauugagagaaauaucaccgaaauuguguaccugaacaauacaaccgucgagaaagaaaucugcccuaaggugguugaguaucggaacugguccaaaccccaguguaagauuacgggguucgccccuuuuucuaaggacaauagcauccgccucuccgcgggaggcgauauuugggugaccagagagcccuacgucucuugcgggcugggaaaauguuaucaguucgcucuuggccaagggacaacccuggacaacagccacuccaauggaacaauccaugaucggaucccucaccgcacccuccugaugaacgaacugggcgugccguuucaucucggcacgaagcagguuugcauugccuggucuagcuccagcugucacgacgggagagccuggcugcacaucugcauuacaggagaugaccggaaugcuaccgccucuuucaucuacgauggcaugcuuguggacuccauugggagcuggucuaaaaacauccugcgcacacaggaguccgaaugugucugcaucaauggaaccugugcuguggugaugaccgauggcagcgccuccggggucgcggacacacggauucucuuuaucagagagggaaagauuguucauaucucuccccugagcggcuccgcccagcacauugaggaaugcagcugcuauccucgcuaccccgaugugagaugugugugccgggacaacuggaaaggcucuaaccgcccugucaucgauaucaauauggcugacuauuccauugacagcaacuacguguguucugggcuuguuggagauacgcccagaaaugacgauaacagcuccucuagcaauugccgggacccgaacaaugagcgcggcaacccuggggugaagggaugggccuucgaugacggcaaugaugucuggauggggagaaccaucaaccgggacuccagaagcggauacgaaacauuucgcgugauuggcggcuggaccacagcuaauucuaagucccaaaucaaccggcagguuauuguggauaauaacaauuggagcggguauucuggagucuucuccguggagggcaaaagcuguaucaacagaugcuuuuacgucgaacugauuaaggggcgcccccaggagccucgggugugguggaccuccaacucuaucguuguguucuguggaacgagcggcacauaugggaccggcuccuggcccgacggagccaauaucaacuuuaugcccauuuga

SEQ ID NO: 216486 - RNA, 1413 nt, Artificial Sequence
  derived and/or modified CDS sequence (opt5) from neuraminidase__InfluenzaA__AHJ57677
augaaccccaaucagaagauuaccugcaucagcgccacaggcaugacgcuguccguggucucuaugcucaucgggauugcuaaccugggacuuaauaucggccugcacuacaaaguuagcgacuccaccaacauuaauaucccuaacaugaaugagacaucuccgaccacaaccgugaucaacaaucauccccaaaacaauuucacaaacauuaccaauaucauugugaacaagaaugaagaggaaaacuuucucaaccugacgaaaccucuuugugaggucaauagcuggcacauccuguccaaggauaacgccauuagaaucggggaaaaugcgcauauucucgugacccgggagcccuaucugucuugcgacccucagggaugucgcauguucgcucugagccagggcacaacccucagagggcagcacgccaacggaacaauccaugaucggucccccuuucgcgcccugaucagcugggagaugggccaagcuccuucuccguacaaugccagaguugaaugcauuggcugguccagcaccucuugucacgacgggaucucccggaugagcauuugcaucucuggacccaacaauaacgcuuccgccguggucugguauggcgggcgcccugugacggagauucccagcugggcgggaaauauccuuagaacacaggaauccgaguguguuugccacggcgggaucuguccuguggucaugaccgauggacccgccaacaaucgggcugagacaaaaauuaucuacuucaaggaaggcaagauucagaaaguggaggaacugaagggcaacgcccagcauaucgaggaaugcucuuguuauggggcuagcggaaugauuaaaugcaucugccgcgacaauuggaagggcgccaacagaccggugaucaccauugauccugagaugaugacccacacauccaaauaccucuguagcaagauccugacggacaccucucggcccaaugauccuacaaacgggaacugcgacgcgcccauuaccggaggcucccccgauccuggggucaagggauuugccuuccuugacggcgagaauagcuggcugggccgcacaaucucuaaagauagcagauccggguaugaaaugcucaagguuccgaacgcugagaccgacacgcaaucuggagccauuagccaucagaugaucgugaauaaccagaauugguccggcuacagcggggcuuuuauugacuacugggccaaaaaggaauguuucaaccccugcuuuuauguggagcugauccggggacgcccuaaagaaucuuccguccuguggacaagcaauucuaucguggcccucuguggcuccagagagcggcuggggagcugguccuggcacgauggcgcugagauuaucuacuucaaguga

SEQ ID NO: 216487 - RNA, 1413 nt, Artificial Sequence
  derived and/or modified CDS sequence (opt5) from neuraminidase__InfluenzaA__AHJ57689
augaaccccaaucagaagauuaccugcaucagcgccacaggcaugacgcuguccguggucucuaugcucaucgggauugcuaaccugggacuuaauaucggccugcacuacaaaguuagcgacuccaccaacauuaauaucccuaagaugaacgagacaucuccgaccacaaccaucauuaauaaccauccccaaaauaacuucacaaauaucaccaacauuaucgugaauaaaaacgaagaggaaaauuuucucaaccugacgaagccucuuugugaggugaacagcuggcacauucuguccaaagauaaugccaucagaauuggggaaaacgcgcauauccucgucacccgggagcccuaucugucuugcgacccucagggaugucgcauguucgcucugagccagggcacaacccucagagggcagcacgccaauggaacaauccaugaucggucccccuuucgcgcccugauuagcugggagaugggccaagcuccuucuccguacaacgccagaguggaaugcaucggcugguccagcaccucuugucacgacgggauuucccggaugagcaucugcauuucuggacccaauaacaaugcuuccgccguugugugguauggcgggcgcccugucacggagauccccagcugggcgggaaacauccuuagaacacaggaauccgagugugugugccacggcgggauuuguccuguugugaugaccgauggacccgccaauaaccgggcugagacaaagaucauuuacuucaaggaaggcaaaauccagaagauugaggaacugaaaggcaaugcccagcauaucgaggaaugcucuuguuauggggcuagcggaaugaucaagugcauuugccgcgacaacuggaaaggcgccaauagaccggucaucaccauugauccugagaugaugacccacacauccaaguaccucuguagcaagauccugacggacaccucucggcccaacgauccuacaaaugggaacugcgacgcgcccauuaccggaggcucccccgauccuggggugaaaggauuugccuuccuugacggcgagaacagcuggcugggccgcacaaucucuaaggauagcagauccggguaugaaaugcucaaagugccgaaugcugagaccgacacgcaaucuggagccauuagccaucagaucaucgucaacaaucagaacugguccggcuacagcggggcuuuuauugacuacugggccaauaaggaauguuucaaccccugcuuuuauguugagcugauccggggacgcccuaaagaaucuuccgugcuguggacaagcaauucuauuguggcccucuguggcuccagagagcggcuggggagcugguccuggcacgauggcgcugagaucauuuacuucaaguga

SEQ ID NO: 216488 - RNA, 1413 nt, Artificial Sequence
  derived and/or modified CDS sequence (opt5) from neuraminidase__InfluenzaA__AHJ57700
augaaccccaaucagaagauuaccugcaucagcgccacaggcaugacgcuguccguggucucucuccugaucgggauugcuaaccuuggacugaauaucggccuccacuacaaaguuagcgacuccaccaacauuaauaucccuaacaugaaugagacaucuccgaccacaaccaucauuaacaaucauccccaaaacaauuucacaaacaucaccaauauuaucaugaacaagaaugaagaggggaacuuucugaaccuuacgaaaccucugugugaagugaauagcuggcacauucucuccaaggauaacgccaucagaauuggagagaaugcgcauauccuggugacccgggaacccuaucugucuugcgacccucagggcugucgcauguucgcucucagccaggggacaacccugagaggacggcacgccaacggcacaauccaugaucgcucccccuuuagagcccuuauuagcugggagaugggccaggcuccuucuccguacaaugcccgggucgagugcaucgggugguccagcaccucuugucacgacggaauuucccgcaugagcaucugcauuucuggccccaacaauaacgcuuccgccgugguuugguaugggggaagaccugugacggaaauccccagcugggcgggcaauauccugcggacacaagaguccgaaugugucugccacgggggaauuuguccugugguuaugaccgauggccccgccaacaaucgcgcugagacaaaaaucauuuacuucaaggagggcaaggugcagaaaaucgaggaacucaaggggaacgcccagcauauugaagagugcucuuguuauggagcuagcggcaugaucaaaugcaucugcagagacaauuggaagggggccaaccggccggucauuaccaucgauccugaaaugaugacccacacauccaaauaccuguguagcaagauucuuacggacaccucucgccccaaugauccuacaaacggaaacugcgacgcgcccaucaccggcgggucccccgauccuggagugaagggcuuugccuuccuggacggcgagaauagcuggcucgggagaacaauuucuaaagauagccgguccggauaugagaugcugaaggugccgaacgcugaaaccgacacgcagucuggcgccaucagccaucaaauuaucgucaauaaccagaauugguccggguacagcggagcuuuuaucgacuacugggccaacaaagaguguuucaaucccugcuuuuauguugaacugauucgcggcagaccuaaggagucuuccgugcucuggacaagcaacucuaucguggcccugugugggucccgggaaagacuuggcagcugguccuggcacgauggagcugagauuaucuacuucaaauga

SEQ ID NO: 216489 - RNA, 1410 nt, Artificial Sequence
  derived and/or modified CDS sequence (opt5) from neuraminidase__InfluenzaA__AHJ57710
augaaccccaaucagaagaucauuaccaucggcagcgugucccugacaauugccacggucucuuuccucaugcaaaucgcuauucugaccacaaccguuacacuucacuuuaaacauaacgagugcaauaugccuccgaagaaccaggugaugagcugugaacccaucaucauugagagaaauaucaccgaaauuguguaccugaacaauacaaccgucgagaaagaaaucugcccuaaggugguugaguaucggaacugguccaaaccccaguguaagauuacgggguucgccccuuuuucuaaggacaauagcauccgccucuccgcgggaggcgauauuugggugaccagagagcccuacgucucuugcgggcugggaaaauguuaucaguucgcucuuggccaagggacaacccuggacaacagccacuccaauggaacaauccaugaucggaucccucaccgcacccuccugaugaacgaacugggcgugccguuucaucucggcacgaagcagguuugcauugccuggucuagcuccagcugucacgacgggagagccuggcugcacaucugcauuacaggagaugaccggaaugcuaccgccucuuucaucuacgauggcaugcuuguggacuccauuagcucuugguccaaaaacauccugcgcacacaggagagcgaaugugucugcaucaaugggaccugugcuguggugaugaccgauggauccgccucuggcgucgcggacacacggauucucuuuaucagagaggggaagauuguucauaucagcccccuguccggaagcgcccagcacauugaggaaugcucuugcuauccucgcuaccccgaugugagaugugugugccgggacaacuggaaaggcuccaaccgcccugucaucaauaucaacauggcugauuauagcauugacucuaauuacguguguagcggccuuguuggggacacgcccagaaacgaugacaauuccucuagcuccaacugccgggauccgaauaacgagcgcggaaauccuggcgugaaggggugggccuucgacgauggaaacgacgucuggaugggcagaaccaucaaucgggauagcagaucuggguacgaaacauuucgcgugauuggaggcuggaccacagcuaacuccaagagccaaaucaaucggcagguuauuguggacaacaauaacuggucuggcuauuccggggucuucagcguggagggaaaauccuguaucaacagaugcuuuuacgucgaacugauucgcggccggccccaggagccuagagugugguggaccucuaauagcaucguuguguucugugggacguccggaacauauggcaccgggucuuggcccgauggcgccaacaucaauuuuaugcccauuuga

SEQ ID NO: 216490 - RNA, 1410 nt, Artificial Sequence
  derived and/or modified CDS sequence (opt5) from neuraminidase__InfluenzaA__AHJ57734
augaaccccaaucagaagaucauuaccaucggcagcgugucccugacaauugccacggucucuuuccucaugcaaaucgcuauucugaccacaaccguuacacuucacuuuaaacauaacgagugcaauaugccuccgaagaaccaggugaugagcugugaacccaucaucauugagagaaauaucaccgaaauuguguaccugaacaauacaaccgucgagaaagaaaucugcccuaagguggccgaguaucggaacugguccaaaccccaguguaagauuacgggguucgcgccuuuuucuaaggacaauagcauccgccucuccgcuggaggcgauauuuggguuaccagagagcccuacgugucuugcgggcugggaaaauguuaucaguucgcccuuggccaagggacaacccuggacaacagccacuccaauggaacaauccaugaucggaucccucaccgcacccuccugaugaacgaacugggcgucccguuucaucucggcacgaaacaggugugcauugccuggucuagcuccagcugucacgacgggagagcuuggcugcacaucugcauuacaggagaugaccggaaugccaccgcuucuuucaucuacgauggcaugcuuguugacuccauugggagcuggucuaagaacauccugcgcacacaggaguccgaaugugugugcaucaauggaaccugugccgucgugaugaccgauggcagcgcguccgggguggccgacacacggauucucuuuauccgggagggaaagauuguccauaucucuccccugagcggcuccgcucagcacauugaggaaugcagcugcuauccucgcuaccccgauguuagaugugugugccgggacaacuggaaaggcucuaaccgcccugugaucaauaucaacauggccgauuauuccauugacagcaauuacgucuguucugggcuugugggagacacgcccagaaacgaugacaauagcuccucuagcaacugccgggauccgaauaacgagcgcggcaauccugggguuaagggaugggcuuucgacgauggcaacgacguguggauggggagaaccaucaaucgggauuccagaagcggauacgaaacauuucgcgucauuggcggcuggaccacagccaacucuaagucccaaaucaauagacaggugauuguugacaacaauaacuggagcggguauucuggaguguucuccgucgagggcaaaagcuguaucaacagaugcuuuuacguggaacugauucgcgggcggccccaggagccuagagucugguggaccuccaauucuaucgugguuuucuguggaacgagcggcacauaugggaccggcuccuggcccgauggagcgaacaucaauuuuaugcccauuuga

SEQ ID NO: 216491 - RNA, 1380 nt, Artificial Sequence
  derived and/or modified CDS sequence (opt5) from neuraminidase__InfluenzaA__AHJ57746
augaaccccaaucagaagaucauuaccaucggcagcguguccauuacaaucgccgcugucugcuuccugaugcaaauugccauccucgcgacgaccguuacacugcacuuuaaacagaacgaguguaauaucccuucuaagaaccaugugauuccgugcgaacccaucauuaucgagagaaauauuaccgaaguggagauccggccuaaagucgcugaauaccgcgacuggagcaagccccagugucagauuacaggguucgccccuuuuuccaaagauaacucuaucagacuuagcgccggaggcaauaucugggugacccgggagcccuauguuuccugcgggccugacaaguguuaccaauucgcucugggacagggcacaacccucgggaacggacacucuaauggcacgauucaugauaagaucccgcaccgcacccugcuuaugaacgagcugggcgugcccuuucaucucgggacaaaacaggucugcauugccuggagcuccagcucuugucacgacggcagagcuuggcugcacgugugcguuaccggagaugaccggaaugccacagcguccuucaucuaugaugggaugcugguggacagcauugccucuuggucccagaacauccuccgcacccaagaaagcgagugugucugcaucaauggaacguguacaguggugaugaccgauggcucugcuuccggggucgccgacacacggauucuguuuauccgggaaggaaagauuguucauaucagcccucuuuccggcucugcucagcacauugaggagugcagcugcuacccccgccauuccgaugugagaugugugugccgggacaacuggaaaggcagcaaucgcccugucguggauaucaacaugaccgacuauucuaucgacuccagcuacguuuguucugggcuggugggagauacccccagaaacgacgauagcuccucuagcuccaauugccgggacccgaacaaugaacgcggcaacccuggggucaagggaugggccuucgaugacggcgaugacguguggauggggagaacaauuagccgggauucuagauccggauaugagacguuucgcguuaucggcggcuggaccacagcgaauagcaaaucucagauuaacagacaggugaucgucgacaauaacaauugguccggguacagcggaguguucuccgucgaaggcaagucuuguauuaacagaugcuuuuacguggagcucauccgcgggcggccccaagaaaccagaguuugguggacaagcaauuccauuguggucuucuguggaaccucuggcacguaugggacaggcagcuggccugauggagccaacaucaauuuuaugcccaucuga

SEQ ID NO: 216492 - RNA, 1410 nt, Artificial Sequence
  derived and/or modified CDS sequence (opt5) from neuraminidase__InfluenzaA__AHJ57758
augaaccccaaucagaagaucauuaccgugggcagcgucucccuggccaucgcuacaauuugccuccugaugcaaaucgccauucuugcgacgaccguuacacugcacuucaaacagaacgaguguaauaucccuucuaagaaccaggugaugccgugcgaacccaucauuaucgagagaaauauuaccgaaguggucuaccucaacaauacaaucauugagaaagaaaucuguccuaaggugguugaguaucggaacuggagcaaaccccagugccaaauuaccggguuugcuccuuucuccaaggacaauucuauccgccugagcgccggaggcgauaucugggugacaagagagcccuacgucuccuguucuccuagcaagugcuaucaguuugcccuugggcagggaaccacgcuggacaacucccauagcaauggcaccauucacgaucggaucccgcaucgcacacuccugaugaacgaacugggggugcccuuccaccucggaaccaaacagguuuguauugcuuggucuuccagcucuugccaugacggcagagccuggcugcacguguguaucacaggcgaugaccggaaugcuaccgccuccuuuauuuacaacgggaugcuugucgauagcaucucuuccuggagccgcaauauccugagaacgcaagaguccgaaugcguguguauuaacggaacaugcaccgugaucaugacagacggcucugcgagcggggucgccgauacccggauucucuucauccgcgagggaaacauuguucacguguccccucugagcggcucugcucagcauaucgaggaaugcuccuguuaucccagauacccugacgugcggugcgucugucgcgauaauuggaaggggagcaacagacccgugguugacaucaauauggccgauuauucuauugacagccacuacgugugcuccggacuugucggcgacaccccgcggaacgaugacucuagcuccagcucuaauuguaaagauccuaacaaugagcgcggcaaccccggggugaagggaugggcuuuugacgauggcaaugacguuuggauggggagaacaaucucccgggauagcagaucuggauacgaaacguuccgcgugauuggcggguggaccacagccaacuccaaaagccagaucaaucggcaggucauuguggacaacaauaacugguccggauauucuggcgucuuuagcguggagggcaaguccugcaucaauagauguuucuacguugaacugauucgcgggcggccucaagagaccagagugugguggacaucuaacagcaucgucguguuuugcggaaccuccggcacguaugggacaggaagcuggcccgauggcgcgaacaucaauuucaugcccauuuga

SEQ ID NO: 216493 - RNA, 1401 nt, Artificial Sequence
  derived and/or modified CDS sequence (opt5) from neuraminidase__InfluenzaA__AHJ57770
augaaccccaaucagaagaucauugccaucggcagcgugucccugaccauugcuaucauuugcuuccucaugcaaaucgccauccugacaacgaccaugacacuucacuuuaaacagaacgaguguucuaauccuagcaacaaucaggucguuccgugcgaacccauuaucauugagagaaacaccgugcaucucaauuccacaaccaucgaaaaggagauuuguccuaaaguggucgaauacaagaacuggucuaaaccccagugccaaaucacaggguucgcgccuuuuagcaaggacaauuccauucggcugucugcuggaggcgauaucugggugacccgcgagcccuauguuagcuguucccuggggaagugcuaccaguucgcccuuggacagggcacgacccugaaaaacaagcacagcaaugggacaacccaugacagaaucccucaccggacacuccugaugaacgagcugggagugccguuucaucucggcaccaaacaggucuguauugccuggucuuccagcucuugcuaugauggcaaggcuuggcugcacaucugugugacgggggacgauaaaaaugccacagcuuccauuaucuacgacggaaugcuuguugauagcauuggcucuugguccaagaacauccugcgcacccaagaaagcgagugcguguguaucaaugggacaugcgccgucgugaugaccgacggauccgcgucuggcaaggccgauacccggauucucuucaucagagaagggaaaauuaucaacauuagcccccuguccggaagcgcucagcacguggaggagugcucuuguuauccucgcuaccccgaagucagaugcguuugucgggacaacuggaagggcuccaaucgcccugugcuuuauaucaacauggccgauuacagcguggagucuagcuacgucugcuccggccuggugggggacacacccagaaaugaugacucuagcuccagcucuaacugucgggacccgaauaacgaacgcggagcuccuggcguuaaagggugggccuuugaugacggaaaugauguguggaugggcagaacgaucaagaacgacucccggagcggguaugagaccuuccgcgucgugaauggauggacaaccgcgaacucuaaaucccagauuaauagacagguuaucguggauagcgaaaacugguccggcuacucuggcauuuuuagcgucgaggggaagaauugcaucaaccgguguuucuauguggagcucauuagaggacgcccccaagaaccucgggucugguggacauccaauucuaucauuguguuuugcggcaccagcgggacguacggaacaggcuccuggcccgacggggccaacaucaacuuccugcccaucuga

SEQ ID NO: 216494 - RNA, 1410 nt, Artificial Sequence
  derived and/or modified CDS sequence (opt5) from neuraminidase__InfluenzaA__AHJ57782
augaaccccaaucagaagaucauuaucauuggcagcguuucccugaccaucgccacagucugcuuccucaugcaaauugcuauccuggccacgaccguuacacuucacuuuaaacagaacgaguguaauaucccuucuaagaaccagguggugccgugcgaacccauuaucauugagagaaauaucaccgaagucguguaccugaacaauacaaccauugagaaagaaaucuguccugcgguuguggaguaucggaacuggagcaagccccagugccaaauuaaaggguucgcuccuuuuuccaaggacaauucuauccgccucagcgccggaggcgauaugugggucacaagagagcccuacguguccuguucuccuagcaagugcuaucaguucgcccuggggcagggaaccacgcuugacaacaaucauuccaacggcaccauccacgaucggauuccgcaucgcacacugcucaugaaugaacuggggguucccuuucaccugggaaccaaacagguguguaucgcuuggucuagcuccagcugccaugacggcaaggccuggcuccacgucugugugacaggcgaugacagaaacgcuaccgccucuuucauuuacgaugggaugcugguggacuccaucggaagcuggucucaaaauauucuucggacgcaggaguccgaaugcgucuguaucaacggcacaugcaccguugugaugacagaugggagcgcguccggaaucgccgacacccgcauucuguuugugagagagggcaaaaucguccacauuucuccucucagcggguccgcucagcauaucgaggaaugcagcuguuauccccgguacccugaugugcgcugcguuuguagagacaacuggaagggaucuaaucggcccauuguggauaucaacauggccgacuauuccaucggcagcucuuacgucugcagcggccuggugggggacaccccgcgcaaugaugacagauucuccucuagcaacugucgggauccuaauuccgagcgcggaaaccccggcguuaaagggugggcuuuugacgauggagacgauguguggaugggcagaacaauuagccgggacucuagauccggguacgaaacguuccgcgucaucggaggcuggaccacagccaauagcaagucucagauuaaccggcaagugaucgucgauaauaacaauugguccggcuauagcgggguguuuuccguugagggaaagucuugcauuaacagauguuucuacguggaacuuauccgcggccggccucaggagaccagagucugguggacaagcaauuccauugugguguuuugcgggaccucuggaacguauggcacagggagcuggcccgacggcgcgaacaucaauuucaugcccaucuga

SEQ ID NO: 216495 - RNA, 1410 nt, Artificial Sequence
  derived and/or modified CDS sequence (opt5) from neuraminidase__InfluenzaA__AHJ57794
augaaccccaaucagaagaucauuaccgugggcagcgucucccuggccaucgcuacaauuugcuuccucaugcaaaucgccauucuggcgacgaccguuacacuucacuuuaaacagaacgaguguaauaucccuucuaagaaccaggugaugccgugcgaacccaucauuaucgagagaaauauuaccgaaguggucuaccugaacaauacaaucauugagaaagaaaucuguccuaaggugguugaguaucggaacuggagcaaaccccagugccaaauuaccggguucgcuccuuuuuccaaggacaauucuauccgccucagcgccggaggcgauaucugggugacaagagagcccuacgucuccuguucuccuagcaagugcuaucaguucgcccuggggcagggaaccacgcuugacaacucccauagcaauggcaccauucacgaucggaucccgcaucgcacacugcucaugaacgaacugggggugcccuuucaccugggaaccaaacagguuuguauugcuuggucuuccagcucuugccaugacggcagagccuggcuccacguguguaucacaggcgaugaccggaaugcuaccgccuccuucauuuacaacgggaugcuggucgauagcaucucuuccuggagccgcaauauccuuagaacgcaagaguccgaaugcguguguauuaacggaacaugcaccgugaucaugacagacggcucugcgagcggggucgccgauacccggauucuguuuauccgcgagggaaacauuguucacguguccccucucagcggcucugcucagcauaucgaggaaugcuccuguuaucccagauacccugacgugcggugcgucugucgcgauaauuggaaggggagcaacagacccgugguugacaucaauauggccgauuauucuauugacagccacuacgugugcuccggacuggucggcgacaccccgcggaacgaugacucuagcuccagcucuaauuguaaagauccuaacaaugagcgcggcaaccccggggugaagggaugggcuuccgacgauggccaugacguuuggauggggagaacaaucggacgggauagcagaucuggcuacgaaacguuccgcgugauugggggauggaccacagccaauuccaaaagccagaucaaccggcaggucauuguggacaauaacaauugguccggcuauucuggcgucuuuagcguggaggggaaguccugcaucaacagauguuucuacguugaacuuauucgcggacggccucaagagaccagagugugguggacaucuaauagcaucgucguguuuugcggcaccuccgggacguauggaacaggcagcuggcccgauggggcgaacaucaacuucaugcccauuuga

SEQ ID NO: 216496 - RNA, 1413 nt, Artificial Sequence
  derived and/or modified CDS sequence (opt5) from neuraminidase__InfluenzaA__AHJ57806
augaaccccaaucagaagauuaccugcaucagcgccacaggcaugacgcuguccguggucucucuccugaccgggaucgcuaaccuuggacugaauauuggccuccacuacaaaguuagcgacuccacaaacaucucuauuccuaauaugaacgaggccagcccgaccacaaccaucaucaauaaccauccccaaaauaacuucacaaauauuaccaacaucauuaugaauaagaacgaagaggggaauuuucugaaccuuacgaaaccucugugugaagugaacuccuggcacauccucucuaaggauaaugcgauuagaaucggagagaacgcucauauucuggugacccgggaacccuaucugagcugcgacccucagggcugucgcauguucgcccucucccaggggacaacccugagaggacggcacgccaauggcacaauccaugaucgcagccccuuuagagcucuuaucucuugggagaugggccaggccccuuccccguacaacgcucgggucgagugcauuggguggagcucuaccuccugucacgacggaaucagccgcaugucuauuugcaucuccggccccaauaacaaugccagcgcggugguuugguaugggggaagaccugugacggaaauucccuccugggccggcaacauccugcggacacaagagucugaaugugucugccacgggggaaucuguccugugguuaugaccgauggccccgcuaauaaccgcgccgagacaaaaauuaucuacuucaaggagggcaagauucagaaaaucgaggaacucaaggggaaugcucagcauauugaagagugcagcuguuauggagccuccggcaugaucaaaugcaucugcagagacaacuggaagggggcgaaucggccggugauuaccaucgauccugaaaugaugacccacacaagcaaauaccuguguucuaagauucuuacggacaccucccgccccaacgauccuacaaauggaaacugcgacgcccccaucaccggcgggagccccgauccuggagucaagggcuuugcuuuccuggacggcaaaaacucuuggcucgggagaacaauuagcaaggauucccggucuggauaugagaugcugaaagugccgaaugccgagaccgacacgcagagcggcgcuaucucccaucaaauuaucgugaacaaucagaacuggagcggguacucuggagccuuuaucgacuacugggccaauaaggaauguuucaaccccugcuuuuaugucgagcugauucgcggcagaccuaaagaauccagcguucucuggacaucuaauuccaucguggcucugugugggagccgggagagacuuggcuccuggucuuggcacgauggagcggaaauuaucuacuucaaguga

SEQ ID NO: 216497 - RNA, 1380 nt, Artificial Sequence
  derived and/or modified CDS sequence (opt5) from neuraminidase__InfluenzaA__AHJ57818
augaaccccaaucagaagauuaccugcaucagcgccacaggcgugacgcuguccgucguuucucuccugaucgggauugcuaaccuuggacugaauaucggccuccacuacaaagugagcgacuccccuaccauuaacaucccgaauaugaacgagacaaaucccaucaccacaaacauuaccaauaucauugugaacaagaaugaagaggggacauuccugaaccuuaccaaaccucugugugaagucaauucuuggcauauccucagcaaggauaacgccauuagaaucggagaggacgcgcacauucuggugacgcgggaacccuaucuguccugcgauccucaaggcugucgcauguuugcucucucucaggggaccacacugagaggacggcaugccaauggcaccauccacgaccgcagccccuucagagcccuuaucuccugggagaugggccaggcuccuagcccguacaacacacggguugagugcauuggguggucuuccaccagcugucaugauggaaucucucgcauguccauuugcaucagcggccccaacaauaacgccucugcuguggucugguauagagggcggccugugacggaaauucccuccugggccggaaauauccugcgcacacaggagagcgaauguguuugccacaaaggcaucuguccuguggucaugaccgacgggcccgcgaacaauaaggccgcuacaaagauuaucuacuuuaaagagggaaagauucagaaaaucgaggaacuccaaggcaacgcccagcacauugaggaaugcuccuguuauggcgcugccgggaugaucaagugcgugugcagagauaauuggaaaggagcgaaccggccgaucauuaccaucgacccugagaugaugacccauacaucuaaguaccuguguagcaagauucuuacggauaccucccgccccaaugacccuacagauggcaacugcgacgcccccaucaccgggggaagccccgauccuggcgugaaaggguucgcuuuucuggaaggagaaaauucuuggcucggcagaacaauuuccaaggacagccggucuggcuaugagaugcugaaagucccgaacgccgagaccgacacgcagagcggggcuaucucccaccaaaugauuguuaauaaccagaauuggucuggauacagcggcgccuucaucgauuacugggccaacaaggaguguuuuaaccccugcuucuauguggaacugauccgcgggagaccuaaagaguccagcgugcucuggacaucuaauuccauugucgcucuguguggaagccgggaaagacuuggcucuugguccuggcaugacggggcggagaucauuuacuuuaaguga

SEQ ID NO: 216498 - RNA, 1410 nt, Artificial Sequence
  derived and/or modified CDS sequence (opt5) from neuraminidase__InfluenzaA__AHJ57830
augaaccccaaucagaagaucauuaccaucggcagcgugucccugacaauugccacggucucuuuccucaugcaaaucgcuauucugaccacaaccguuacacuucacuuuaaacauaacgagugcaauaugccuccgaagaaccaggugaugagcugugaacccaucaucauugagagaaauaucaccgaaauuguguaccugaacaauacaaccaucgagaaagaaauuugcccuaaggucguggaguaucggaacugguccaaaccccaguguaagaucacgggguucgccccuuuuucuaaggacaauagcauucgccucuccgcgggaggcgauaucuggguuaccagagagcccuacgugucuugcgggcugggaaaauguuaucaguucgcucuuggccaagggacaacccuggacaacagccacuccaauggaacaauccaugaucggauuccucaccgcacccuccugaugaacgaacugggcgucccguuucaucucggcacgaaacaggugugcaucgccuggucuagcuccagcugucacgacgggagagccuggcugcacauuugcaucacaggagaugaccggaaugcuaccgccucuuucauuuacgauggcaugcuuguugacuccaucgggagcuggucuaagaacauccugcgcacacaggaguccgaaugugugugcauuaauggaaccugugcugucgugaugaccgauggcagcgccuccgggguggcggacacaagaauccucuuuauucgggagggaaagaucguccauauuucuccccugagcggcuccgcccagcacaucgaggaaugcagcugcuauccucgcuaccccgauguuagaugugugugccgggacaacuggaaaggcucuaaccgcccugugaucgauauuaauauggcugacuauuccaucgacagcaacuacgucuguucugggcuugugggagauacgcccagaaaugacgauaacagcuccucuagcaauugccgggacccgaacaaugagcgcggcaacccugggguuaagggaugggccuucgaugacggcaaugauguguggauggggagaaccauuaaccgggacuccagaagcggauacgaaacauuucgcgucaucggcggcuggaccacagcuaauucuaagucccaaauuaacagacaggugaucguugauaauaacaauuggagcggguauucuggaguguucuccgucgagggcaaaagcuguauuaaccggugcuuuuacguggaacugauccgcgggcggccccaggagccuagagucugguggaccuccaacucuaucgugguuuucuguggaacgagcggcacauaugggaccggcuccuggcccgacggagccaauauuaacuuuaugcccaucuga

SEQ ID NO: 216499 - RNA, 1413 nt, Artificial Sequence
  derived and/or modified CDS sequence (opt5) from neuraminidase__InfluenzaA__AHJ57842
augaaccccaaucagaagauuaccugcaucagcgccacaggcaugacgcuguccguggucucuaugcucaucgggauugcuaaccugggacuuaauaucggccugcacuacaaaguuagcgacuccaccaacauuaauaucccuaagaugaacgagacaaauccgaccacaaccaucauuaacaaucauccccaaaacaauuucacaaacaucaccaauauuaucgugaacaaaaaugaagaggaaaacuuucucaaccugacgaagccucuuugugaggucaauucuuggcacauucugagcaaagauaacgccaucagaauuggggaaaaugcgcauauccucgugacccgggagcccuaucuguccugcgacccucagggaugucgcauguucgcucugucucagggcacaaccaucagagggcagcacgccaacggaacaauucaugaucggagccccuuucgcgcccucaucuccugggagaugggccaagcuccuagcccguacaaugccagaguggaaugcauuggcuggucuuccaccagcugucacgacgggaucucucggauguccauuugcaucagcggacccaacaauaacgcuucugccguugugugguauggcgggcgcccugucacggagauccccuccugggcgggaaauauucugagaacacaggaaagcgagugugugugccacggcgggaucuguccuguugugaugaccgauggacccgccaacaaucgggcugagacaaagauuaucuacuucaaggaaggcaaaauucagaagaucgaggaacuuaaaggcaacgcccagcauaucgaggaaugcuccuguuauggggcuucuggaaugauuaagugcaucugccgcgacaauuggaaaggcgccaacagaccggucauuaccaucgauccugagaugaugacccacacaagcaaguaccuguguuccaagauucucacggacaccagccggcccaaugauccuacaaacgggaacugcgacgcgcccaucaccggagggucuuccgaucccggcgugaaaggauuugccuuccuggacggcgagaauagcuggcuuggccgcacaauuucuaaggauagcagauccggguaugaaaugcugaaagugccuaacgcugagaccgacacgcaaucuggagccaucagccaucagaucauugucaauaaccagaauugguccggcuacagcggggcuuuuaucgacuacugggccaacaaggaauguuucaauccgugcuuuuauguugagcucauucggggacgccccaaagaaucuuccgugcuguggacaagcaacucuaucguggcccuguguggcuccagagagcggcucgggagcugguccuggcacgauggcgcugagauuaucuacuucaaguga

SEQ ID NO: 216500 - RNA, 1413 nt, Artificial Sequence
  derived and/or modified CDS sequence (opt5) from neuraminidase__InfluenzaA__AHJ57853
augaaccccaaucagaagauuaccugcaucagcgccacaggcaugacgcuguccguggucucucuccugaucgggauugcuaaccuuggacugaauguuggccuccacuacaaagugaacgacccuaccaauaucaacauuccgaauaugaacgagacaagccccaccacaaccaucaucaauaaccauccucaaaauaacuucacaaauauuaccaacaucauugugaauaagaacgaagaggaaaacuuucugaaucuuacgaaaccccugugugaggucaacuccuggcacauccucucuaaggauaaugccauuagaaucggggaaaacgcgcauauucuggugacccgggagccuuaucugagcugcgacccccagggaugucgcauguucgcucucucccagggcacaacccugagagggcagcacgccaauggaacaauccaugaucggucuccuuuucgcgcccuuaucagcugggagaugggccaagcuccgucccccuacaacgccagaguugaaugcauuggcuggagcucuaccuccugucacgacgggaucagccggaugucuauuugcaucuccggaccuaauaacaaugcuagcgccguggucugguauggcgggcgccccgugacggagauuccuucuugggcgggaaacauccugagaacacaggaauccgaguguguuugccacggcgggaucugucccguggucaugaccgauggaccggccaauaaccgggcugagacaaaaauuaucuacuucaaggaaggcaagauucagaaaaucgaggaacucaagggcaaugcccagcauauugaggaaugcagcuguuauggggcuuccggaaugaucaaaugcaucugccgcgacaacuggaagggcgccaauagaccugugauuaccaucgaucccgagaugaugacccacacaucuaaauaccuguguagcaagauucuuacggacaccucccggccuaacgaucccacaaacgggaauugcgacgcgcccaucaccggaggcagcccugauccgggggugaagggauuugccuuccuggacggcgagaacucuuggcucggccgcacaauuuccaaagauagcagaucuggguaugaaaugcugaagguccccaaugcugagaccgacacgcaaagcggagccaucucccaucagaugauuguuaacaaucagaacuggucuggcuacagcggggcuuuuaucgacuacugggccaauaaagaauguuucaacccuugcuuuuauguggagcugauccggggacgccccaaggaauccagcgugcucuggacaucuaauuccauugucgcccuguguggcagcagagagcggcuugggucuugguccuggcacgauggcgcugagaucauuuacuucaaauga

SEQ ID NO: 216501 - RNA, 1413 nt, Artificial Sequence
  derived and/or modified CDS sequence (opt5) from neuraminidase__InfluenzaA__AHJ57865
augaaccccaaucagaagauuaccugcaucagcgccacaggcaugacgcuguccguggucucuaugcucaucgggauugcuaaccugggacuuaauaucggccugcacuacaaaguuagcgacuccaccaacauuaauaucccuaagaugaacgagacaaauccgaccacaaccaucauuaacaaucauccccaaaacaauuucacaaacaucaccaauauuaucgugaacaaaaaugaagaggaaaacuuucucaaccugacgaagccucuuugugaggucaauucuuggcacauucugagcaaagauaacgccaucagaauuggggaaaaugcgcauauccucgugacccgggagcccuaucuguccugcgacccucagggaugucgcauguucgcucugucucagggcacaacccucagagggcggcacgccaacggaacaauccaugaucgcagccccuuuagagcccugauuuccugggagaugggccaggcuccuagcccguacaaugcccggguggaaugcaucggcuggucuuccaccagcugucacgacgggauuucucgcauguccaucugcauuagcggacccaacaauaacgcuucugccguugugugguauggcgggagaccugucacggagauccccuccugggcgggaaauauccuucggacacaagaaagcgagugugugugccacggcgggauuuguccuguugugaugaccgauggacccgccaacaaucgcgcugagacaaagaucauuuacuucaaggaaggcaaaauccagaagauugaggaacugaaaggcaacgcccagcauaucgaggaaugcuccuguuauggggcuucuggaaugaucaagugcauuugcagagacaauuggaaaggcgccaaccggccggucaucaccauugauccugagaugaugacccacacaagcaaguaccucuguuccaagauccugacggacaccagccgccccaaugauccuacaaacgggaacugcgacgcgcccauuaccggaggcucucccgauccuggggugaaaggauuugccuuccuugacggcgaaaauuccuggcugggcagaacaaucagcaaggauucucggagcggguaugagaugcucaaagugccgaacgcugagaccgacacgcaguccggagccauuucucaucaaaugaucgucaauaaccagaauuggagcggcuacuccggggcuuuuaucgacuacugggccaacaaggaauguuucaaucccugcuuuuauguugagcugauucgcggaagaccuaaagaaagcucugugcuguggacauccaacagcaucguggcccucuguggcucucgggagagacugggguccuggagcuggcacgauggcgcugagauuaucuacuucaaguga

SEQ ID NO: 216502 - RNA, 1413 nt, Artificial Sequence
  derived and/or modified CDS sequence (opt5) from neuraminidase__InfluenzaA__AHJ57876
augaaccccaaucagaagauuaccugcaucagcgccacaggcaugacgcuguccguggucucucuccugaucgggauugcuaaccuuggacugaauaucggccuccacuacaaaguuagcgacuccaccaacauuaauaucccuaacaugaaugagacaucuccgaccacaaccaucauuaacaaucauccccaaaacaauuucacaaacaucaccaauauuaucaugaacaagaaugaagaggggaacuuucugaaccuuacgaaaccucugugugaagugaauagcuggcacauucucuccaaggauaacgccaucagaauuggagagaaugcgcauauccuggugacccgggaacccuaucugucuugcgacccucagggcugucgcauguucgcucucagccaggggacaacccugagaggacggcacgccaacggcacaauccaugaucgcucccccuuuagagcccuuauuagcugggagaugggccaggcuccuucuccguacaaugcccgggucgagugcaucgggugguccagcaccucuugucacgacggaaaaucccgcaugagcauuugcaucucuggccccaacaauaacgcuuccgccgugguuugguaugggggaagaccuauuacggaaauccccagcugggcgggcaauauccugcggacacaagaguccgaaugugugugccacgggggaauuuguccugucgugaugaccgauggccccgccaacaaucgcgcugagacaaagaucauuuacuucaaggagggcaaaguucagaagaucgaggaacucaaagggaacgcccagcauauugaagagugcucuuguuauggagcuagcggcaugaucaagugcaucugcagagacaauuggaaaggggccaaccggccggugauuaccaucgauccugaaaugaugacccacacauccaaguaccuguguagcaagauucuuacggacaccucucgccccaaugauccuacaaacggaaacugcgacgcgcccaucaccggcgggucccccgauccuggagucaaaggcuuugccuuccuggacggcgagaauagcuggcucgggagaacaauuucuaaggauagccgguccggauaugagaugcugaaagugccgaacgcugaaaccgacacgcagucuggcgccaucagccaucaaauuaucgugaauaaccagaauugguccggguacagcggagcuuuuaucgacuacugggccaacaaggaguguuucaaucccugcuuuuaugucgaacugauucgcggcagaccuaaagagucuuccguucucuggacaagcaacucuaucguggcccugugugggucccgggaaagacuuggcagcugguccuggcacgauggagcugagauuaucuacuucaaguga

SEQ ID NO: 216503 - RNA, 1413 nt, Artificial Sequence
  derived and/or modified CDS sequence (opt5) from neuraminidase__InfluenzaA__AHJ57888
augaaccccaaucagaagauuaccugcaucagcgccacaggcaugacgcuguccguggucucuaugcucaucgggauugcuaaccugggacuuaauaucggccugcacuacaaaguuagcgacuccaccaacauuaauaucccuaacaugaaugagacaucuccgaccacaaccaucacaaacaaucauccccaaaacaauuucaccaacauuacgaauaucauugugagcaagaacgaagaggaaaauuuucucaaccugaccaaaccucuuugugaggugaacuccuggcacauccugucuaaggauaaugccauuagaaucggggaaaacgcgcauauucucgucacacgggagcccuaucugagcugcgacccucagggaugucgcauguucgcucugucccagggcaccacacucagagggcagcacgccaauggaaccauccaugaucggagccccuuucgcgcccugaucucuugggagaugggccaagcuccuuccccguacaacgccagaguggaaugcauuggcuggagcucuacguccugucacgacgggaucagccggaugucuauuugcaucuccggacccaauaacaaugcuagcgccguugugugguauggcgggcgcccugucacagagauucccuccugggcgggaaacauccuuagaacccaggaaucugagugugugugccacggcgggaucuguccuguugugaugacagauggacccgccaauaaccgggcugagaccaaaauuaucuacuucaaggaaggcaagauucagaaaaucgaggaacugaagggcaaugcccagcauauugaggaaugcagcuguuauggggcuuccggaaugaucaaaugcaucugccgcgacaacuggaagggcgccaauagaccggucauuaccaucgauccugagaugaugacacacacgagcaaauaccucuguucuaagauucugaccgacacaucccggcccaacgauccuaccaaugggaacugcgacgcgcccaucacaggaggcagccccgauccuggggugaagggauuugccuuccuugacggcgagaacucuuggcugggccgcaccauuagcaaagauuccagaucuggguaugaaaugcucaaggugccgaaugcugagacggacacacaaagcggagccaucucccaucagaugauugucaacaaucagaacuggagcggcuacucuggggcuuuuaucgacuacugggccaauaaagaauguuucaaccccugcuuuuauguugagcugauccggggacgcccuaaggaauccagcgugcuguggaccucuaauuccauuguggcccucuguggcagcagagagcggcugggguccuggucuuggcacgauggcgcugagaucauuuacuucaaauga

SEQ ID NO: 216504 - RNA, 1413 nt, Artificial Sequence
  derived and/or modified CDS sequence (opt5) from neuraminidase__InfluenzaA__AHJ57900
augaaccccaaucagaagauuaccugcaucagcgccacaggcaugacgcuguccguggucucucuccugaucgggauugcuaaccuuggacugaauaucggccuccacuacaaaguuagcgacuccaccaacauuaauaucccuaacaugaaugagacaucuccgaccgccacaaucauuaacaaucauccccaaaacaauuucaccaacaucacaaauauuaucgugaacaagaaugaagaggaaaacuuuuucaaccuggcgaaaccucuuugugaggugaauagcuggcacauucuguccaaggauaacgcuaucagaauuggggaaaaugcccauauccucgucacccgggagcccuaucugucuugcgacccucagggaugucgcauguuugcccugagccagggcacgacccucagagggcagcacgcuaacggaacaauccaugaucggucccccuuccgcgcccugauuagcugggagaugggccaagcuccuucuccguacaaugccagaguggaaugcaucggcugguccagcaccucuugucacgacgggauuucccggaugagcaucugcauuucuggacccaacaauaacgcguccgccguugugugguauggcgggcgcccugucacagagauccccagcugggcuggaaauauccuuagaacccaggaauccgagugugugugccacggcgggauuuguccuguugugaugacggauggacccgccaacaaucgggcugagacaaaaaucauuuacuuuaaggaaggcaagauccagaaaauugaggaccugaagggcaacgcccagcauaucgaagagugcucuuguuauggggcgagcggaaugaucaaaugcauuugccgcgauaauuggaagggcgccaacagaccggucaucaccauugacccugaaaugaugacacacaccuccaaauaccucuguagcaagauccugaccgauacaucucggcccaaugacccuacgaacgggaacugcgaugcucccauuaccggaggcucccccgacccuggggugaagggauucgccuuucuugauggcgagaauagcuggcugggccgcacaaucucuaaagacagcagauccggguaugagaugcucaaggugccgaacgcugaaaccgacacacaaucuggagccauuagccaucagaugaucgucaauaaccagaauugguccggcuacagcggggccuucaucgauuacugggcuaacaaagaguguuuuaaucccugcuucuauguugaacugauucggggacgcccuaaggagucuuccgugcuguggaccagcaacucuaucguggcgcucuguggcuccagagaacggcuggggagcugguccuggcacgacggcgccgagauuaucuacuuuaaauga

SEQ ID NO: 216505 - RNA, 1413 nt, Artificial Sequence
  derived and/or modified CDS sequence (opt5) from neuraminidase__InfluenzaA__AHJ57911
augaaccccaaucagaagauuaccugcaucagcgccacaggcgugacgcuguccgucguuucucuccugaucgggauugcuaaccuuggacugaauaucggccuccacuacaaagugagcgacuccucuaacauuaauaucccuaacaugaaugagaccaacccgacaaccacaaucauuaauaaccauacccaaaauaacuucaagaauaucacaaacauuaucgugaauaaaaacgaagaggggauuuuucugaaccuuaccaagccccugugugaagucaauagcuggcacauccucuccaaagauaacgccauuagaaucggagaggacgcgcauauccuggugacgcgggaaccuuaucugucuugcgauccccagggcugucgcauguucgcucucagccaggggaccacacugagaggacggcacgccaauggcaccauucaugaccgcuccccuuuuagagcccuuaucagcugggagaugggccaggcucccucuccuuacaacgcccggguugagugcauugggugguccagcacaucuugucacgauggaaucucccgcaugagcauuugcaucucuggcccgaauaacaaugcuuccgccguggucugguauagagggcggcccgugaccgaaaucccuagcugggcgggaaacauucugcgcacgcaagaguccgaauguguuugccacaagggcaucugucccguggucaugacagacgggccugccaauaacagagcugccaccaagauuaucuacuucaaagagggaaagauucagaaaaucgaggaacucaagggcaaugcucagcauaucgaggaaugcucuuguuauggcgccgcggggaugauuaaaugcaucugccgggauaacuggcgcggagccaauagacccgugauuacaaucgacccggagaugaugacccacaccagcaaguaccuguguuccaagauucuuacagauacgagccggccuaacgaccccaccaauggcaacugcgaugcuccuaucacagggggaucucccgaccccggcgugaaaggguuugccuuccuggauggagaaaacuccuggcucggccgcaccauuagcaaggacucuagaagcggcuaugagaugcugaaagucccuaaugcugagacagacacccaguccgggucuacgagcuaccaaaucaucguuaacaaucagaacugguccggauacagcggcgccuuuauugauuauugggccaauaaggaauguuucaacccgugcuuuuacguggagcugauccgggggagacccaaagaaucuuccgugcucuggacaagcaauucuauugucgcucuguguggaucccgcgagcggcuuggcagcugguccuggcaugacggggcggaaaucauuuauuucaaguga

SEQ ID NO: 216506 - RNA, 1410 nt, Artificial Sequence
  derived and/or modified CDS sequence (opt5) from neuraminidase__InfluenzaA__AHJ57923
augaaccccaaucagaagaucauuaccgugggcagcgucucccuggccaucgcuacaauuugcuuccucaugcaaaucgccauucuggcgacgaccguuacacuucacuuuaaacagaacgaguguaauaucccuucuaagaaccaggugaugccgugcgaacccaucauuaucgagagaaauauuaccgaaguggucuaccugaacaauacaaucauugagaaagaaaucuguccuaaggugguugaguaucggaacuggagcaaaccccagugccaaauuaccggguucgcuccuuuuuccaaggacaauucuauccgccucagcgccggaggcgauaucugggugacaagagagcccuacgucuccuguucuccuagcaagugcuaucaguucgcccuggggcagggaaccacgcuugacaacucccauagcaauggcaccauucacgaucggaucccgcaucgcacacugcucaugaacgaacugggggugcccuuucaccugggaaccaaacagguuuguauugcuuggucuuccagcucuugccaugacggcagagccuggcuccacguguguaucacaggcgaugaccggaaugcuaccgccuccuucauuuacaacgggaugcuggucgauagcaucucuuccuggagccgcaauauccuuagaacgcaagaguccgaaugcguguguauuaacggaacaugcaccgugaucaugacagacggcucugcgagcggggucgccgauacccggauucuguuuauccgcgagggaaagauuguucacguguccccucucagcggcucugcucagcauaucgaggaaugcuccuguuaucccagauacccugacgugcggugcgucugucgcgauaacuggaaagggagcaauagacccgugguugacaucaacauggccgauuauucuauugacagccacuacgugugcuccggacuggucggcgacaccccgcggaaugaugacucuagcuccagcucuaacuguaaggauccuaauaacgagcgcggcaaucccggggugaaaggaugggcuuucgacgauggcaacgacguuuggauggggagaacaaucucccgggauagcagaucuggauacgaaacguuucgcgugauuggcggguggaccacagccaauuccaagagccagaucaaccggcaggucauuguggacaauaacaauugguccggauauucuggcgucuucagcguggagggcaaguccugcaucaacagauguuuuuacguugaacuuauucgcgggcggccucaagagaccagagugugguggacaucuaauagcaucgucguguucugcggaaccuccggcacguaugggacaggaagcuggcccgauggcgcgaacaucaacuuuaugcccauuuga

SEQ ID NO: 216507 - RNA, 1380 nt, Artificial Sequence
  derived and/or modified CDS sequence (opt5) from neuraminidase__InfluenzaA__AHJ57935
augaaccccaaucagaagauuaccugcaucagcgccacaggcgugacgcuguccgucguuucucuccugaucgggauugcuaaccuuggacugaauaucggccuccacuacaaagugagcgacuccccuaccauuaacaucccgaauaugaacgagacaaaucccaccacaaccaacaucacaaauauuaucgugaacaagaaugaagaggggaccuuccugaaccuuacgaaaccucugugugaagucaauucuuggcauauucucagcaaggauaacgccaucagaauuggagaggacgcgcacauccuggugacccgggaacccuaucuguccugcgauccucaaggcugucgcauguuugcucucucucaggggacaacccugagaggacggcaugccaauggcacaauucacgaccgcagccccuucagagcccuuaucuccugggagaugggccaggcuccuagcccguacaacacccggguugagugcaucggguggucuuccacgagcugucaugauggaauuucucgcauguccaucugcauuagcggccccaacaauaacgccucugcuguggucugguauagagggcggccugugacagaaauccccuccugggccggaaauauucugcgcacccaggagagcgaauguguuugccacaaaggcaucuguccuguggucaugacagacgggcccgcgaacaauaaggccgcuaccaagaucauuuacuuuaaagagggaaagauccagaaaauugaggaacuccaaggcaacgcccagcacaucgaggaaugcuccuguuauggcgcugccgggaugauuaagugcgugugcagagauaauuggaaaggagcgaaccggccgaucaucaccauugacccugagaugaugacacauacgucuaaguaccuguguagcaagauccuuaccgauacaucccgccccaaugacccuaccaacggcaauugcgaugcccccauuacagggggaagccccgacccuggcgugaaaggguucgcuuuucuggauggagaaaacucuuggcucggcagaaccaucuccaaggacagccggucuggcuaugagaugcugaaagucccgaaugcccagacggacacacaaagcgggcccaccuccuaccagcugauuguuaacaaucagaacuggucuggauacagcggcgcuuucaucgauuauugggccaacaaggaguguuuuaauccuugcuucuacguggaacucauucgcgggagacccaaagaguccaacgugcuguggaccagcaauucuauggucgcccuuuguggaucccgggaaagacugggcagcuggucuuggcacgacgaugcugagaucaucuauuuuaaguga

SEQ ID NO: 216508 - RNA, 1410 nt, Artificial Sequence
  derived and/or modified CDS sequence (opt5) from neuraminidase__InfluenzaA__AHJ57946
augaaccccaaucagaagaucauuaccaucggcagcgugucccugacaauugccacggucucuuuccucaugcaaaucgcuauucugaccacaaccguuacacuucacuuuaaacauaacgagugcaauaugccuccgaagaaccaggugaugagcugugaacccaucaucauugagagaaauaucaccgaaauuguguaccugaacaauacaaccgucgagaaagaaaucugcccuaaggugguugaguaucggaacugguccaaaccccaguguaagauuacgggguucgccccuuuuucuaaggacaauagcauccgccucuccgcgggaggcgauauuugggugaccagagagcccuacgucucuugcgggcugggaaaauguuaucaguucgcucuuggccaagggacaacccuggacaacagccacuccaauggaacaauccaugaucggaucccucaccgcacccuccugaugaacgaacugggcgugccguuucaucucggcacgaagcagguuugcauugccuggucuagcuccagcugucacgacgggagagccuggcugcacaucugcauuacaggagaugaccggaaugcuaccgccucuuucaucuacgauggcaugcuuguggacuccauugggagcuggucuaaaaacauccugcgcacacaggaguccgaaugugucugcaucaauggaaccugugcuguggugaugaccgauggcagcgccuccggggucgcggacacacggauucucuuuaucagagagggaaagauuguucauaucucuccccugagcggcuccgcccagcacauugaggaaugcagcugcuauccucgcuaccccgaugugagaugugugugccgggacaacuggaaaggcucuaaccgcccugucaucgauaucaauauggcugacuauuccauugacagccauuacguguguucugggcuuguuggagauacgcccagaaacgacgauaauagcuccucuagcaacugccgggacccgaauaacgagcgcggcaauccuggggugaagggaugggccuucgaugacggcaacgaugucuggauggggagaaccaucaaucgggacuccagaagcggauacgaaacauuucgcgugauuggcggcuggaccacagcuaacucuaagucccaaaucaaucggcagguuauuguggauaacaauaacuggagcggguauucuggagucuucuccguggagggcaaaagcuguaucaauagaugcuuuuacgucgaacugauucgcgggcggccccaggagccuagagugugguggaccuccaacucuaucguuguguucuguggaacgagcggcacauaugggaccggcuccuggcccgacggagccaacaucaauuuuaugcccauuuga

SEQ ID NO: 216509 - RNA, 1410 nt, Artificial Sequence
  derived and/or modified CDS sequence (opt5) from neuraminidase__InfluenzaA__AHJ57957
augaaccccaaucagaagaucauuaccaucggcagcgugucccugacaauugccacggucucuuuccucaugcaaaucgcuauucugaccacaaccguuacacuucacuuuaaacagaacgagugcaauaugccuccgaagaaccaggugaugagcugugaacccaucaucauugagagaaauaucaccgaaauuguguaccugaacaauacaaccgucgagaaagaaaucugcccuaaggugguugaguaucggaacugguccaaaccccaguguaagauuacgggguucgccccuuuuucuaaggacaauagcauccgccucuccgcgggaggcgauauuugggugaccagagagcccuacgucucuugcgggcugggaaaauguuaucaauucgcucuuggccaggggacaacccuggacaacagccauuccaauggaacaauccacgaucggaucccucaucgcacccuccugaugaacgaacugggcgugccguuucaccucggcacgaagcagguuugcauugccuggucuagcuccagcugucaugacgggagagccuggcugcacaucugcauuacaggagaugaccggaaugcuaccgccucuuucaucuacgauggcaugcuuguggacuccauugggagcuggucuaaaaacauccugcgcacacaggaguccgaaugugucugcaucaauggaaccugugcuguggugaugaccgauggcagcgccuccggggucgcggacacacggauucucuuuaucagagagggaaagauuguucacaucucuccccugagcggcuccgcccaacauauugaggaaugcagcugcuauccucgcuaccccgaugugagaugugugugccgggacaacuggaaaggcucuaaccgcccugucaucgauaucaauauggcugacuauuccauugacagcaacuacguguguucugggcuuguuggagauacgcccagaaaugacgauaacagcuccucuagcaauugccgggacccgaacaaugagcgcggcaacccuggggugaagggaugggccuucgauuacggcaaugacgucuggauggggagaaccaucaaccgggauuccagaagcggauaugaaacauuucgcgugauuggcggcuggaccacagcuaauucuaagucccagaucaaccggcagguuauuguggacaauaacaauuggagcggguacucuggagucuucuccguggagggcaaaagcuguaucaacagaugcuuuuaugucgaacugauucgcgggcggccccaggagccuagagugugguggaccuccaacucuaucguuguguucuguggaacgagcggcacauacgggaccggcuccuggcccgauggagccaauaucaacuuuaugcccauuuga

SEQ ID NO: 216510 - RNA, 1410 nt, Artificial Sequence
  derived and/or modified CDS sequence (opt5) from neuraminidase__InfluenzaA__AHJ57968
augaaccccaaucagaagaucauuaccgugggcagcgucucccuggccaucgcuacaauuugccuccugaugcaaaucgccauucuugcgacgaccguuacacugcacuucaaacagaacgaguguaauaucccuucuaagaaccaggugaugccgugcgaacccaucauuaucgagagaaauauuaccgaaguggucuaccucaacaauacaaucauugagaaagaaaucuguccuaaggugguugaguaucggaacuggagcaaaccccagugccaaauuaccggguuugcuccuuucuccaaggacaauucuauccgccugagcgccggaggcgauaucugggugacaagagagcccuacgucuccuguucuccuagcaagugcuaucaguuugcccuugggcagggaaccacgcuggacaacucccauagcaauggcaccauucacgaucggaucccgcaucgcacacuccugaugaacgaacugggggugcccuuccaccucggaaccaaacagguuuguauugcuuggucuuccagcucuugccaugacggcagagccuggcugcacguguguaucacaggcgaugaccggaaugcuaccgccuccuuuauuuacaacgggaugcuugucgauagcaucucuuccuggagccgcaauauccugagaacgcaagaguccgaaugcguguguauuaacggaacaugcaccgugaucaugacagacggcucugcgagcggggucgccgauacccggauucucuucauccgcgagggaaagauuguucacaucuccccucugagcggcucugcucagcauaucgaggaaugcuccuguuaucccagauacccugacgugcggugcgugugucgcgauaacuggaaagggagcaauagacccgucauugacaucaacauggccgauuauucuauugacagcaauuacgugugcuccggacuuguuggcgacaccccgcggaacgaugacaauucuagcuccagcaacugucgcgauccuaauaacgagagaggcaaucccggggugaagggaugggcuuuugacgauggcaacgacgucuggauggggcggacaaucaauagagauucucgcuccggauacgaaacguuccgggugauuggcggguggaccacagccaacagcaaaucucagaucaauagacagguuauuguggacaacaauaacugguccggauauagcggcgucuuuuccguggagggcaagucuugcaucaaccgcuguuucuacgucgaacugauccgggggagaccucaagagacccgcgugugguggacaagcaauuccauuguuguguuuugcggaaccucuuguacguauggcacagggagcuggcccgauggagcgaacaucaauuucaugcccauuuga

SEQ ID NO: 216511 - RNA, 1413 nt, Artificial Sequence
  derived and/or modified CDS sequence (opt5) from neuraminidase__InfluenzaA__AHJ57980
augaaccccaaucagaagaauaccugcaucagcgccauuggcaugacacuguccguggucucucuccugaucgggguugcugaccuuggacugaacauuggccuccacuacaaagugagcgauuccucuaacaucaauauuccuaacaugaaugagacgaacccgaccacaaccaucaucaauaacaauccccaaaacaauuucacaaacauuaccaauaucauugugaacaagaacgaagaggaaaaauuucugaaucuuacaaagccucugugugaggucaacagcuggcauauccucuccaaagacaaugccauuagaaucggggaagaugcgcacauucuggugacccgggagcccuaucugucuugcgacccucagggaugucgcauguucgcucucagccagggcacgacccugagagggcggcaugccaacggaacaauccacgaucgcucccccuuuagagcccuuaucagcugggagaugggccaggcuccuucuccguacaaugcccggguugaaugcauuggcugguccagcaccucuugucaugacgggaucucccgcaugagcauuugcaucucuggacccaacaauaacgcuuccgccguggucugguauggcgggagaccugugacagagauucccagcugggcgggaaauauccugcggacccaagaauccgaguguguuugccacaagggcaucuguccuguggucaugacggaugggcccgccaacaaucgcgcugccacaaagauuaucuacuucaaagagggaaagauucagaaaaucgaggaacucaagggcaacgcucagcacauugaagagugcucuuguuauggcgccgcggggaugaucaaaugcaucugcagagacaauuggaagggagccaaccggccggugauuaccaucgauccugaaaugaugacacauaccagcaaguaccuguguuccaaaauucuuaccgacacaagccgccccaaugauccuacgucuggcaacugcgacgcucccaucaccgggggaucccccgauccuggcgugaagggguuugccuuccuggacggagagaacagcuggcucggcagaacaauuucuaaagacagccgguccggcuaugagaugcugaaggucccgaaugcugaaaccgauacacagucugggcccaucagcuaccaaaccauuguuaacaaucagaacugguccggauacagcggcgccuuuaucgacuauugggccaauaaagaguguuucaacccuugcuuuuacguggaacugauccgcgggagacccaaggagucuuccgugcucuggacgagcaauucuauugucgcucuguguggaucccgggaaagacuuggcagcugguccuggcacgauggggcggagaucauuuauuucaaauga

SEQ ID NO: 216512 - RNA, 1410 nt, Artificial Sequence
  derived and/or modified CDS sequence (opt5) from neuraminidase__InfluenzaA__AHJ57992
augaaccccaaucagaagaucauuaccaucggcagcgugucccugacaauugccacggucucuuuccucaugcaaaucgcuauucugaccacaaccguuacacuucacuuuaaacauaacgagugcaauaugccuccgaagaaccaggugaugagcugugaacccaucaucauugagagaaauaucaccgaaauuguguaccugaacaauacaaccgucgagaaagaaaucugcccuaaggugguugaguaucggaacugguccaaaccccaguguaagauuacgggguucgccccuuuuucuaaggacaauagcauccgccucuccgcgggaggcgauauuugggugaccagagagcccuacgucucuugcgggcugggaaaauguuaucaguucgcucuuggccaagggacaacccuggacaacagccacuccaauggaacaauccaugaucggaucccucaccgcacccuccugaugaacgaacugggcgugccguuucaucucggcacgaagcagguuugcauugccuggucuagcuccagcugucacgacgggagagccuggcugcacaucugcauuacaggagaugaccggaaugcuaccgccucuuucaucuacgauggcaugcuuguggacuccauugggagcuggucuaaaaacauccugcgcacacaggaguccgaaugugucugcaucaauggaaccugugcuguggugaugaccgauggcagcgccuccggggucgcggacacacggauucucuuuaucagagagggaaagauuguucauaucucuccccugagcggcuccgcccagcacauugaggaaugcagcugcuauccucgcuaccccgaugugagaugugugugccgggacaacuggaaaggcucuaaccgcccugucaucaauaucaacauggcugauuauuccauugacagcaauuacguguguucugggcuuguuggagacacgcccagaaacgaugacaauagcuccucuagcaacugccgggauccgaauaacgagcgcggcaauccuggggugaagggaugggccuucgacgauggcaacgacgucuggauggggagaaccaucaaucgggauuccagaagcggauacgaaacauuucgcgugauuggcggcuggaccacagcuaacucuaagucccaaaucaaucggcagguuauuguggacaacaauaacuggagcggguauucuggagucuucuccguggagggcaaaagcuguaucaacagaugcuuuuacgucgaacugauucgcgggcggccccaggagccuagagugugguggaccuccaauucuaucguuguguucuguggaacgagcggcacauaugggaccggcuccuggcccgauggagccaacaucaauuuuaugcccauuuga

SEQ ID NO: 216513 - RNA, 1413 nt, Artificial Sequence
  derived and/or modified CDS sequence (opt5) from neuraminidase__InfluenzaA__AHJ58004
augaaccccaaucagaagauuaccugcaucagcgccacaggcgugacgcuguccgucguuucucuccugaucgggauugcuaaccuuggacugaauaucggccuccacuacaaagugagcgacuccucuaacauuaauaucccuaacaugaaugagaccaacccgacaaccacaaucauuaauaaccauacccaaaauaacuucaagaauaucacaaacauuaucgugaauaaaaacgaagaggggaccuuucugaaccuuacgaagccccugugugaagucaauagcuggcacauucucuccaaagauaacgccaucagaauuggagaggacgcgcauauccuggugacccgggaaccuuaucugucuugcgauccccagggcugucgcauguucgcucucagccaggggacaacccugagaggacggcacgccaauggcacaauccaugaccgcuccccuuuuagagcccuuauuagcugggagaugggccaggcucccucuccuuacaacgcccggguugagugcaucgggugguccagcaccucuugucacgauggaauuucccgcaugagcaucugcauuucuggcccgaauaacaaugcuuccgccguggucugguauagagggcggcccgugacggaaaucccuagcugggcgggaaacauccugcgcacacaagaguccgaauguguuugccacaagggcauuugucccguggucaugaccgacgggccugccaauaacagagcugccacaaagaucauuuacuucaaagagggaaagauccagaaaauugaggaacucaagggcaaugcucagcauaucgaggaaugcucuuguuauggcgccgcggggaugaucaaaugcauuugccgggauaacuggcgcggagccaauagacccgugaucaccauugacccggagaugaugacccacacaagcaaguaccuguguuccaagauccuuacggauaccagccggccuaacgaccccacaaauggcaacugcgaugaaccuauuaccgggggaucucccgaccccggcgugaaaggguuugcuuuccuggauggagagaacuccuggcucggccgcacaaucagcaaggacucuagaagcggcuaugagaugcugaaagucccuaaugccgaaaccgacacgcaguccgggccgacaucuuaccaaauuaucguuaacaaucagaacuggagcggauacuccggcgcuuuuaucgauuauugggccaauaaggaguguuucaaccccugcuuuuacguggaacugauucgggggagaccuaaagagagcucugugcucuggaccuccaauagcaucgucgcccuguguggaucucgcgaacggcuuggcuccuggagcuggcaugacggggcugagauuaucuauuucaaguga

SEQ ID NO: 216514 - RNA, 1413 nt, Artificial Sequence
  derived and/or modified CDS sequence (opt5) from neuraminidase__InfluenzaA__AHJ58016
augaaccccaaucagaagauuaccugcaucagcgccacaggcaugacgcuguccguggucucuaugcucaucgggauugcuaaccugggacuuaauaucggccugcacuacaaaguuagcgacuccaccaacauuaauaucccuaagaugaacgagacaaauccgaccacaaccaucauuaacaaucauccccaaaacaauuucacaaacaucaccaauauuaucgugaacaaaaaugaagaggaaaacuuucucaaccugacgaagccucuuugugaggucaauucuuggcacauucugagcaaagauaacgccaucagaauuggggaaaaugcgcauauccucgugacccgggagcccuaucuguccugcgacccucagggaugucgcauguucgcucugucucagggcacaacccucagagggcggcacgccaacggaacaauccaugaucgcagccccuuuagagcccugauuuccugggagaugggccaggcuccuagcccguacaaugcccggguggaaugcaucggcuggucuuccaccagcugucacgacgggauuucucgcauguccaucugcauuagcggacccaacaauaacgcuucugccguugugugguauggcgggagaccugucacggagauccccuccugggcgggaaauauccuucggacacaagaaagcgagugugugugccacggcgggauuuguccuguugugaugaccgauggacccgccaacaaucgcgcugagacaaagaucauuuacuucaaggaaggcaaaauccagaagauugaggaacugaaaggcaacgcccagcauaucgaggaaugcuccuguuauggggcuucuggaaugaucaagugcauuugcagagacaauuggaaaggcgccaaccggccggucaucaccauugauccugagaugaugacccacacaagcaaguaccucuguuccaagauccugacggacaccagccgccccaaugauccuacaaacgggaacugcgacgcgcccauuaccggaggcucucccgauccuggggugaaaggauuugccuuccuugacggcaaaaauuccuggcugggcagaacaaucagcaaggauucucggagcggguaugagaugcucaaggugccgaacgcugaaaccgacacgcaguccggagccauuucucaucaaaucaucgucaauaaccagaauuggagcggcuacuccggggcuuuuauugacuacugggccaacaaagaguguuucaaucccugcuuuuauguugaacugauccgcggaagaccuaaggagagcucugugcuguggacauccaacagcauuguggcccucuguggcucucgggaaagacugggguccuggagcuggcacgauggcgcugagaucauuuaccuuaaauga

SEQ ID NO: 216515 - RNA, 1413 nt, Artificial Sequence
  derived and/or modified CDS sequence (opt5) from neuraminidase__InfluenzaA__AHJ58028
augaaccccaaucagaagauuaccugcaucagcgccacaggcaugacgcuguccguggucucuaugcucaucgggauugcuaaccugggacuuaauaucggccugcacuacaaaguuagcgacuccaccaacauuaauaucccuaagaugaacgagacaaauccgaccacaaccaucauuaacaaucauccccaaaacaauuucacaaacaucaccaauauuaucgugaacaaaaaugaagaggaaaacuuucucaaccugacgaagccucuuugugaggucaauucuuggcacauucugagcaaagauaacgccgugagaaucggggaagacgcgcauauucucgugacccgggagcccuaucuguccugcgauccucagggaugucgcauguucgcucugucucagggcacaacccucagagggcggcacgccaauggaacaauccaugaccgcagccccuuuagagcccugaucuccugggagaugggccaggcuccuagcccguacaacacccggguugaaugcauuggcuggucuuccacgagcugucacgaugggaucucucgcauguccauuugcaucagcggacccaauaacaaugccucugcuguggucugguauagaggccggccugugacagagauucccuccugggccgggaacauccuucgcacccaagaaagcgaguguguuugccacaagggaaucuguccuguggucaugacagacggccccgcgaauaacagagccgagaccaagauuaucuacuucaaagaagggaagauucagaaaaucgaggaacuggagggaaaugcucagcauauugaagagugcuccuguuauggcaccgccggcaugaucaagugcaucugccgggauaacuggcgcggggcuaauagaccggugauuacaaucgacccugagaugaugacgcacaccucucgguaccucuguagcaaaauucugacagauaccucccgccccaacgacccuacaaauggaaacugcgaugcccccaucaccggcgggagccccgacccuggagugaagggcuuugcguuccuugaugggaagaacucuuggcugggaagaacgauuuccaaagacagccggucuggcuaugaaaugcucaaggucccgaaugccgagacagacauccagagcggccccaccuccaaccaaauuaucguuaauaaccagaauuggucuggguacagcggagcuuuuaucgauuacugggccaacaaagaauguuucaauccuugcuuuuauguggagcugauuagaggccgccccaaggaauccaacgugcuguggaccagcaauucuaucgucgcucucugugggucccgggagagacugggaagcuggucuuggcaugacggcgccgagauuaucuacuucaaauga

SEQ ID NO: 216516 - RNA, 1410 nt, Artificial Sequence
  derived and/or modified CDS sequence (opt5) from neuraminidase__InfluenzaA__AHJ58040
augaaccccaaucagaagaucauuaccgugggcagcgucucccuggccaucgcuacaauuugccuccugaugcaaaucgccauucuugcgacgaccguuacacugcacuucaaacagaacgaguguaauaucccuucuaagaaccaggugaugccgugcgaacccaucauuaucgagagaaauauuaccgaaguggucuaccucaacaauacaaucauugagaaagaaaucuguccuaaggugguugaguaucggaacuggagcaaaccccagugccaaauuaccggguuugcuccuuucuccaaggacaauucuauccgccugagcgccggaggcgauaucugggugacaagagagcccuacgucuccuguucuccuagcaagugcuaucaguuugcccuugggcagggaaccacgcuggacaacucccauagcaauggcaccauucacgaucggaucccgcaucgcacacuccugaugaacgaacugggggugcccuuccaccucggaaccaaacagguuuguauugcuuggucuuccagcucuugccaugacggcagagccuggcugcacguguguaucacaggcgaugaccggaaugcuaccgccuccuuuauuuacaacgggaugcuugucgauagcaucucuuccuggagccgcaauauccugagaacgcaagaguccgaaugcguguguauuaacggaacaugcaccgugaucaugacagacggcucugcgagcggggucgccgauacccggauucucuucauccgcgagggaaagauuguucacguguccccucugagcggcucugcucagcauaucgaggaaugcuccuguuaucccagauacccugacgugcggugcgucugucgcgauaacuggaaagggagcaauagacccgugguugacaucaacauggccgauuauucuauugacagccacuacgugugcuccggacuugucggcgacaccccgcggaaugaugacucuagcuccagcucuaacuguaaggauccuaauaacgagcgcggcaaucccggggugaaaggaugggcuuuugacgauggcaacgacguuuggauggggagaacaaucucccgggauagcagaucuggauacgaaacguuccgcgugauuggcggguggaccacagccaauuccaagagccagaucaaccggcaggucauuguggacaauaacaauugguccggauauucuggcgucuuuagcguggagggcaaguccugcaucaacagauguuucuacguugaacugauucgcgggcggccucaagagaccagagugugguggacaucuaauagcaucgucguguuuugcggaaccuccggcacguaugggacaggaagcuggcccgauggcgcgaacaucaacuucaugcccauuuga

SEQ ID NO: 216517 - RNA, 1410 nt, Artificial Sequence
  derived and/or modified CDS sequence (opt5) from neuraminidase__InfluenzaA__AHJ58052
augaaccccaaucagaagaucauuaccaucggcagcgugucccugacaauugccacggucucuuuccucaugcaaaucgcuauucugaccacaaccguuacacuucacuuuaaacauaacgagugcaauaugccuccgaagaaccaggugaugagcugugaacccaucaucauugagagaaauaucaccgaaauuguguaccugaacaauacaaccgucgagaaagaaaucugcccuaaggugguugaguaucggaacugguccaaaccccaguguaagauuacgggguucgccccuuuuucuaaggacaauagcauccgccucuccgcgggaggcgauauuugggugaccagagagcccuacgucucuugcgggcugggaaaauguuaucaguucgcucuuggccaagggacaacccuggacaacagccacuccaauggaacaauccaugaucggaucccucaccgcacccuccugaugaacgaacugggcgugccguuucaucucggcacgaagcagguuugcauugccuggucuagcuccagcugucacgacgggagagccuggcugcacaucugcauuacaggagaugaccggaaugcuaccgccucuuucaucuacgauggcaugcuuguggacuccauugggagcuggucuaaaaacauccugcgcacacaggaguccgaaugugucugcaucaauggaaccugugcuguggugaugaccgauggcagcgccuccggggucgcggacacacggauucucuuuaucagagagggaaagauuguucauaucucuccccugagcggcuccgcccagcacauugaggaaugcagcugcuauccucgcuaccccgaugugagaugugugugccgggacaacuggaaaggcucuaaccgcccugucaucgauaucaauauggcugacuauuccauugacagcaacuacguguguucugggcuuguuggagauacgcccagaaaugacgauaacagcuccucuagcaauugccgggacccgaacaaugagcgcggcaacccuggggugaagggaugggccuucgaugacggcaaugaugucuggauggggagaaccaucaaccgggacuccagaagcggauacgaaacauuucgcgugauuggcggcuggaccacagcuaauucuaagucccaaaucaaccggcagguuauuguggauaauaacaauuggagcggguauucuggagucuucuccguggagggcaaaagcuguaucaacagaugcuuuuacgucgaacugauucgcgggcggccccaggagccuagagugugguggaccuccaacucuaucguuguguucuguggaacgagcggcacauaugggaccggcuccuggcccgacggagccaauaucaacuuuaugcccauuuga

SEQ ID NO: 216518 - RNA, 1413 nt, Artificial Sequence
  derived and/or modified CDS sequence (opt5) from neuraminidase__InfluenzaA__AHJ58064
augaaccccaaucagaagauuaccugcaucagcgccacaggcaugacgcuguccguggucucucuccugaucgggauugcuaaccuuggacugaauaucggccuccacuacaaaguuagcgacuccaccaacauuaauaucccuaacaugaaugagacaucuccgaccacaaccaucauuaacaaucauccccaaaacaauuucacaaacaucaccaauauuaucgugaacaagaaugaagaggaaaacuuucugaaccuuacgaaaccucugugugaggugaauagcuggcacauucucuccaaggauaacgccaucagaauuggggaaaaugcgcauauccuggucacccgggagcccuaucugucuugcgacccucagggaugucgcauguucgcucucagccagggcacaacccugagagggcagcacgccaacggaacaauccaugaucggucccccuuucgcgcccuuauuagcugggagaugggccaagcuccuucuccguacaaugccagaguggaaugcaucggcugguccagcaccucuugucacgacgggauuucccggaugagcaucugcauuucuggacccaacaauaacgcuuccgccguugugugguauggcgggcgcccugucacggagauccccagcugggcgggaaauauccugagaacacaggaauccgagugugugugccacggcgggauuuguccuguugugaugaccgauggacccgccaacaaucgggcugagacaaaaaucauuuacuucaaggaaggcaagauccagaaaauugaggaacucaagggcaacgcccagcauaucgaggaaugcucuuguuauggggcuagcggaaugaucaaaugcauuugccgcgacaauuggaagggcgccaacagaccggucaucaccauugauccugagaugaugacccacacauccaaauaccuguguagcaagauccuuacggacaccucucggcccaaugauccuauuaacgggaacugcgacgcgcccaucacaggaggcucccccgauccuggggugaagggauuugccuuccuggacggcgagaauagcuggcucggccgcaccauuucuaaagauagcagauccggguaugaaaugcugaaggugccgaacgcugagacagacacccaaucuggagccaucagccaucagaugaucgucaauaaccagaauugguccggcuacagcggggcuuuuauugacuacugggccaacaaagaauguuucaaucccugcuuuuauguugagcugauccggggacgcccuaaggaaucuuccgugcucuggacgagcaacucuauuguggcccuguguggcuccagagagcggcuugggagcugguccuggcacgauggcgcugagaucauuuacuucaaauga

SEQ ID NO: 216519 - RNA, 1401 nt, Artificial Sequence
  derived and/or modified CDS sequence (opt5) from neuraminidase__InfluenzaA__AHJ58075
augaaccccaaucagaagaucauugccaucggcagcgugucccugaccauugcuaucauuugcuuccuccugcaaaucgccauccuuacaacgaccaugacacugcacuuuagacagaacgaguguucuaauccuagcaacaaucaggucguuccgugcgaacccauuaucauugagcggaacaccgugcaucucaauuccacaaccaucgaaaaagagauuuguccuaagguggcggaauacaaaaacuggucuaagccccagugccaaaucacaggguucgcuccuuuuagcaaagacaauuccauucgccugucugccggaggcgauaucugggucaccagagagcccuaugugagcuguucccuugggaagugcuaccaguucgcccugggacagggcacgacccucaagaacaaacacagcaaugggacaacccaugaccggaucccucaccgcacacugcugaugaacgagcucggaguuccguuucaucugggcaccaaacagguguguauugcuuggucuuccagcucuugccacgauggcaaggccuggcuucacaucugugucacgggggacgauaagaaugcuacagccuccauuaucuaugacggaaugcugguggauagcauuggcucuugguccaaaaacauccucagaacccaagaaagcgagugcguuuguaucaaugggacaugcgcgguggucaugaccgacggauccgccucuggcaaggcugauacccggauucuguucauccgcgaagggaagauuaucaacauuagcccccuuuccggaagcgcccagcauguggaggagugcucuuguuacccuagauaucccgaagugcggugcgucugucgcgacaacuggaaaggcuccaauagaccuguucuguacaucaacauggcugauuauagcaucgagucuagcuacgugugcuccggccucgugggggacacaccccgggaugacgacucuagcuccagcucuaauugucgcgauccgaacaaugaaagaggagccccuggcgucaaggggugggcguuugacgauggaaacgacauuuggaugggccggacgaucaaauccgauagccgcucuggguacgagaccuucagagugguuaauggauggacaaccgccaacuccaagagccagauuaauagacaggugaucgucgacuccgauucuuggagcggcuauuccggcaucuuuucuguggaagggaaaaacugcauuaaucgguguuucuacguugagcugauucgcggacggccccaagagacaagagugugguggaccagcaacuccaucaucgucuuuugcggcacgagcgggacauauggaaccggcucuuggccugacggggcuaauauuaacuucaugcccaucuga

SEQ ID NO: 216520 - RNA, 1413 nt, Artificial Sequence
  derived and/or modified CDS sequence (opt5) from neuraminidase__InfluenzaA__AHJ58087
augaaccccaaucagaagauuaccugcaucagcgccacaggcaugacgcuguccguggucucucuccugaucgggauugcuaaccuuggacugaauaucggccuccacuacaaaguuagcgacuccaccaacauuaauaucccuaacaugaaugagacaucuccgaccacaaccaucauuaacaaucauccccaaaacaauuucacaaacaucaccaauauuaucgugaacaagaaugaagaggaaaacuuucugaaccuuacgaaaccucugugugaggugaauagcuggcacauucucuccaaggauaacgccaucagaauuggggaaaaugcgcauauccuggucacccgggagcccuaucugucuugcgacccucagggaugucgcauguucgcucucagccagggcacaacccugagagggcagcacgccaacggaacaauccaugaucggucccccuuucgcgcccuuauuagcugggagaugggccaagcuccuucuccguacaaugccagaguggaaugcaucggcugguccagcaccucuugucacgacgggauuucccggaugagcaucugcauuucuggacccaacaauaacgcuuccgccguugugugguauggcgggcgcccugucacggagauccccagcugggcgggaaauauccugagaacacaggaauccgagugugugugccacggcgggauuuguccuguugugaugaccgauggacccgccaacaaucgggcugagacaaaaaucauuuacuucaaggaaggcaagauccagaaaauugaggaacucaagggcaacgcccagcauaucgaggaaugcucuuguuauggggcuagcggaaugaucaaaugcauuugccgcgacaauuggaagggcgccaacagaccggucaucaccauugauccugagaugaugacccacacauccaaauaccuguguagcaagauccuuacggacaccucucggcccaaugauccuauuaacgggaacugcgacgcgcccaucacaggaggcucccccgauccuggggugaagggauuugccuuccuggacggcgauaauagcuggcucggccgcaccauuucuaaagacagcagauccggguaugagaugcugaaggugccgaacgcugaaacagacacccaaucuggagccaucagccaucagaugaucgucaauaaccagaauugguccggcuacagcggggcuuuuauugauuacugggccaacaaagaguguuucaaucccugcuuuuauguugaacugauccggggacgcccuaaggagucuuccgugcucuggacgagcaacucuauuguggcccuguguggcuccagagaacggcuugggagcugguccuggcacgacggcgcugagaucauuuacuucaaauga

SEQ ID NO: 216521 - RNA, 1410 nt, Artificial Sequence
  derived and/or modified CDS sequence (opt5) from neuraminidase__InfluenzaA__AHL80721
augaaccccaaucagaagaucauuaccaucggcagcgugugcaugacaauugggauggccaaccugauccuccaaauuggaaauaucaucuccauuuggaucucucacagcauucagcugggcaaccagaaucagaucgagacguguaaccaauccgucauuaccuacgaaaauaacacauggguuaaucagaccuaugugaacaucucuaauacaaacuucgcugccgggcagagcguggucuccgugaaacuugcgggaaauucuagccugugcccuguuuccggcugggcuauuuacagcaaggacaacucuaucagaaucggguccaaaggagauguguuugucauucgggagccguucaucagcuguucuccccucgaaugccgcaccuuuuuccugacacagggcgcccuucugaaugacaagcauuccaacggcaccauuaaagauagaagcccuuaucggacgcucaugucuugucccaucggggaggugccuucccccuacaacagccgcuuugaauccguugccuggucugcuagcgccugccacgacggaauuaauuggcugaccaucggcaucuccgggccugauaacggagcuguggccguccugaaguauaauggcauuaucacagacaccauuaagagcuggagaaacaauauccuccggacacaagagucugagugugcgugcgugaacggguccuguuucaccgugaugacggauggaccgagcgacggccaggccucuuacaaaauuuuucgcaucgaaaagggcaaaaucgucaagagcguugagaugaaugcucccaacuaucauuacgaagagugcuccuguuacccugauucuagcgagauuacaugcgugugcagagacaauuggcacggguccaaccggcccugggugagcuucaaucagaaccuggaauaucagaucggauacauuuguucuggcaucuuuggggauaauccucgccccaacgacaaaaccggauccugcggcccggucagcucuaauggggccaacggagugaagggcuucuccuuuaaguauggcaacgggguuuggauuggaagaacaaaaagcaucuccucucggaagggcuucgagaugauuugggauccuaauggguggaccggaaccgacaacaauuuuagcaucaaacaagacguggucggcaucaacgaaugguccggguacucuggcagcuucgugcagcaucccgagcuuacaggacuggauuguauucgcccuugcuucuggguugaacucaucagaggccggcccaaggagaauacgauuuggaccuccgggagcucuaucuccuuuuguggagugaacagcgacacagucggcuggucuuggcccgauggggcugagcugccuuucaccauugacaaauga

SEQ ID NO: 216522 - RNA, 1410 nt, Artificial Sequence
  derived and/or modified CDS sequence (opt5) from neuraminidase__InfluenzaA__AHL80732
augaaccccaaucagaagaucauuaccaucggcagcgugugcaugacaauugggauggccaaccugauccuccaaauuggaaauaucaucuccauuuggaucucucacagcauucagcugggcaaccagaaucagaucgagacguguaaccaauccgucauuaccuacgaaaauaacacauggguuaaucagaccuaugugaacaucucuaauacaaacuucgcugccgggcagagcguggucuccgugaaacuugcgggaaauucuagccugugcccuguuuccggcugggcuauuuacagcaaggacaacucuaucagaaucggguccaaaggagauguguuugucauucgggagccguucaucagcuguucuccccucgaaugccgcaccuuuuuccugacacagggcgcccuucugaaugacaagcauuccaacggcaccauuaaagauagaagcccuuaucggacgcucaugucuugucccaucggggaggugccuucccccuacaacagccgcuuugaauccguugccuggucugcuagcgccugccacgacggaauuaauuggcugaccaucggcaucuccgggccugauaacggagcuguggccguccugaaguauaauggcauuaucacagacaccauuaagagcuggagaaacaauauccuccggacacaagagucugagugugcgugcgugaacggguccuguuucaccgugaugacggauggaccgagcgacggccaggccucuuacaaaauuuuucgcaucgaaaagggcaaaaucgucaagagcguugagaugaaugcucccaacuauuacuacgaagagugcuccuguuauccugauucuagcgagauuacaugcgugugcagagacaauuggcauggguccaaccggcccugggugagcuucaaucagaaccuggaauaccagaucggauauauuuguucuggcaucuuuggggauaauccucgccccaacgacaaaaccggauccugcggcccggucagcucuaauggggccaacggagugaagggcuucuccuuuaaguacggcaacgggguuuggauuggaagaacaaaaagcaucuccucucggaauggcuucgagaugauuugggauccuaacggguggaccggaaccgacaauaacuuuagcaucaagcaagacaucgugggcauuaaugaaugguccggguauucuggcagcuucguccagcaccccgagcuuacaggacuggauuguauccgcccuugcuucuggguggaacucauuagaggccggcccaaagagaacacgaucuggaccuccgggagcucuauuuccuuuuguggaguuaauagcgacacagugggcuggucuuggcccgauggggcugagcugccuuucaucaucgacaaguga

SEQ ID NO: 216523 - RNA, 1410 nt, Artificial Sequence; identical to SEQ ID NO: 208810
  derived and/or modified CDS sequence (opt5) from neuraminidase__InfluenzaA__AHL80743

SEQ ID NO: 216524 - RNA, 1410 nt, Artificial Sequence
  derived and/or modified CDS sequence (opt5) from neuraminidase__InfluenzaA__AHL80754
augaaccccaaucagaagaucauuaccaucggcagcgugugcaugacaauugggauggccaaccugauccuccaaauuggaaauaucaucuccauuuggaucucucacagcauucagcugggcaaccagaaucagaucgagacguguaaccaauccgucauuaccuacgaaaauaacacauggguuaaucagaccuaugugaacaucucuaauacaaacuucgcugccgggcagagcguggucuccgugaaacuugcgggaaauucuagccugugcccuguuuccggcugggcuauuuacagcaaggacaacucuaucagaaucggguccaaaggagauguguuugucauucgggagccguucaucagcuguucuccccucgaaugccgcaccuuuuuccugacacagggcgcccuucugaaugacaagcauuccaacggcaccauuaaagauagaagcccuuaucggacgcucaugucuugucccaucggggaggugccuucccccuacaacagccgcuuugaauccguugccuggucugcuagcgccugccacgacggaauuaauuggcugaccaucggcaucuccgggccugauaacggagcuguggccguccugaaguauaauggcauuaucacagacaccauuaagagcuggagaaacaauauccuccggacacaagagucugagugugugugcgugaacggguccuguuucaccgucaugacggauggaccgagcgacggccaggcgucuuacaaaauuuuucgcaucgaaaagggcaaaaucguuaagagcguggagaugaaugcccccaacuaucauuacgaagagugcuccuguuacccugauucuagcgagauuacaugcgugugcagagacaauuggcacggguccaaccggcccugggucagcuucaaucagaaccuggaauaucagaucggauacauuuguucuggcaucuuuggggauaauccucgccccaacgacaaaaccggauccugcggcccggugagcucuaauggggcuaacggaguuaagggcuucuccuuuaaguauggcaacgggguguggauuggaagaacaaaaagcaucuccucucggaauggcuucgagaugauuugggauccuaacggguggaccggaaccgacaauaacuuuagcaucaagcaagacaucgucggcauuaaugaaugguccggguacucuggcagcuucgugcagcaucccgagcuuacaggacuggauuguauccgcccuugcuucuggguugaacucauuagaggccggcccaaagagaacacgaucuggaccuccgggagcucuauuuccuuuuguggagugaauagcgacacagucggcuggucuuggcccgauggggccgagcugccuuucaccaucgacaaguga

SEQ ID NO: 216525 - RNA, 1410 nt, Artificial Sequence; identical to SEQ ID NO: 208810
  derived and/or modified CDS sequence (opt5) from neuraminidase__InfluenzaA__AHL80765

SEQ ID NO: 216526 - RNA, 1410 nt, Artificial Sequence; identical to SEQ ID NO: 208810
  derived and/or modified CDS sequence (opt5) from neuraminidase__InfluenzaA__AHL80776

SEQ ID NO: 216527 - RNA, 1410 nt, Artificial Sequence; identical to SEQ ID NO: 208810
  derived and/or modified CDS sequence (opt5) from neuraminidase__InfluenzaA__AHL80787

SEQ ID NO: 216528 - RNA, 1410 nt, Artificial Sequence
  derived and/or modified CDS sequence (opt5) from neuraminidase__InfluenzaA__AHL80798
augaaccccaaucagaagaucauuaccaucggcagcgugugcaugacaauugggauggccaaccugauccuccaaauuggaaauaucaucuccauuuggaucucucacagcauucagcugggcaaccagaaucagaucgagacguguaaccaauccgucauuaccuacgaaaauaacacauggguuaaucagaccuaugugaacaucucuaauacaaacuucgcugccgggcagagcguggucuccgugaaacuugcgggaaauucuagccugugcccuguuuccggcugggcuauuuacagcaaggacaacucuaucagaaucggguccaaaggagauguguuugucauucgggagccguucaucagcuguucuccccucgaaugccgcaccuuuuuccugacacagggcgcccuucugaaugacaagcauuccaacggcaccauuaaagauagaagcccuuaucggacgcucaugucuugucccaucggggaggugccuucccccuacaacagccgcuuugaauccguugccuggucugcuagcgccugccacgacggaauuaauuggcugaccaucggcaucuccgggccugauaacggagcuguggccguccugaaguauaauggcauuaucacagacaccauuaagagcuggagaaacaauauccuccggacacaagagucugagugugcgugcgugaacggguccuguuucaccgugaugacggauggaccgagcgacggccaggccucuuacaaaauuuuucgcaucgaaaagggcaaaaucgucaagagcguugagaugaaugcucccaacuaucauuacgaagagugcuccuguuacccugauucuagcgagauuacaugcgugugcagagacaauuggcacggguccaaccggcccugggugagcuucaaucagaaccuggaauaucagaucggauacauuuguucuggcaucuuuggggauaauccucgccccaacgacaaaaagggauccugcggcccggucagcucuaauggggccaacggagugaagggcuucuccuuuaaauauggcaacgggguuuggauuggaagaaccaagagcaucuccucucggaauggcuucgagaugauuugggauccuaacggguggacaggaaccgacaauaacuuuagcgugaaacaagacaucgucggcaucaaugaaugguccggguacucuggcagcuucgugcagcaucccgagcuuaccggacuggauuguauucgcccuugcuucuggguugaacucaucagaggccggcccaaggagaacacaauuuggacguccgggagcucuaucuccuuuuguggagugaauagcgacaccgucggcuggucuuggcccgauggggcugagcugccuuucacaauugacaaauga

SEQ ID NO: 216529 - RNA, 1410 nt, Artificial Sequence; identical to SEQ ID NO: 208810
  derived and/or modified CDS sequence (opt5) from neuraminidase__InfluenzaA__AHL80809

SEQ ID NO: 216530 - RNA, 1410 nt, Artificial Sequence; identical to SEQ ID NO: 208810
  derived and/or modified CDS sequence (opt5) from neuraminidase__InfluenzaA__AHL80820

SEQ ID NO: 216531 - RNA, 1410 nt, Artificial Sequence; identical to SEQ ID NO: 208810
  derived and/or modified CDS sequence (opt5) from neuraminidase__InfluenzaA__AHL80831

SEQ ID NO: 216532 - RNA, 1410 nt, Artificial Sequence; identical to SEQ ID NO: 208810
  derived and/or modified CDS sequence (opt5) from neuraminidase__InfluenzaA__AHL80842

SEQ ID NO: 216533 - RNA, 1410 nt, Artificial Sequence; identical to SEQ ID NO: 210098
  derived and/or modified CDS sequence (opt5) from neuraminidase__InfluenzaA__AHL80853

SEQ ID NO: 216534 - RNA, 1410 nt, Artificial Sequence
  derived and/or modified CDS sequence (opt5) from neuraminidase__InfluenzaA__AHL80864
augaaccccaaucagaagaucauuaccaucggcagcgugugcaugacaauugggauggccaaccugauccuccaaauuggaaauaucaucuccauuuggaucucucacagcauucagcugggcaaccagaaucagaucgagacguguaaccaauccgucauuaccuacgaaaauaacacauggguuaaucagaccuaugugaacaucucuaauacaaacuucgcugccgggcagagcguggucuccgugaaacuugcgggaaauucuagccugugcccuguuuccggcugggcuauuuacagcaaggacaacucuaucagaaucggguccaaaggagauguguuugucauucgggagccguucaucagcuguucuccccucgaaugccgcaccuuuuuccugacacagggcgcccuucugaaugacaagcauuccaacggcaccauuaaagauagaagcccuuaucggacgcucaugucuugucccaucggggaggugccuucccccuacaacagccgcuuugaauccguugccuggucugcuagcgccugccacgacggaauuaauuggcugaccaucggcaucuccgggccugauaacggagcuguggccguccugaaguauaauggcauuaucacagacaccauuaagagcuggagaaacaauauccuccggacacaagagucugagugugcgugcgugaacggguccuguuucaccgugaugacggauggaccgagcgacggccaggccucuuacaaaauuuuucgcaucgaaaagggcaaaaucgucaagagcguugagaugaaugcucccaacuauuacuacgaagagugcuccuguuauccugauucuagcgagauuacaugcgugugcagagacaauuggcauggguccaaccggcccugggugagcuucaaucagaaccuggaauaccagaucggauauauuuguucuggcaucuuuggggauaauccucgccccaacgacaaaaagggauccugcggcccggucagcucuaauggggccaacggagugaagggcuucuccuuuaaauacggcaacgggguuuggauuggaagaaccaagagcaucuccucucggaauggcuucgagaugauuugggauccuaacggguggacaggaaccgacaauaacuuuagcaucaaacaagacaucgugggcauuaaugaaugguccggguauucuggcagcuucguccagcaccccgagcuuaccggacuggauuguauccgcccuugcuucuggguggaacucauuagaggccggcccaaggagaacacaaucuggacguccgggagcucuauuuccuuuuguggaguuaauagcgacaccgugggcuggucuuggcccgauggggcugagcugccuuucacaaucgacaaauga

SEQ ID NO: 216535 - RNA, 1410 nt, Artificial Sequence; identical to SEQ ID NO: 210098
  derived and/or modified CDS sequence (opt5) from neuraminidase__InfluenzaA__AHL80875

SEQ ID NO: 216536 - RNA, 1410 nt, Artificial Sequence; identical to SEQ ID NO: 210098
  derived and/or modified CDS sequence (opt5) from neuraminidase__InfluenzaA__AHL80886

SEQ ID NO: 216537 - RNA, 1410 nt, Artificial Sequence
  derived and/or modified CDS sequence (opt5) from neuraminidase__InfluenzaA__AHL80897
augaaccccaaucagaagaucauuaccaucggcagcgugugcaugacaauugggauggccaaccugauccuccaaauuggaaauaucaucuccauuuggaucucucacagcauucagcugggcaaccagaaucagaucgagacguguaaccaauccgucauuaccuacgaaaauaacacauggguuaaucagaccuaugugaacaucucuaauacaaacuucgcugccgggcagagcguggucuccgugaaacuugcgggaaauucuagccugugcccuguuuccggcugggcuauuuacagcaaggacaacucuaucagaaucggguccaaaggagauguguuugucauucgggagccguucaucagcuguucuccccucgaaugccgcaccuuuuuccugacacagggcgcccuucugaaugacaagcauuccaacggcaccauuaaagauagaagcccuuaucggacgcucaugucuugucccaucggggaggugccuucccccuacaacagccgcuuugaauccguugccuggucugcuagcgccugccacgacggaauuaauuggcugaccaucggcaucuccgggccugauaacggagcuguggccguccugaaguauaauggcauuaucacagacaccauuaagagcuggagaaacaauauccuccggacacaagagucugagugugcgugcauuaacggguccuguuucaccgugaugacggauggaccgagcgacggccaggccucuuacaaaaucuuucgcaucgaaaagggcaaaauugucaagagcguggagaugaaugcucccaacuaucauuacgaagagugcuccuguuacccugauucuagcgagaucacaugcguuugcagagacaauuggcacggguccaaccggcccugggugagcuucaaucagaaccuggaauaucagauuggauacaucuguucuggcauuuuuggggauaauccucgccccaacgacaaaaagggauccugcggcccggugagcucuaauggggccaacggagucaagggcuucuccuuuaaauauggcaacgggguguggaucggaagaaccaagagcauuuccucucggaauggcuucgagaugaucugggauccuaacggguggacaggaaccgacaauaacuuuagcaucaaacaagacauuguuggcaucaaugaaugguccggguacucuggcagcuucgugcagcaucccgagcuuaccggacuggauuguauucgcccuugcuucugggucgaacucaucagaggccggcccaaggagaacacaauuuggacguccgggagcucuaucuccuuuuguggagugaauagcgacaccguuggcuggucuuggcccgauggggcugagcugccuuucacaaucgacaaauga

SEQ ID NO: 216538 - RNA, 1410 nt, Artificial Sequence
  derived and/or modified CDS sequence (opt5) from neuraminidase__InfluenzaA__AHL80908
augaaccccaaucagaagaucauuaccaucggcagcgugugcaugacaauugggauggccaaccugauccuccaaauuggaaauaucaucuccauuuggaucucucacagcauucagcugggcaaccagaaucagaucgagacguguaaccaauccgucaccauucaugaaaauaacacauggguuaaucagaccuacgugaacaucucuaauacaaacuucgcugccgggcagagcguggucuccgugaaacuugcgggaaauucuagccugugcccuguuuccggcugggcuauuuauagcaaggacaacucuaucagaaucggguccaaaggagauguguuugucauucgggagccguucaucagcuguucuccccucgaaugccgcaccuuuuuccugacacagggcgcccuucugaaugacaagcacuccaacggcaccauuaaagauagaagcccuuaccggacgcucaugucuugucccaucggggaggugccuucccccuauaacagccgcuuugaauccguugccuggucugcuagcgccugccaugacggaauuaauuggcugaccaucggcaucuccgggccugauaacggagcuguggccguccugaaguacaauggcauuaucacagacaccauuaagagcuggagaaacaauauccuccggacacaagagucugagugugcgugcgugaacggguccuguuucaccgugaugacggauggaccgagcgacggccaggccucuuauaaaauuuuucgcaucgaaaagggcaaaaucgucaagagcguugagaugaaugcucccaacuacuauuacgaagagugcuccuguuacccugauucuagcgagauuacaugcgugugcagagacaauuggcacggguccaaccggcccugggugagcuucaaucagaaccuggaauaucagaucggauacauuuguucuggcaucuuuggggauaauccucgccccaacgacaaaaagggauccugcggcccggucagcucuaauggggccaacggagugaagggcuucuccuuuaaauauggcaacgggguuuggauuggaagaaccaagagcaucuccucucggaauggcuucgagaugauuugggauccuaacggguggacaggaaccgacaauaacuuuagcaucaaacaagacaucgugggcauuaaugaaugguccggguacucuggcagcuucguccagcaucccgagcuuaccggacuggauuguauccgcccuugcuucuggguggaacucauuagaggccggcccaaggagaacacaaucuggacguccgggagcucuauuuccuuuuguggaguuaauagcgacaccgugggcuggucuuggcccgauggggcugagcugccuuucacaaucgacaaauga

SEQ ID NO: 216539 - RNA, 1410 nt, Artificial Sequence
  derived and/or modified CDS sequence (opt5) from neuraminidase__InfluenzaA__AHL80919
augaaccccaaucagaagaucauuaccaucggcagcgugugcaugacaauugggauggccaaccugauccuccaaauuggaaauaucaucuccauuuggaucucucacagcauucagcugggcaaccagucccagaucgagacguguaaucaaucugucauuaccuacgaaaacaauacauggguuaaccagaccuaugugaauaucagcaacacaaauuucgcugccgggcaguccguggucucugugaaacuugcgggaaacagcucccugugcccuguuagcggcugggcuauuuacucuaaggacaauuccaucagaaucgggagcaaaggagauguguuugucauucgggagccguucaucucuuguagcccccucgaaugccgcaccuuuuuccugacacagggcgcccuucugaacgacaagcauuccaauggcaccauuaaagauagaucuccuuaucggacgcucauguccugucccaccggggaggugccuagccccuacaacucccgcuuugaaucuguugccuggagcgcuuccgccugccacgacggaaucaacuggcugacaauuggcaucagcgggccugauaauggagcuguggccguccugaaguauaacggcaucauuaccgacacaaucaagucuuggagaaauaacauucuccggacccaagaguccgagugugcgugcgugaaugggagcuguuucacgaucaugacagauggaccgucugacggccaggccagcuacaaaauuuuucgcaucgaaaagggcaaaaucgugaaguccgucgagaugaacgcucccaauuaucauuacgaagagugcucuuguuacccugauagcuccgagauuaccugcguuugcagagacaacuggcacgggagcaaucggcccugggugucuuucaaccagaaucuggaauaucagaucggauacauuuguuccggcaucuuuggggauaacccucgccccaaugacaaaacaggaagcugcggcccggugucuuccaacggggccaauggagucaagggcuucagcuuuaaguauggcaacgggguguggauuggaagaaccaaauccaucucuagccggaagggcuucgagaugauuugggauccuaacggguggaccggaacagacaauaacuuuuccaucaaacaagacaucguuggcauuaaugaauggucuggguacagcggcuccuucgugcagcaucccgagcuuacgggacuggauuguauccgcccuugcuucugggucgaacucauuagaggccggcccaaggagaacaccaucuggacaagcgggucuuccauuagcuuuuguggaguuaauucugacaccgugggcugguccuggcccgauggggcugagcugccuuucacaaucgacaaauga

SEQ ID NO: 216540 - RNA, 1410 nt, Artificial Sequence; identical to SEQ ID NO: 211590
  derived and/or modified CDS sequence (opt5) from neuraminidase__InfluenzaA__AHL80930

SEQ ID NO: 216541 - RNA, 1410 nt, Artificial Sequence; identical to SEQ ID NO: 211590
  derived and/or modified CDS sequence (opt5) from neuraminidase__InfluenzaA__AHL80949

SEQ ID NO: 216542 - RNA, 1410 nt, Artificial Sequence
  derived and/or modified CDS sequence (opt5) from neuraminidase__InfluenzaA__AHL80961
augaaccccaaucagaagaucauuaccaucggcagcgugugcaugacaauugggauggccaaccugauccuccaaauuggaaauaucaucuccauuuggaucucucacagcauucagcugggcaaccagaaucagaucgagacguguaaccaauccgucauuaccuacgaaaauaacacauggguuaaucagaccuaugugaacaucucuaauacaaacuucgcugccgggcagagcguggucuccgugaaacuugcgggaaauucuagccugugcccuguuuccggcugggcuauuuacagcaaggacaacucuaucagaaucggguccaaaggagauguguuugucauucgggagccguucaucagcuguucuccccucgaaugccgcaccuuuuuccugacacagggcgcccuucugaaugacaagcauuccaacggcaccauuaaagauagaagcccuuaucggacgcucaugucuugucccaucggggaggugccuucccccuacaacagccgcuuugaauccguugccuggucugcuagcgccugccacgacggaauuaauuggcugaccaucggcaucuccgggccugauaacggagcuguggccguccugaaguauaauggcauuaucacagacaccauuaagagcuggagaaacaauauccuccggacacaagagucugagugugcgugcgugaacggguccuguuucaccauuaugacggauggaccgagcgacggccaggccucuuacaaaaucuuucgcaucgaaaagggcaaaauugucaagagcguggagaugaaugcucccaacuaucauuacgaagagugcuccuguuacccugauucuagcgagaucacaugcguuugcagagacaauuggcacggguccaaccggcccugggugagcuucaaucagaaccuggaauaucagauuggauacaucuguucuggcauuuuuggggauaauccucgccccaacgacaaaaccggauccugcggcccggugagcucuaauggggccaacggagucaagggcuucuccuuuaaguauggcaacgggguguggaucggaagaacaaaaagcauuuccucucggaagggcuucgagaugaucugggauccuaauggguggaccggaaccgacaacaauuuuagcaucaaacaagacguugugggcauuaacgaaugguccggguacucuggcagcuucguccagcaucccgagcuuacaggacuggauuguauccgcccuugcuucuggguggaacucauuagaggccggcccaaggagaauacgaucuggaccuccgggagcucuauuuccuuuuguggaguuaacagcgacacagugggcuggucuuggcccgauggggcugagcugccuuucaccaucgacaaauga

SEQ ID NO: 216543 - RNA, 1410 nt, Artificial Sequence; identical to SEQ ID NO: 216542
  derived and/or modified CDS sequence (opt5) from neuraminidase__InfluenzaA__AHL80972

SEQ ID NO: 216544 - RNA, 1410 nt, Artificial Sequence; identical to SEQ ID NO: 211590
  derived and/or modified CDS sequence (opt5) from neuraminidase__InfluenzaA__AHL80983

SEQ ID NO: 216545 - RNA, 1410 nt, Artificial Sequence; identical to SEQ ID NO: 211590
  derived and/or modified CDS sequence (opt5) from neuraminidase__InfluenzaA__AHL80992

SEQ ID NO: 216546 - RNA, 1410 nt, Artificial Sequence; identical to SEQ ID NO: 211590
  derived and/or modified CDS sequence (opt5) from neuraminidase__InfluenzaA__AHL81004

SEQ ID NO: 216547 - RNA, 1410 nt, Artificial Sequence
  derived and/or modified CDS sequence (opt5) from neuraminidase__InfluenzaA__AHL81016
augaaccccaaucagaagaucauuaccaucggcagcgugucccugacaauuucuacgaucugcuucuuuaugcaaauugccauccucaucaccacagucacccugcacuucaaacaguacgaguuuaacagcccuccgaauaaccagguuaugcuuugugaacccacaauuaucgagagaaauauuaccgaaaucguguaucugacaaacaccacgauugagaaggaaaucugcccuaaacucgcugaguaccggaauugguccaagccccagugugacauuaccggguucgccccuuuuucuaaagauaacagcauccgccuguccgcgggaggcgacaucugggugacaagagagcccuaugucucuugcgauagcgacaaguguuaccaauucgcucuugggcagggaaccacacugaauaacgugcauuccaauaacaccguucgggaucgcacgccuuauagaacacuccugaugaaugaacugggcgugccguuucaccucgggaccaagcaggucugcauugccuggucuagcuccagcugucaugacggaaaagccuggcugcacgugugcaucacaggcgaugacaagaacgcuaccgccucuuucauuuacaauggccggcuuguugauuccguggucagcuggucuaaagagauccugcgcacccaggaauccgagugugugugcauuaacgggacauguacgguggucaugaccgacggaagcgcuuccggcaaggccgauacaaaaauccucuuuaucgaggaagggaagauuguucauaccucuacacugagcggauccgcgcaacacguggaggaaugcagcugcuaucccagauacccuggcgugcggugugucugccgcgacaacuggaaggggucuaauagacccaucguggauauuaacaucaaagaccacuccauuguuagcucuuacguguguagcggacuugucggcgacaccccucggaagaaugauuccucuagcuccagccauugccuggaccccaacaaugaggaaggcgggcacggagugaaaggcugggccuucgaugacgggaacgauguuuggaugggacgcacgaucaaugagacaucuagacucggcuaugagaccuuuaaggugaucgaagggugguccaacccgaaaagcaagcugcagauuaaucggcaggucaucguggaccgcggaaacagaucuggcuacuccggcauuuucagcgucgaggggaaauccuguaucaaucggugcuuuuauguggaacugauuagaggacgcaaggaggaaaccgagguucucuggacaucuaacagcaucguggucuucuguggcaccuccgggacauacggaacgggcucuuggccugauggggcugaccugaaucuuaugcccauuuga

SEQ ID NO: 216548 - RNA, 1410 nt, Artificial Sequence; identical to SEQ ID NO: 211590
  derived and/or modified CDS sequence (opt5) from neuraminidase__InfluenzaA__AHL81028

SEQ ID NO: 216549 - RNA, 1410 nt, Artificial Sequence; identical to SEQ ID NO: 211590
  derived and/or modified CDS sequence (opt5) from neuraminidase__InfluenzaA__AHL81040

SEQ ID NO: 216550 - RNA, 1410 nt, Artificial Sequence; identical to SEQ ID NO: 211590
  derived and/or modified CDS sequence (opt5) from neuraminidase__InfluenzaA__AHL81052

SEQ ID NO: 216551 - RNA, 1410 nt, Artificial Sequence; identical to SEQ ID NO: 216542
  derived and/or modified CDS sequence (opt5) from neuraminidase__InfluenzaA__AHL81064

SEQ ID NO: 216552 - RNA, 1410 nt, Artificial Sequence; identical to SEQ ID NO: 216542
  derived and/or modified CDS sequence (opt5) from neuraminidase__InfluenzaA__AHL81075

SEQ ID NO: 216553 - RNA, 1410 nt, Artificial Sequence
  derived and/or modified CDS sequence (opt5) from neuraminidase__InfluenzaA__AHL81086
augaaccccaaucagaagaucauuaccaucggcagcgugucccugacaauuucuacgaucugcuucuuuaugcaaauugccauccucaucaccacagucacccugcacuucaaacaguacgaguuuaacagcccuccgaauaaccagguuaugcuuuguaagcccacaauuaucgaaagaaauauuaccgagaucguguaucugacaaacaccacgauugaaaaagagaucugcccuaagcucgcugaauaccggaauugguccaaaccccagugugacauuaccggguucgccccuuuuucuaaggauaacagcauccgccuguccgcgggaggcgacaucugggugacaagagagcccuaugucucuugcgauccugacaaguguuaccaauucgcucuugggcagggaaccacacugaauaacgugcauagcaauaacaccguucgggaucgcacgccguauagaacacuccugaugaaugagcugggcgugcccuuucaccucgggaccaaacaggucugcauugccugguccagcagcuccugucaugacggaaaggccuggcugcacgugugcaucacaggcgaugacaaaaacgcuaccgccagcuucauuuacaauggccggcuuguugauucuguggucuccuggagcaaggaaauccugcgcacccaggagucugaaugugugugcauuaacgggacauguacgguggucaugaccgacggauccgcuagcggcaaagccgauacaaagauccucuuuaucgaggaggggaagauuguucauaccuccacacugucuggaagcgcgcaacacguggaagagugcuccugcuauccuagauaccccggcgugcggugugucugccgcgacaacuggaaagggagcaauagaccuaucguggauauuaacaucaaggaccacucuauuguuuccagcuacguguguucuggacuugucggcgacacgccccggaaaaaugauagcuccucuagcucccauugccuggacccgaacaaugaagagggcgggcacggagugaagggcugggccuucgaugacgggaacgauguuuggaugggacgcaccaucaaugaaacaagcagacucggcuaugagaccuuuaaagugaucgagggguggucuaacccuaaguccaaacugcagauuaaucggcaggucaucguggaccgcggaaacagaagcggcuacucuggcauuuucuccgucgaagggaagucuuguaucaaucggugcuuuuauguggagcugauuagaggacgcaaggaagagaccgaaguucucuggacauccaacucuaucguggucuucuguggcaccagcgggacauacggaacgggcuccuggcccgauggggcugaccugaaucuuaugccuauuuga

SEQ ID NO: 216554 - RNA, 1410 nt, Artificial Sequence
  derived and/or modified CDS sequence (opt5) from neuraminidase__InfluenzaA__AHL81098
augaaccccaaucagaagaucauuaccaucggcagcgugucccugacaauuucuacgaucugcuucuuuguccaaauugccauccucaucaccacaguuacccugcacuucaaacaguacgaguuuaacagcccuccgaauaaccaggugaugcuuugugaacccacaauuaucgagagaaauauuaccgaaaucguguaucugacaaacaccacgauugagaaggaaaucugcccuaaacucgcugaguaccggaauugguccaagccccagugugacauuaccggguucgccccuuuuucuaaagauaacagcauccgccuguccgcgggaggcgacaucugggucacaagagagcccuaugugucuugcgauccugacaaguguuaccaauucgcucuugggcagggaaccacacugaauaacguucauagcaauaacaccgugcgggaucgcacgccguauagaacacuccugaugaaugaacugggcguccccuuucaccucgggaccaaacaggugugcauugccugguccucuagcuccugucaugacggaaaggccuggcugcacguuugcaucacaggcgaugacaagaacgcuaccgccagcuucauuuacaauggccggcuuguggauucugucguguccuggagcaaagagauccugcgcacccaggaaucugagugugugugcauuaacgggacauguacggucguuaugaccgacggauccgcuagcggcaaggccgauacaaaaauccucuuuaucgaggaagggaagauugugcauaccuccacacugucuggaagcgcgcaacacguggaggaaugcuccugcuauccuagauaccccggcguccggugugugugccgcgacaacuggaaggggagcaauagaccuaucguugauauuaacaucaaagaccacucuauuguguccagcuacgucuguucuggacuugugggcgacacgccccggaagaaugauagcuccucuagcucccauugccuggacccgaacaaugaggaaggcgggcacggaguuaaaggcugggccuucgaugacgggaacgauguguggaugggacgcaccaucaaugagacaagcagacucggcuaugagaccuuuaaggucaucgaaggguggucuaacccuaaauccaagcugcagauuaaucgccaggugaucgucgaccggggaaacagaagcggcuacucuggcauuuucuccguggaggggaaaagcuguaucaaucggugcuuuuauguugaacugauuagaggacgcaaggaggaaaccgaggugcucuggacauccaacucuaucgucguguucuguggcaccagcgggacauacggaacgggcuccuggcccgauggggcugaccugaaucuuaugccuauuuga

SEQ ID NO: 216555 - RNA, 1410 nt, Artificial Sequence; identical to SEQ ID NO: 212781
  derived and/or modified CDS sequence (opt5) from neuraminidase__InfluenzaA__AHL81110

SEQ ID NO: 216556 - RNA, 1410 nt, Artificial Sequence; identical to SEQ ID NO: 212781
  derived and/or modified CDS sequence (opt5) from neuraminidase__InfluenzaA__AHL81121

SEQ ID NO: 216557 - RNA, 1410 nt, Artificial Sequence; identical to SEQ ID NO: 211590
  derived and/or modified CDS sequence (opt5) from neuraminidase__InfluenzaA__AHL81132

SEQ ID NO: 216558 - RNA, 1410 nt, Artificial Sequence; identical to SEQ ID NO: 211590
  derived and/or modified CDS sequence (opt5) from neuraminidase__InfluenzaA__AHL81144

SEQ ID NO: 216559 - RNA, 1410 nt, Artificial Sequence; identical to SEQ ID NO: 211590
  derived and/or modified CDS sequence (opt5) from neuraminidase__InfluenzaA__AHL81156

SEQ ID NO: 216560 - RNA, 1410 nt, Artificial Sequence; identical to SEQ ID NO: 213859
  derived and/or modified CDS sequence (opt5) from neuraminidase__InfluenzaA__AHL81168

SEQ ID NO: 216561 - RNA, 1410 nt, Artificial Sequence; identical to SEQ ID NO: 213859
  derived and/or modified CDS sequence (opt5) from neuraminidase__InfluenzaA__AHL81180

SEQ ID NO: 216562 - RNA, 1410 nt, Artificial Sequence; identical to SEQ ID NO: 211590
  derived and/or modified CDS sequence (opt5) from neuraminidase__InfluenzaA__AHL81192

SEQ ID NO: 216563 - RNA, 1410 nt, Artificial Sequence
  derived and/or modified CDS sequence (opt5) from neuraminidase__InfluenzaA__AHL81215
augaaccccaaucagaagaucauuaccaucggcagcgugucccugacaauuucuacgaucugcuucuuuaugcaaauugccauccucaucaccacagucacccugcacuucaaacaguacgaguuuaacagcccuccgaauaaccagguuaugcuuugugaacccacaauuaucgagagaaauauuaccgaaaucauguaucugacaaacaccacgauugagaaggaaaucugcccuaaacucgcugaguaccggaauugguccaagccccagugugacauuaccggguucgccccuuuuucuaaagauaacagcauccgccuguccgcgggaggcgacaucugggugacaagagagcccuaugugucuugcgauccugacaaguguuaccaauucgcucuugggcagggaaccacacugaauaacguccauagcaauaacaccgugcgggaucgcacgccguauagaacacuccugaugaaugaacugggcguucccuuucaccucgggaccaaacaggugugcauugccugguccucuagcuccugucaugacggaaaggccuggcugcacgucugcaucacaggcgaugacaagaacgcuaccgccagcuucauuuacaauggccggcuuguggauucuguuguguccuggagcaaagagauccugcgcacccaggaaucugagugugucugcauuaacgggacauguacgguggugaugaccgacggauccgcuagcggcaaggccgauacaaaaauccucuuuaucgaggaagggaagauuguccauaccuccacacugucuggaagcgcgcaacacguugaggaaugcuccugcuauccuagauaccccggcgugcggugugugugccgcgacaacuggaaggggagcaauagaccuaucgucgauauuaacaucaaagaccacucuauuguguccagcuacguuuguucuggacuugugggcgacacgccccggaagaaugauagcuccucuagcucccauugccuggacccgaacaaugaggaaggcgggcacggagucaaaggcugggccuucgaugacgggaacgauguguggaugggacgcaccaucaaugagacaagcagacucggcuaugagaccuuuaagguuaucgaaggguggucuaacccuaaauccaagcugcagauuaaucgccaggugaucgucgaccggggaaacagaagcggcuacucuggcauuuucuccguggaggggaaaagcuguaucaaucggugcuuuuaugucgaacugauuagaggacgcaaggaggaaaccgaggugcucuggacauccaacucuaucguuguguucuguggcaccagcgggacauacggaacgggcuccuggcccgauggggcugaccugaauuucaugccuauuuga

SEQ ID NO: 216564 - RNA, 1410 nt, Artificial Sequence
  derived and/or modified CDS sequence (opt5) from neuraminidase__InfluenzaA__AHL81227
augaaccccaaucagaagaucauuaccaucggcagcgugugcaugacaauugggauggccaaccugauccuccaaauuggaaauaucaucuccauuuggaucucucacagcauucagcugggcaaccagucccagaucgagacguguaaucaaucugucauuaccuacgaaaacaauacauggguuaaccagaccuaugugaauaucagcaacacaaauuucgcugccgggcaguccguggucucugugaaacuugcgggaaacagcucccugugcccuguuagcggcugggcuauuuacucuaaggacaauuccaucagaaucgggagcaaaggagauguguuugucauucgggagccguucaucucuuguagcccccucgaaugccgcaccuuuuuccugacacagggcgcccuucugaacgacaagcauuccaauggcaccauuaaagauagaucuccuuaucggacgcucauguccugucccaccggggaggugccuagccccuacaacucccgcuuugaaucuguugccuggagcgcuuccgccugccacgacggaaucaacuggcugacaauuggcaucagcgggccugauaauggagcuguggccguccugaaguauaacggcaucauuaccgacacaaucaagucuuggagaaauaacauucuccggacccaagaguccgagugugcgugcgugaaugggagcuguuucacgaucaugacagauggaccgucugacggccaggccagcuacaaaauuuuucgcaucgaaaagggcaaaaucgugaaguccgucgagaugaacgcucccaauuaucauuacgaagagugcucuuguuacccugauagcuccgagauuaccugcguuugcagagacaacuggcacgggagcaaucggcccugggugucuuucaaccagaaucuggaauaucagaucggauacauuuguuccggcaucuuuggggauaacccucgccccaaugacaaaacaggaagcugcggcccggugucuuccaacggggccaauggagucaagggcuucagcuuuaaguauggcaacgggguguggauuggaagaaccaaauccaucucuagccggaagggcuucgagaugauuugggauccuaacggguggaccggaacagacaauaacuuuuccaucaaacaagacaucauuggcaucaaugaauggucuggguacagcggcuccuucguucagcaucccgagcuuacgggacuggauuguauucgcccuugcuucuggguggaacucaucagaggccggcccaaggagaacaccauuuggacaagcgggucuuccaucagcuuuuguggagucaauucugacaccgugggcugguccuggcccgauggggcugagcugccuuucacaaucgacaaauga

SEQ ID NO: 216565 - RNA, 1410 nt, Artificial Sequence; identical to SEQ ID NO: 211590
  derived and/or modified CDS sequence (opt5) from neuraminidase__InfluenzaA__AHL81238

SEQ ID NO: 216566 - RNA, 1410 nt, Artificial Sequence; identical to SEQ ID NO: 211590
  derived and/or modified CDS sequence (opt5) from neuraminidase__InfluenzaA__AHL81250

SEQ ID NO: 216567 - RNA, 1410 nt, Artificial Sequence; identical to SEQ ID NO: 211590
  derived and/or modified CDS sequence (opt5) from neuraminidase__InfluenzaA__AHL81262

SEQ ID NO: 216568 - RNA, 1410 nt, Artificial Sequence; identical to SEQ ID NO: 211590
  derived and/or modified CDS sequence (opt5) from neuraminidase__InfluenzaA__AHL81274

SEQ ID NO: 216569 - RNA, 1410 nt, Artificial Sequence; identical to SEQ ID NO: 211590
  derived and/or modified CDS sequence (opt5) from neuraminidase__InfluenzaA__AHL81286

SEQ ID NO: 216570 - RNA, 1410 nt, Artificial Sequence; identical to SEQ ID NO: 211590
  derived and/or modified CDS sequence (opt5) from neuraminidase__InfluenzaA__AHL81298

SEQ ID NO: 216571 - RNA, 1410 nt, Artificial Sequence; identical to SEQ ID NO: 216542
  derived and/or modified CDS sequence (opt5) from neuraminidase__InfluenzaA__AHL81310

SEQ ID NO: 216572 - RNA, 1410 nt, Artificial Sequence; identical to SEQ ID NO: 212781
  derived and/or modified CDS sequence (opt5) from neuraminidase__InfluenzaA__AHL81332

SEQ ID NO: 216573 - RNA, 1410 nt, Artificial Sequence
  derived and/or modified CDS sequence (opt5) from neuraminidase__InfluenzaA__AHL81343
augaaccccaaucagaagaucauuaccaucggcagcgugucccugacaauuucuacgaucugcuuccucaugcaaauugccauccugaucaccacagucacccuucacuuuaaacaguacgaguucaacagcccuccgaauaaccagguuaugcugugugaacccacaauuaucgagagaaauauuaccgaaaucguguaucucacaaacaccacgauugagaaggaaaucugcccuaaacuggcugaguaccggaauugguccaagccccagugugacauuaccggguuugccccuuucucuaaagauaacagcauccgccuuuccgcgggaggcgacaucugggugacaagagagcccuaugucucuugcgauccugacaaguguuaccaauuugcucuggggcagggaaccacacucaauaacgugcauagcaauaacaccguucgggaucgcacgccguauagaacacugcugaugaaugaacucggcgugcccuuccaccuggggaccaagcaggucugcauugccugguccucuagcuccugucaugacggaaaagccuggcuucacgugugcaucacaggcgaugacaagaacgcuaccgccagcuuuauuuacaauggccggcugguugauucuguggucuccuggagcaaagagauccuccgcacccaggaaucugagugugugugcauuaacgggacauguacgguggucaucaccgacggauccgcuagcggcaaggccgauacaaaaauccuguucauugaggaagggaagaucguucauaccuccacacuuucuggaagcgcgcaacacguggaggaaugcuccugcuauccuagauaccccggcgugcggugugucugccgcgacaacuggaaggggagcaauagaccuauuguggauaucaacauuaaagaccacucuaucguuuccagcuacguguguucuggacuggucggcgacacgccccggaagaaugauagcuccucuagcucccauugcagcgacccgaacaaugaggaaggcgggcacggagugaaaggcugggccuuugaugacgggaacgauguuuggaugggacgcaccaucucugagaaguccagacucggcuaugagacauucaaagugauugaaggguggagcaauccuaagucuaaacugcagaucaaccggcaggucauuguggaccgcggaaauagauccggcuacagcggcaucuuuuccgucgaggggaagucuuguauuaaccggugcuucuauguggaacugaucagaggacgcaaggaggaaaccgagguucucuggaccagcaauuccauuguggucuuuuguggcacaucugggaccuacggaacaggcagcuggcccgauggggcugacaucaaccugaugccuaucuga

SEQ ID NO: 216574 - RNA, 1410 nt, Artificial Sequence; identical to SEQ ID NO: 211590
  derived and/or modified CDS sequence (opt5) from neuraminidase__InfluenzaA__AHL81355

SEQ ID NO: 216575 - RNA, 1410 nt, Artificial Sequence; identical to SEQ ID NO: 212781
  derived and/or modified CDS sequence (opt5) from neuraminidase__InfluenzaA__AHL81367

SEQ ID NO: 216576 - RNA, 1410 nt, Artificial Sequence; identical to SEQ ID NO: 212781
  derived and/or modified CDS sequence (opt5) from neuraminidase__InfluenzaA__AHL81378

SEQ ID NO: 216577 - RNA, 1410 nt, Artificial Sequence; identical to SEQ ID NO: 212781
  derived and/or modified CDS sequence (opt5) from neuraminidase__InfluenzaA__AHL81389

SEQ ID NO: 216578 - RNA, 1410 nt, Artificial Sequence; identical to SEQ ID NO: 211590
  derived and/or modified CDS sequence (opt5) from neuraminidase__InfluenzaA__AHL81400

SEQ ID NO: 216579 - RNA, 1410 nt, Artificial Sequence; identical to SEQ ID NO: 216563
  derived and/or modified CDS sequence (opt5) from neuraminidase__InfluenzaA__AHL81412

SEQ ID NO: 216580 - RNA, 1410 nt, Artificial Sequence; identical to SEQ ID NO: 208810
  derived and/or modified CDS sequence (opt5) from neuraminidase__InfluenzaA__AHL81422

SEQ ID NO: 216581 - RNA, 1410 nt, Artificial Sequence; identical to SEQ ID NO: 210098
  derived and/or modified CDS sequence (opt5) from neuraminidase__InfluenzaA__AHL81433

SEQ ID NO: 216582 - RNA, 1410 nt, Artificial Sequence
  derived and/or modified CDS sequence (opt5) from neuraminidase__InfluenzaA__AHL88954
augaaccccaaucagaagaucauuaccaucggcagcgugucccugacaauuucuacgaucugcuucuuuaugcaaauugccauccucaucaccacagucacccugcacuucaaacaguacgaguuuaacagcccuccgaauaaccagguuaugcuuugugaacccacaauuaucgagagaaauauuaccgaaaucguguaucugacaaacaccacgauugagaaggaaaucugcccuaaacucgcugaguaccggaauugguccaagccccaguguaacauuaccggguucgccccuuuuucuaaagacaauagcauccgccuguccgcgggaggcgauaucugggugacaagagagcccuaugucucuugcgacccugauaaguguuaccaauucgcucuugggcagggaaccacacugaacaaugugcauagcaacgacaccguucacgaucggacgccguaucgcacacuccugaugaaugaacugggcgugcccuuucaucucgggaccaagcaggucugcauugccugguccucuagcuccugucacgacggaaaagccuggcugcaugugugcguuacaggcgaugacaagaacgcuaccgccagcuucaucuacaauggcagacuuguggauucuauugucuccuggagcaaagagauccugcggacccaggaaucugagugugugugcauuaacgggacauguacgguggucaugaccgacggauccgcuagcggcaaggccgauacaaaaauccucuuuaucaaggaggggaagauuguucacaccuccacacugucuggaagcgcgcaacacguggaagagugcuccugcuauccucgcuaccccggcgugagaugugucugccgggacaacuggaaagggagcaaucgcccuaucguggauauuaacaucaaggacuacucuauuguuuccagcuauguguguucuggacuugucggcgacacccccagaaagaaugauagcuccucuagcucccauugccuggacccgaacaaugaagagggcgggcacggagugaaaggcugggccuucgaugacgggaacgauguuuggaugggacggacgaucagcgaaaaacuccgcucuggcuacgagacauuuaaggugaucgaggggugguccaauccuaacagcaaacugcagauuaauagacaggucaucguggaccgggauaaccgcucuggauauuccggcauuuucagcgucgaaggcaaguccuguaucaauagaugcuuuuacguggagcugauucgggggagaaaggaagagaccgaaguucucuggaccucuaacagcaucguggucuucuguggaacauccggcaccuaugggacaggaucuuggcccgacggcgcugauauuaaucugaugccuaucuga

SEQ ID NO: 216583 - RNA, 1410 nt, Artificial Sequence
  derived and/or modified CDS sequence (opt5) from neuraminidase__InfluenzaA__AHL89033
augaaccccaaucagaagaucauuaccaucggcagcgugucccugacaauuucuacgaucugcuucuuuaugcaaauugccauccucaucaccacagucacccugcacuucaaacaguacgaguuuaacagcccuccgaauaaccagguuaugcuuugugaacccacaauuaucgagagaaauauuaccgaaaucguguaucugacaaacaccacgauugagaaggaaaucugcccuaaacucgcugaguaccggaauugguccaagccccaguguaacauuaccggguucgccccuuuuucuaaagacaauagcauccgccuguccgcgggaggcgauaucugggugacaagagagcccuaugucucuugcgacccugauaaguguuaccaauucgcucuugggcagggaaccacacugaacaaugugcauagcaacgacaccguucacgaucggacgccguaucgcacacuccugaugaaugaacugggcgugcccuuucaucucgggaccaagcaggucugcauugccugguccucuagcuccugucacgacggaaaagccuggcugcaugugugcguuacaggcgaugacaagaacgcuaccgccagcuucaucuacaauggcagacuuguggauucuauugucuccuggagcaaagagauccugcggacccaggaaucugagugugugugcauuaacgggacauguacgguggucaugaccgacggauccgcuagcggcaaggccgauacaaaaauccucuuuaucgaggaagggaagauuguucacaccuccacacugucuggaagcgcgcaacacguggaggaaugcuccugcuauccucgcuaccccggcgugagaugugucugccgggacaacuggaaggggagcaaucgcccuaucguggauauuaacaucaaagacuacucuauuguuuccagcuauguguguucuggacuugucggcgacacccccagaaagaaugauagcuccucuagcucccauugccuggacccgaacaaugaggaaggcgggcacggagugaaaggcugggccuucgaugacgggaacgauguuuggaugggacggacgaucagcgagaagcuccgcucuggcuacgagacauuuaaagugaucgaagggugguccaauccuaacagcaagcugcagauuaauagacaggucaucguggaccggggaaaccgcucuggcuauuccggcauuuucagcgucgaggauaaauccuguaucaauagaugcuuuuacguggaacugauucgggggagaaaggaggaaaccgagguucucuggaccucuaacagcaucguggucuucuguggaacauccggcaccuaugggacaggaucuuggcccgacggcgcugauauuaaucugaugccuaucuga

SEQ ID NO: 216584 - RNA, 1410 nt, Artificial Sequence
  derived and/or modified CDS sequence (opt5) from neuraminidase__InfluenzaA__AHL89045
augaaccccaaucagaagaucauuaccaucggcagcgugucccugacaauuucuacgaucugcuucuuuaugcaaauugccauccucaucaccacagucacccugcacuucaaacaguacgaguuuaacagcccuccgaauaaccagguuaugcuuugugaacccacaauuaucgagagaaauauuaccgaaaucguguaucugacaaacaccacgauugagaaggaaaucugcccuaaacucgcugaguaccggaauugguccaagccccaguguaacauuaccggguucgccccuuuuucuaaagacaauagcauccgccuguccgcgggaggcgauaucugggugacaagagagcccuaugucucuugcgacccugauaaguguuaccaauucgcucuugggcagggaaccacacugaacaaugugcauagcaacgacaccguucacgaucggacgccguaucgcacacuccugaugaaugaacugggcgugcccuuucaucucgggaccaagcaggucugcauugccugguccucuagcuccugucacgacggaaaagccuggcugcaugugugcguuacaggcgaugacaagaacgcuaccgccagcuucaucuacaauggcagacuuguggauucuauugucuccuggagcaaagagauccugcggacccaggaaucugagugugugugcauuaacgggacauguacgguggucaugaccgacggauccgcuagcggcaaggccgauacaaaaauccucuuuaucgaggaagggaagauuguucacaccuccacacugucuggaagcgcgcaacacguggaggaaugcuccugcuauccucgccaucccggcgugagaugugucugccgggacaacuggaaggggagcaaucgcccuaucguggauauuaacaucaaagacuacucuauuguuuccagcuacguguguucuggacuugucggcgacacccccagaaagaaugauagcuccucuagcucccacugccuggacccgaacaaugaggaaggcgggcauggagugaaaggcugggccuucgaugacgggaacgauguuuggaugggacggacgaucagcgagaagcuccgcucuggcuaugagacauuuaaagugaucgaagggugguccaauccuaacagcaagcugcagaccaauagacaggucauuguggaccggggaaaccgcucuggcuacuccggcaucuucagcgucgaggggaaauccuguauuaauagaugcuuuuauguggaacugauccggggaagaaaggaggaaaccgagguucucuggacaucuaacagcauuguggucuucuguggcaccuccgggacauacggaacgggcucuuggcccgauggggcugacaucaaucugaugccuauuuga

SEQ ID NO: 216585 - RNA, 1410 nt, Artificial Sequence
  derived and/or modified CDS sequence (opt5) from neuraminidase__InfluenzaA__AHL89057
augaaccccaaucagaagaucauuaccaucggcagcgugucccugacaauuucuacgaucugcuucuuuaugcaaauugccauccucaucaccacagucacccugcacuucaaacaguacgaguuuaacagcccuccgaauaaccagguuaugcuuugugaacccacaauuaucgagagaaauauuaccgaaaucguguaucugacaaacaccacgauugagaaggaaaucugcccuaaacucgcugaguaccggaauugguccaagccccaguguaacauuaccggguucgccccuuuuucuaaagacaauagcauccgccuguccgcgggaggcgauaucugggugacaagagagcccuaugucucuugcgacccugauaaguguuaccaauucgcucuugggcagggaaccacacugaacaaugugcauagcaacgacaccguucacgaucggacgccguaucgcacacuccugaugaaugaacugggcgugcccuuucaucucgggaccaagcaggucugcauugccugguccucuagcuccugucacgacggaaaagccuggcugcaugugugcguuacaggcgaugacaagaacgcuaccgccagcuucaucuacaauggcagacuuguggauucuauugucuccuggagcaaagagauccugcggacccaggaaucugagugugugugcauuaacgggacauguacgguggucaugaccgacggauccgcuagcggcaaggccgauacaaaaauccucuuuaucgaggaagggaagauuguucacaccuccacacugucuggaagcgcgcaacacguggaggaaugcuccugcuauccucgcuaccccggcgugagaugugucugccgggacaacuggaaggggagcaaucgcccuaucguggauauuaacaucaaagacuacucuauuguuuccagcuauguguguucuggacuugucggcgacacccccagaaagaaugauagcuccucuagcucccauugccuggacccgaacaaugaggaaggcgggcacggagugaaaggcugggccuucgaugacgggaacgauguuuggaugggacggacgaucagcgagaagcuccgcucuggcuacgagacauuuaaagugaucgaagggugguccaagccuaauagcaaacugcagauuaacagacaggucaucguggaccggggaaaucgcucuggcuauuccggcauuuucagcgucgaggggaaguccuguaucaacagaugcuuuuacguggaacugauucggggaagaaaggaggaaaccgagguucucuggaccucuaauagcaucguggucuucuguggcacauccgggaccuauggaacaggcucuuggcccgauggggcugacauuaaccugaugccuaucuga

SEQ ID NO: 216586 - RNA, 1410 nt, Artificial Sequence; identical to SEQ ID NO: 207779
  derived and/or modified CDS sequence (opt5) from neuraminidase__InfluenzaA__AHL89069

SEQ ID NO: 216587 - RNA, 1410 nt, Artificial Sequence; identical to SEQ ID NO: 206784
  derived and/or modified CDS sequence (opt5) from neuraminidase__InfluenzaA__AHL89081

SEQ ID NO: 216588 - RNA, 1410 nt, Artificial Sequence; identical to SEQ ID NO: 206784
  derived and/or modified CDS sequence (opt5) from neuraminidase__InfluenzaA__AHL89093

SEQ ID NO: 216589 - RNA, 1410 nt, Artificial Sequence; identical to SEQ ID NO: 206784
  derived and/or modified CDS sequence (opt5) from neuraminidase__InfluenzaA__AHL89117

SEQ ID NO: 216590 - RNA, 1410 nt, Artificial Sequence; identical to SEQ ID NO: 206784
  derived and/or modified CDS sequence (opt5) from neuraminidase__InfluenzaA__AHL89129

SEQ ID NO: 216591 - RNA, 1410 nt, Artificial Sequence
  derived and/or modified CDS sequence (opt5) from neuraminidase__InfluenzaA__AHL89141
augaaccccaaucagaagaucauuaccaucggcagcgugucccugacaauuucuacgaucugcuucuuuaugcaaauugccauccucaucaccacagucacccugcacuucaaacaguacgaguuuaacagcccuccgaauaaccagguuaugcuuugugaacccacaauuaucgagagaaauauuaccgaaaucguguaucugacaaacaccacgauugagaaggaaaucugcccuaaacucgcugaguaccggaauugguccaagccccaguguaacauuaccggguucgccccuuuuucuaaagacaauagcauccgccuguccgcgggaggcgauaucugggugacaagagagcccuaugucucuugcgacccugauaaguguuaccaauucgcucuugggcagggaaccacacugaacaaugugcauagcaacgacaccguucacgaucggacgccguaucgcacacuccugaugaaugaacugggcgugcccuuucaucucgggaccaagcaggucugcauugccugguccucuagcuccugucacgacggaaaagccuggcugcaugugugcguuacaggcgaugacaagaacgcuaccgccagcuucaucuacaauggcagacuuguggauucuauugucuccuggagcaaagagauccugcggacccaggaaucugagugugugugcauuaacgggacauguacgguggucaugaccgacggauccgcuagcggcaaggccgauacaaaaauccucuuuaucgaggaagggaagauuguucacaccuccacacugucuggaagcgcgcaacacguggaggaaugcuccugcuauccucgcuaccccggcgugagaugugucugccgggacaacuggaaggggagcaaucgcccuaucguggauauuaacaucaaagacuacucuauuguuuccagcuauguguguucuggacuugucggcgacacccccagaaagaaugauagcuccucuagcucccauugccuggacccgaacaaugaggaaggcgggcacggagugaaaggcugggccuucgaugacgggaacgauguuuggaugggacggacgaucagcgagaagcuccgccugggcuacgagacauuuaaagugaucgaaggguggucuaauccuaacuccaagcugcagaccaauagacaggucauuguggaccggggaaaccgcagcggcuauucuggcaucuucuccgucgaggggaaaagcuguauuaauagaugcuuuuacguggaacucauccggggaagaaaggaggaaaccgagguucuguggacauccaacucuauuguggucuucuguggcaccagcgggacauauggaacgggcuccuggcccgauggggcugacaucaaucuuaugccuauuuga

SEQ ID NO: 216592 - RNA, 1410 nt, Artificial Sequence
  derived and/or modified CDS sequence (opt5) from neuraminidase__InfluenzaA__AHL89153
augaaccccaaucagaagaucauuaccaucggcagcgugucccugacaauuucuacgaucugcuucuuuaugcaaauugccauccucaucaccacagucacccugcacuucaaacaguacgaguuuaacagcccuccgaauaaccagguuaugcuuugugaacccacaauuaucgagagaaauauuaccgaaaucguguaucugacaaacaccacgauugagaaggaaaucugcccuaaacucgcugaguaccggaauugguccaagccccaguguaacauuaccggguucgccccuuuuucuaaagacaauagcauccgccuguccgcgggaggcgauaucugggugacaagagagcccuaugucucuugcgacccugauaaguguuaccaauucagccuugggcagggaaccacacugaacaaugugcauuccaacgacaccguucacgaucggacgccguaucgcacacuccugaugaaugaacugggcgugcccuuucaucucgggaccaagcaggucugcauugcuuggucuagcuccagcugucacgacggaaaagccuggcugcaugugugcguuacaggcgaugacaagaacgccaccgcuucuuucaucuacaauggcagacuuguggauuccauugucagcuggucuaaagagauccugcggacccaggaauccgagugugugugcauuaacgggacauguacgguggucaugaccgacggaagcgccuccggcaaggcugauacaaaaauccucuuuaucgaggaagggaagauuguucacaccucuacacugagcggauccgcccaacacguggaggaaugcagcugcuauccucgcuaccccggcgugagaugugucugccgggacaacuggaaggggucuaaucgcccuaucguggauauuaacaucaaagacuacuccauuguuagcucuuauguguguagcggacuugucggcgacacccccagaaagaaugauuccucuagcuccagccauugccuggacccgaacaaugaggaaggcgggcacggagugaaaggcugggcguucgaugacgggaacgauguuuggaugggacggacgaucucugagaagcuccgcuccggcuacgagacauuuaaagugaucgaaggguggagcaauccuaacucuaagcugcagauuaauagacaggucaucguggaccggggaaaccgcuccggcuauagcggcauuuucuccgucgaggggaaaucuuguaucaauagaugcuuuuacguggaacugauucggggaagaaaggaggaaaccgagguucucuggaccagcaacuccaucguggucuucuguggcacaucugggaccuauggaacaggcagcuggcccgauggggccgacauuaaucugaugccuaucuga

SEQ ID NO: 216593 - RNA, 1410 nt, Artificial Sequence; identical to SEQ ID NO: 206784
  derived and/or modified CDS sequence (opt5) from neuraminidase__InfluenzaA__AHL89165

SEQ ID NO: 216594 - RNA, 1410 nt, Artificial Sequence
  derived and/or modified CDS sequence (opt5) from neuraminidase__InfluenzaA__AHL89177
augaaccccaaucagaagaucauuaccaucggcagcgugucccugacaauuucuacgaucugcuucuuuaugcaaauugccauccucaucaccacagucacccugcacuucaaacaguacgaguuuaacagcccuccgaauaaccagguuaugcuuugugaacccacaauuaucgagagaaauauuaccgaaaucguguaucugacaaacaccacgauugagaaggaaaucugcccuaaacucgcugaguaccggaauugguccaagccccaguguaacauuaccggguucgccccuuuuucuaaagacaauagcauccgccuguccgcgggaggcgauaucugggugacaagagagcccuaugucucuugcgacccugauaaguguuaccaauucgcucuugggcagggaaccacacugaacaaugugcauagcaacgacaccguucacgaucggacgccguaucgcacacuccugaugaaugaacugggcgugcccuuucaucucgggaccaagcaggucugcauugccugguccucuagcuccugucacgacggaaaagccuggcugcaugugugcguuacaggcgaugacaagaacgcuaccgccagcuucaucuacaauggcagacuuguggauucuauugucuccuggagcaacgagauccugcggacccaggaaucugagugugugugcauuaacgggacauguacgguggucaugaccgacggauccgcuagcggcaaagccgauacaaagauccucuuuaucgaggaagggaaaauuguucacaccuccacacugucuggaagcgcgcaacacguggaggaaugcuccugcuauccucgcuaccccggcgugagaugugucugccgggacaauuggaaggggagcaaccgcccuaucguggauauuaauaucaaggacuacucuauuguuuccagcuauguguguucuggacuugucggcgacacccccagaaagaacgauagcuccucuagcucccauugccuggacccgaauaacgaggaaggcgggcacggagugaaaggcugggccuucgaugacgggaaugauguuuggaugggacggacgaucagcgagaaacuccgcucuggcuacgagacauuuaaggugaucgaagggugguccaacccuaauagcaaacugcagauuaacagacaggucaucguggaccggggaaaucgcucuggcuauuccggcauuuucagcgucgaggggaaguccuguaucaacagaugcuuuuacguggaacugauucggggaagaaaagaggaaaaugagguucucuggaccucuaacagcaucguggucuucuguggcaccuccgggacauauggaaccggcucuuggcccgauggggcugacauuaaucugaugccuaucuga

SEQ ID NO: 216595 - RNA, 1410 nt, Artificial Sequence; identical to SEQ ID NO: 208636
  derived and/or modified CDS sequence (opt5) from neuraminidase__InfluenzaA__AHL89189

SEQ ID NO: 216596 - RNA, 1410 nt, Artificial Sequence; identical to SEQ ID NO: 207779
  derived and/or modified CDS sequence (opt5) from neuraminidase__InfluenzaA__AHL89201

SEQ ID NO: 216597 - RNA, 1410 nt, Artificial Sequence; identical to SEQ ID NO: 208636
  derived and/or modified CDS sequence (opt5) from neuraminidase__InfluenzaA__AHL89213

SEQ ID NO: 216598 - RNA, 1410 nt, Artificial Sequence
  derived and/or modified CDS sequence (opt5) from neuraminidase__InfluenzaA__AHL89225
augaaccccaaucagaagaucauuaccaucggcagcgugucccugacaauuucuacgaucugcuucuuuaugcaaauugccauccucaucaccacagucacccugcacuucaaacaguacgaguuuaacccuccgcccaauaaccagguuaugcuuugugaaccuacaauuaucgagagaaauauuaccgaaaucguguaucugacaaacaccacgauugagaaggaaaucugccccaaacucgcugaguaccggaauuggagcaagccucaguguaacauuaccggguucgcccccuuuuccaaagacaauucuauccgccugagcgcgggaggcgauaucugggugacaagagagccuuaugucuccugcgacccggauaaguguuaccaauucgcucuugggcagggaaccacacugaacaaugugcauucuaacgacaccguucacgaucggacgcccuaucgcacacuccugaugaaugaacugggcgugccuuuucaucucgggaccaagcaggucugcauugccuggagcuccagcucuugucacgacggaaaagccuggcugcaugugugcguuacaggcgaugacaagaacgcuaccgccuccuucaucuacaauggcagacuuguggauagcauugucucuugguccaaagagauccugcggacccaggaaagcgagugugugugcauuaacgggacauguacgguggucaugaccgacggaucugcuuccggcaaggccgauacaaaaauccucuuuaucgaggaagggaagauuguucacaccagcacacuguccggaucugcgcaacacguggaggaaugcagcugcuauccccgcuacccuggcgugagaugugucugccgggacaacuggaagggguccaaucgccccaucguggauauuaacaucaaagacuacagcauuguuucuuccuauguguguagcggacuugucggcgacaccccgagaaagaaugauucuagcuccucuagccauugccuggacccuaacaaugaggaaggcgggcacggagugaaaggcugggccuucgaugacgggaacgauguuuggaugggacggacgaucuccgagaagcuccgccugggcuacgagacauuuaaagugaucgaaggguggagcaaucccaacucuaagcugcagaccaauagacaggucauuguggaccggggaaaccgcuccggcuauagcggcaucuucucugucgaggggaaauccuguauuaauagaugcuuuuacguggaacucauccggggaagaaaggaggaaaccgagguucuguggacaagcaacuccauuguggucuucuguggcaccucugggacauauggaacgggcagcuggccugauggggcugacaucaaucuuaugcccauuuga

SEQ ID NO: 216599 - RNA, 1410 nt, Artificial Sequence; identical to SEQ ID NO: 208636
  derived and/or modified CDS sequence (opt5) from neuraminidase__InfluenzaA__AHL89237

SEQ ID NO: 216600 - RNA, 1410 nt, Artificial Sequence; identical to SEQ ID NO: 207779
  derived and/or modified CDS sequence (opt5) from neuraminidase__InfluenzaA__AHL89261

SEQ ID NO: 216601 - RNA, 1410 nt, Artificial Sequence
  derived and/or modified CDS sequence (opt5) from neuraminidase__InfluenzaA__AHL89273
augaaccccaaucagaagaucauuaccaucggcagcgugucccugacaauuucuacgaucugcuucuuuaugcaaauugccauccucaucaccacagucacccugcacuucaaacaguacgaguuuaacagcccuccgaauaaccagguuaugcuuugugaacccacaauuaucgagagaaauauuaccgaaaucguguaucugacaaacaccacgauugagaaggaaaucugcccuaaacucgcugaguaccggaauugguccaagccccaguguaacauuaccggguucgccccuuuuucuaaagacaauagcauccgccuguccgcgggaggcgauaucugggugacaagagagcccuaugucucuugcgacccugauaaguguuaccaauucgcucuugggcagggaaccacacugaacaaugugcauagcaacgacaccguucacgaucggacgccguaucgcacacuccugaugaaugaacugggcgugcccuuucaucucgggaccaagcaggucugcauugccugguccucuagcuccugucacgacggaaaagccuggcugcaugugugcguuacaggcgaugacaagaacgcuaccgccagcuucaucuacaauggcagacuuguggauucuauugucuccuggagcaaagagauccugcggacccaggaaucugagugugugugcauuaacgggacauguacgguggucaugaccgacggauccgcuagcggcaaggccgauacaaaaauccucuuuaucgaggaagggaagauuguucacaccuccacacugucuggaagcgcgcaacacguggaggaaugcuccugcuauccucgcuaccccggcgugagaugugucugccgggacaacuggaaggggagcaaucgcccuaucguggauauuaacaucaaagacuacucuauuguuuccagcuauguguguucuggacuugucggcgacacccccagaaagaaugauagcuccucuagcucccauugccuggacccgaacaaugaggaaggcgggcacggagugaaaggcugggccuucgaugacgggaacgauguuuggaugggacggacgaucagcgagaagcuccgccugggcuacgagacauuuaaagugaucgaaggguggucuaauccuaacuccaagcugcagaccaauagacaggucauuguggaccggggaaaccgcagcggcuauucuggcaucuucuccgucgaggggaaaagcuguauuaauagaugcuuuuacguggaacucauccggggaagaaaggaggaaaccgauguucuguggacauccaacucuauuguggucuucuguggcaccagcgggacauauggaacgggcuccuggcccgacggggcugauaucaaucuuaugccuauuuga

SEQ ID NO: 216602 - RNA, 1410 nt, Artificial Sequence
  derived and/or modified CDS sequence (opt5) from neuraminidase__InfluenzaA__AHL89285
augaaccccaaucagaagaucauuaccaucggcagcgugucccugacaauuucuacgaucugcuucuuuaugcaaauugccauccucaucaccacagucacccugcacuucaaacaguacgaguuuaacagcccuccgaauaaccagguuaugcuuugugaacccacaauuaucgagagaaauauuaccgaaaucguguaucugacaaacaccacgauugagaaggaaaucugcccuaaacucgcugaguaccggaauugguccaagccccaguguaacauuaccggguucgccccuuuuucuaaagacaauagcauccgccuguccgcgggaggcgauaucugggugacaagagagcccuaugucucuugcgacccugauaaguguuaccaauucgcucuugggcagggaaccacacugaacaaugugcauagcaacgacaccguucacgaucggacgccguaucgcacacuccugaugaaugaacugggcgugcccuuucaucucgggaccaagcaggucugcauugccugguccucuagcuccugucacgacggaaaagccuggcugcaugugugcguuacaggcgaugacaagaacgcuaccgccagcuucaucuacaauggcagacuuguggauucuauugucuccuggagcaaagagauccugcggacccaggaaucugagugugugugcauuaacgggacauguacgguggucaugaccgacggauccgcuagcggcaaggccgauacaaaaauccucuuuaucgaggaagggaagauuguucacaccuccacacugucuggaagcgcgcaacacguggaggaaugcuccugcuauccucgcuaccccggcgugagaugugucugccgggacaacuggaaggggagcaaucgcccuaucguggauauuaacaucaaagacuacucuauuguuuccagcuauguguguucuggacuugucggcgacacccccagaaagaaugauagcuccucuagcucccauugccuggacccgaacaaugaggaaggcgggcacggagugaaaggcugggccuucgaugacgggaacgauguuuggaugggacggacgaucagcgagaagcuccgccugggcuacgagacauuuaaagugaucgaaggguggucuaauccuaacuccaagcugcagaccaauagacaggucauuguggaccggggaaaccgcagcggcuauucuggcaucuucuccgucgaggggaaaagcuguauuaauagaugcuuuuacguggaacucauccggggaagaaaggaggaaaccgauguucuguggacauccaacucuauuguggucuucuguagcaccuccggcacauaugggacgggaucuuggcccgacggcgcugauaucaaucuuaugccuauuuga

SEQ ID NO: 216603 - RNA, 1410 nt, Artificial Sequence; identical to SEQ ID NO: 216601
  derived and/or modified CDS sequence (opt5) from neuraminidase__InfluenzaA__AHL89297

SEQ ID NO: 216604 - RNA, 1410 nt, Artificial Sequence; identical to SEQ ID NO: 216601
  derived and/or modified CDS sequence (opt5) from neuraminidase__InfluenzaA__AHL89309

SEQ ID NO: 216605 - RNA, 1410 nt, Artificial Sequence
  derived and/or modified CDS sequence (opt5) from neuraminidase__InfluenzaA__AHL89321
augaaccccaaucagaagaucauuaccaucggcagcgugucccugacaauuucuacgaucugcuucuuuaugcaaauugccauccucaucaccacagucacccugcacuucaaacaguacgaguuuaacagcccuccgaauaaccagguuaugcuuugugaacccacaauuaucgagagaaauauuaccgaaaucguguaucugacaaacaccacgauugagaaggaaaucugcccuaaacucgcugaguaccggaauugguccaagccccagugugacauuaccggguucgccccuuuuucuaaagauaacagcauccgccuguccgcgggaggcgacaucugggugacaagagagcccuaugucucuugcgauccugacaaguguuaccaauucgcucuugggcagggaaccacacugaauaacgugcauagcaaugauaccguucacgaccggacgccguaucgcacacuccugaugaacgaacugggcgugcccuuucaucucgggaccaagcaggucugcauugccugguccucuagcuccugucacgauggaaaagccuggcugcaugugugcguuacaggcgacgauaagaaugcuaccgccagcuucaucuacaacggcagacuuguggacucugucguguccuggagcaaagauauucugcggacccaggagucugaaugugugugcaucaaugggacauguacggucguuaugaccgacggauccgcuagcggcaaggccgauacaaaaauucucuuuaucgaggaggggaagaucgugcacauuuccacccugucuggaagcgcgcaacacguggaagagugcuccugcuauccucgcuaccccggcgucagaugugugugccgggacaacuggaaggggagcaaccgcccuaucguugacauuaauaucaaaaacuacucuauuguguccagcuaugucuguucuggacuugugggcgauacacccagaaagaccgacagcuccucuagcucccauugccuggauccgaauaacgaagagggcgggcacggaguuaaaggcugggccuucgacgaugggaaugacguguggaugggacggacgaucagcgaaaagcuccgccugggcuacgagacauuuaaagucaucgagggguggucuaacccuaauuccaagcugcagauuaacagacaggugaucgucgaucggggaaaucgcagcggcuauucuggcauuuucuccguggaagggaaaagcuguaucaacagaugcuuuuacguugagcucauucggggaagaaaggaagagaccgaagugcuguggaccuccaauucuaucgucguguucuguggcacaagcgggaccuauggaacaggcuccuggcccgacggggcugauauuaaccuuaugccuaucuga

SEQ ID NO: 216606 - RNA, 1410 nt, Artificial Sequence
  derived and/or modified CDS sequence (opt5) from neuraminidase__InfluenzaA__AHL89333
augaaccccaaucagaagaucauuaccaucggcagcgugucccugacaauuucuacgaucugcuucuuuaugcaaauugccauccucaucgcuaccgucacacugcacuucaaacaguacgaguuuaacagcccuccgaauaaccagguuaugcuuugugaacccaccauuaucgagagaaauauuacagaaaucguguaucugaccaacacaaccauugagaaggaaaucugcccuaaacucgccgaguaccggaauugguccaagccccaguguaacauuacgggguucgcgccuuuuucuaaagacaauagcauccgccuguccgcuggaggcgauaucugggugaccagagagcccuaugucucuugcgacccugauaaguguuaccaauucgcccuugggcagggaacaacccugaacaaugugcauagcaacgacacaguucacgaucggaccccguaucgcacgcuccugaugaaugaacugggcgugcccuuucaucucgggacaaagcaggucugcauugccugguccucuagcuccugucacgacggaaaggcuuggcugcaugugugcguuaccggcgaugacaaaaacgccacagcuagcuucaucuacaauggcagacuuguggauucuauugucuccuggagcaaagagauccugcggacccaggaaucugagugugugugcauuaacgggaccugugccguggucaugacagacggauccgcgagcggcaaggccgauacgaaaauccucuuuaucgaggaagggaagauuguucacaccuccacacugucuggaagcgcucaacacguggaggaaugcuccugcuauccucgcuaccccggcgugagaugugucugccgggacaacuggaaggggagcaaucgcccuaucguggauauuaacaucaaagacuacucuauuguuuccagcuauguguguucuggacuugucggcgacacccccagaaagaaugauagcuccucuagcucccauugccuggacccgaacaaugaggaaggcgggcacggagugaaaggcugggccuucgaugacgggaacgauguuuggaugggacggacaaucagcgagaagcuccgccugggcuacgagaccuuuaaagugaucgaaggguggucuaauccuaacuccaagcugcagacgaauagacaggucauuguggaccggggaaaccgcagcggcuauucuggcaucuucuccgucgaggggaaaagcuguauuaauagaugcuuuuacguggaacucauccggggaagaaaggaggaaacagagguucuguggaccuccaacucuauuguggucuucuguggcaccagcgggacauauggaaccggcuccuggcccgauggggcugacaucaaucuuaugccuauuuga

SEQ ID NO: 216607 - RNA, 1410 nt, Artificial Sequence; identical to SEQ ID NO: 206784
  derived and/or modified CDS sequence (opt5) from neuraminidase__InfluenzaA__AHL89345

SEQ ID NO: 216608 - RNA, 1410 nt, Artificial Sequence; identical to SEQ ID NO: 207778
  derived and/or modified CDS sequence (opt5) from neuraminidase__InfluenzaA__AHL89357

SEQ ID NO: 216609 - RNA, 1410 nt, Artificial Sequence; identical to SEQ ID NO: 207779
  derived and/or modified CDS sequence (opt5) from neuraminidase__InfluenzaA__AHL89369

SEQ ID NO: 216610 - RNA, 1410 nt, Artificial Sequence
  derived and/or modified CDS sequence (opt5) from neuraminidase__InfluenzaA__AHL89381
augaaccccaaucagaagaucauuaccaucggcagcgugucccugacaauuucuacgaucugcuucuuuaugcaaauugccauccucaucaccacagucacccugcacuucaaacaguacgaguauaacagcccuccgaauaaccagguuaugcuuugugaacccacaauuaucgagagaaauauuaccgaaaucguguaccugacaaacaccacgauugagaaggaaaucugcccuaaacucgcugaguaucggaauugguccaagccccaguguaacauuaccggguuugccccuuucucuaaagacaauagcauccgccuguccgcgggaggcgauaucugggugacaagagagcccuacgucucuugcgacccugauaaguguuaucaauuugcucuugggcagggaaccacacugaacaaugugcauagcaacgacaccguucacgaucggacgccguaccgcacacuccugaugaaugaacugggcgugcccuuccaucucgggaccaagcaggucugcauugccugguccucuagcuccugucacgacggaaaagccuggcugcaugugugcguuacaggcgaugacaagaacgcuaccgccagcuuuaucuauaauggcagacuuguggauucuauugucuccuggagcaaagagauccugcggacccaggaaucugagugugugugcauuaacgggacauguacgguggucaugaccgacggauccgcuagcggcaaggccgauacaaaaauccucuucaucgaggaagggaagauuguucacaccuccacacugucuggaagcgcgcaacacguggaggaaugcuccugcuacccucgcuaccccggcgugagaugugucugccgggacaacuggaaggggagcaaucgcccuaucguggauauuaacaucaaagacuauucuauuguuuccagcuacguguguucuggacuugucggcgacacccccagaaagaaugauagcuccucuagcucccauugccuggacccgaacaaugaggaaggcgggcacggagugaaaggcugggccuuugaugacgggaacgauguuuggaugggacggacgaucagcgagaagcuccgccugggcuaugagacauucaaagugaucgaaggguggucuaauccuaacuccaagcugcagaccaauagacaggucauuguggaccggggaaaccgcagcggcuacucuggcaucuuuuccgucgaggggaaaagcuguauuaauagaugcuucuauguggaacucauccggggaagaaaggaggaaaccgagguucuguggacauccaacucuauuguggucuuuuguggcaccagcgggacauacggaacgggcuccuggcccgauggggcugacaucaaucuuaugccuauuuga

SEQ ID NO: 216611 - RNA, 1410 nt, Artificial Sequence; identical to SEQ ID NO: 216601
  derived and/or modified CDS sequence (opt5) from neuraminidase__InfluenzaA__AHL89405

SEQ ID NO: 216612 - RNA, 1410 nt, Artificial Sequence
  derived and/or modified CDS sequence (opt5) from neuraminidase__InfluenzaA__AHL89417
augaaccccaaucagaagaucauuaccaucggcagcgugucccugacaauuucuacgaucugcuucuuuaugcaaauugccauccucaucaccacagucacccugcacuucaaacaguacgaguuuaacagcccuccgaauaaccagguuaugcuuugugaacccacaauuaucgagagaaauauuaccgaaaucguguaucugacaaacaccacgauugagaaggaaaucugcccuaaacucgcugaguaccggaauugguccaagccccagugugacauuaccggguucgccccuuuuucuaaagauaacagcauccgccuguccgcgggaggcgacaucugggugacaagagagcccuaugucucuugcgauccugacaaguguuaccaauucgcucuugggcagggaaccacacugaauaacgugcauagcaaugauaccguucacgaccggacgccguaucgcacacuccugaugaacgaacugggcgugcccuuucaucucgggaccaagcaggucugcauugccugguccucuagcuccugucacgauggaaaagccuggcugcaugugugcguuacaggcgacgauaagaaugcuaccgccagcuucaucuacaacggcagacuuguggacucugucguguccuggagcaaagauauucugcggacccaggagucugaaugugugugcaucaaugggacauguacggucguuaugaccgacggauccgcuagcggcaaggccgauacaaaaauucucuuuaucgaggaggggaagaucgugcacaccuccacacugucuggaagcgcgcaacacguggaagagugcuccugcuauccucgcuaccccggcgucagaugugugugccgggacaacuggaaggggagcaaccgcccuauuguugacaucgauauuaaaaauuacucuaucguguccagcuaugucuguucuggacuugugggcgacacccccagaaagacggauagcuccucuagcucccauugccuggacccgaacaaugaagagggcgggcacggaguuaaaggcugggccuucgaugacgggaacgauguguggaugggacggacaauuagcgaaaagcuccgccugggcuacgagaccuuuaaagucaucgagggguggucuaauccuaacuccaagcugcagaucaauagacaggugauugucgaccggggaaaccgcagcggcuauucuggcaucuucuccguggaagggaaaagcuguauuaauagaugcuuuuacguugagcucauccggggaagaaaggaagagaccgaagugcuguggacauccaacucuauugucguguucuguggcaccagcgggacauauggaacgggcuccuggcccgauggggcugacaucaaucuuaugccuauuuga

SEQ ID NO: 216613 - RNA, 1410 nt, Artificial Sequence; identical to SEQ ID NO: 207779
  derived and/or modified CDS sequence (opt5) from neuraminidase__InfluenzaA__AHL89429

SEQ ID NO: 216614 - RNA, 1410 nt, Artificial Sequence; identical to SEQ ID NO: 206784
  derived and/or modified CDS sequence (opt5) from neuraminidase__InfluenzaA__AHL89441

SEQ ID NO: 216615 - RNA, 1410 nt, Artificial Sequence; identical to SEQ ID NO: 206784
  derived and/or modified CDS sequence (opt5) from neuraminidase__InfluenzaA__AHL89453

SEQ ID NO: 216616 - RNA, 1410 nt, Artificial Sequence
  derived and/or modified CDS sequence (opt5) from neuraminidase__InfluenzaA__AHL89465
augaaccccaaucagaagaucauuaccaucggcagcgugucccugacaauuucuacgaucugcuucuuuaugcaaauugccauccucaucaccacagucacccugcacuucaaacaguacgaguuuaacagcccuccgaauaaccagguuaugcuuugugaacccacaauuaucgagagaaauauuaccgaaaucguguaucugacaaacauuaccaucgagaaggaaaaaugcccuaagcucgcugaguaccggaauugguccaaaccccaguguaacauuacgggguucgccccuuuuucuaaggacaauagcauccgccuguccgcgggaggcgauaucugggugaccagagagcccuaugucucuugcgacccugaucgguguuaccaauucgcucuugggcagggaacaacccugaacaaugugcauagcaacgacacaguucacgaucgcaccccguauagaacgcuccugaugaaugaacugggcgugcccuuucaucucgggacaaagcaggucugcauugccugguccucuagcuccugucacgacggaaaagccuggcugcaugugugcguuaccggcgaugacaagaacgcuacagccagcuucaucuacaauggccggcuuguggauucuauugucuccuggagcaaagagauccugcgcacccaggaaucugagugugugugcauuaacgggaccuguacaguggucaugacggacggauccgcuagcggcaaggccgauaccaaaauccucuuuaucgaggaagggaagauuguucacacauccacccugucuggaagcgcgcaacacguggaggaaugcuccugcuauccuagauaccccggcgugcggugugucugccgcgacaacuggaaggggagcaauagaccuaucguggauauuaacaucaaagacuacucuauuguuuccagcuauguguguucuggacuugucggcgacacaccccggaagaaugauagcuccucuagcucccauugccuggacccgaacaaugaggaaggcgggcacggagugaaaggcugggccuucgaugacgggaacgauguuuggaugggacgcaccaucagcgagaagcucagacugggcuacgagacguuuaaagugaucgaaggguggucuaauccuaacuccaagcugcagacaaaucggcaggucauuguggaccgcggaaacagaagcggcuauucuggcaucuucuccgucgaggggaaaagcuguauuaaucggugcuuuuacguggaacucaucagaggacgcaaggaggaaaccgagguucuguggaccuccaacucuauuguggucuucuguggcacaagcgggaccuauggaacaggcuccuggcccgauggggcugacaucaaucuuaugccuauuuga

SEQ ID NO: 216617 - RNA, 1410 nt, Artificial Sequence; identical to SEQ ID NO: 216591
  derived and/or modified CDS sequence (opt5) from neuraminidase__InfluenzaA__AHL89477

SEQ ID NO: 216618 - RNA, 1410 nt, Artificial Sequence
  derived and/or modified CDS sequence (opt5) from neuraminidase__InfluenzaA__AHL89489
augaaccccaaucagaagaucauuaccaucggcagcgugucccugacaauuucuacgaucugcuucuuuaugcaaauugccauccucaucaccacagucacccugcacuucaaacaguacgaguuuaacagcccuccgaauaaccagguuaugcuuugugaacccacaauuaucgagagaaauauuaccgaaaucguguaucugacaaacaccacgauugagaaggaaaucugcccuaaacucgcugaguaccggaauugguccaagccccaguguucuauuaccggguucgccccuuuuagcaaagacaacuccauccgccugucugcgggaggcgauaucugggugacaagagagcccuaugucagcugcgacccugauaaguguuaccaauucgcucuugggcagggaaccacacugaauaacgugcauuccaaugacaccguucacgaucggacgccguaucgcacacuccugaugaacgaacugggcgugcccuuucaucucgggaccaagcaggucugcauugccuggucuagcuccagcugucacgacggaaaagccuggcugcaugugugcguuacaggcgaugacaagaaugcuaccgccucuuucaucuacaacggcagacuuguggauuccauugucagcuggucuaaagagauccugcggacccaggaauccgagugugugugcauuaaugggacauguacgguggucaugaccgacggaagcgcuuccggcaaggccgauacaaaaauccucuuuaucgaggaagggaagauuguucacaccucuacacugagcggauccgcgcaacacguggaggaaugcagcugcuauccucgcuaccccggcgugagaugugucugccgggacaacuggaaggggucuaaccgcccuaucguggauauuaauaucaaagacuacuccauuguuagcucuuauguguguagcggacuugucggcgacacccccagaaagaacgaucgguccucuagcucccauugccuggacccgaauaacgaggaaggcgggcacggagugaaaggcugggccuucgaugacgggaaugauguuuggaugggacgcacgaucagcgagaagucuagauccggcuacgagacauuuaaagugaucgaaggguggagcaacccucauucuaagcuccagauuaaucggcaggucaucguggaccgcggaaacagauccggcuauagcggcauuuucuccgucgaggggaaaucuuguaucaaucggugcuuuuacguggaacugauuagaggacgcaaggaggaaaccgagguucuguggaccagcaacuccaucguggucuucuguggcacaucugggaccuauggaacaggcagcuggcccgauggggcugacauuaaucucaugccuaucuga

SEQ ID NO: 216619 - RNA, 1410 nt, Artificial Sequence; identical to SEQ ID NO: 207779
  derived and/or modified CDS sequence (opt5) from neuraminidase__InfluenzaA__AHL89501

SEQ ID NO: 216620 - RNA, 1410 nt, Artificial Sequence; identical to SEQ ID NO: 207779
  derived and/or modified CDS sequence (opt5) from neuraminidase__InfluenzaA__AHL89513

SEQ ID NO: 216621 - RNA, 1410 nt, Artificial Sequence; identical to SEQ ID NO: 207779
  derived and/or modified CDS sequence (opt5) from neuraminidase__InfluenzaA__AHL89525

SEQ ID NO: 216622 - RNA, 1410 nt, Artificial Sequence; identical to SEQ ID NO: 207779
  derived and/or modified CDS sequence (opt5) from neuraminidase__InfluenzaA__AHL89537

SEQ ID NO: 216623 - RNA, 1413 nt, Artificial Sequence
  derived and/or modified CDS sequence (opt5) from neuraminidase__InfluenzaA__AHL89549
augaaccccaaucagaagaucauuaccaucggcagcauuuccaucgccauugggaucaucucucugaugcuccaaauuggaaacaucauuagcaucugggcuucccacucuauucagacaggcagccagaaucauacggggaucugcaaccagagaauuaucaccuacgaaaauuccacaugggugaaccacaccuaugucaauaucaacaauacaaacguuguggccggaaaagacaagaccucugugacacuggcgggcaauagcucccuuuguagcauuucugggugggcuaucuacaccaaagauaacuccauucggaucggaagcaagggcgacgucuucgugauucgcgagccuuuuaucucuugcucccaucuggaguguagaacguucuuucucacccaaggcgcccugcuuaaugauaaacacagcaacgggacaguuaaggaccggucuccguaucgcgcccugauguccugcccccucggagaagcuccuagccccuacaauuccaaguucgagucuguggccuggagcgcuuccgccugucaugauggcaugggguggcugaccaucggaauuagcggcccugacaacggggcggucgccgugcugaaauauaacggaaucauuacagaaaccaucaagucuuggaaaaagcggauucucagaacgcaggaguccgagugcguuugugugaauggcagcugcuuuacaaucaugaccgauggccccucuaacggggcugccagcuacaaaaucuucaagauugaaaagggaaaagucacaaaguccaucgagcugaaugcuccuaacuuucacuaugaagaguguucuugcuacccggacaccggcaccgugaugugugugugccgcgauaauuggcacgggagcaacagacccugggucuccuucaaucagcaucuugacuaccagauuggauauaucugcagcggcguuuuuggggauaacccucggcccaaagacggaaagggcucuuguaauccugugacaguggauggcgccgacggggucaaaggauucuccuacaaguauggcaacgggguguggauuggacgcacgaaaagcaauagacugcggaagggcuuugagaugaucugggaccccaacggguggaccgauacagacucugauuucuccguuaagcaagacguggucgcgauuaccgauuggagcggcuacuccggaucuuuugugcagcacccggaacucacaggccuggacugcauccgcccuuguuucuggguugagcuugugagagggcugccccgggaaaauaccacgaucuggacaagcggauccucuauuagcuucugcggcgucgauuccgacaccgccaacuggagcuggccugauggggcugagcuccccuuuaccaucgacaaauga

SEQ ID NO: 216624 - RNA, 1413 nt, Artificial Sequence; identical to SEQ ID NO: 208102
  derived and/or modified CDS sequence (opt5) from neuraminidase__InfluenzaA__AHL89561

SEQ ID NO: 216625 - RNA, 1413 nt, Artificial Sequence; identical to SEQ ID NO: 208102
  derived and/or modified CDS sequence (opt5) from neuraminidase__InfluenzaA__AHL89573

SEQ ID NO: 216626 - RNA, 1413 nt, Artificial Sequence; identical to SEQ ID NO: 208137
  derived and/or modified CDS sequence (opt5) from neuraminidase__InfluenzaA__AHL89585

SEQ ID NO: 216627 - RNA, 1413 nt, Artificial Sequence
  derived and/or modified CDS sequence (opt5) from neuraminidase__InfluenzaA__AHL89597
augaaccccaaucagaagaucauuaccaucggcagcauuuccaucgccauugggaucaucucucugaugcuccaaauuggaaacaucauuagcaucugggcuucccacucuauucagacaggcagccagaaucauacggggaucugcaaccagagaauuaucaccuacgagaauagcacaugggugaaccacaccuaugucaauaucaacaauacaaacguuguggccggaaaagacaagaccucugugacacuggcgggcaauagcucccuuuguagcauuucugggugggcuaucuacaccaaagauaacuccauucggaucggaagcaagggcgacgucuucgugauucgcgaaccuuuuaucucuugcucccaucuggaguguagaacguucuuucucacccaaggcgcccugcuuaaugauaaacacagcaacgggacaguucgggaccgcucuccguauagagcccugauguccugcccccucggagaagcuccuagccccuacaauuccaaguucgagucuguggccuggagcgcuuccgccugucaugauggcaugggguggcugaccaucggaauuagcggcccugacaacggggcggucgccgugcugaaguauaacggaaucauuacagaaaccaucaaaucuuggaagaaacggauucuccgcacgcaggaguccgagugcguuugugugaauggcagcugcuuuacaaucaugaccgauggccccucuaacggggcugccagcuacaagaucuucaaaauugaaaagggaaaggucacaaaauccaucgagcugaaugcuccuaacuuucacuaugaagaguguucuugcuacccggacaccggcaccgugaugugugugugcagagauaauuggcacgggagcaaccggcccugggucuccuucaaucagaaccuugacuaccagguuggauauauuugcagcggcguguuuggggauaauccucgccccaaggacggaaaaggcucuuguaacccuaugacaguggauggcgccgacggggucaagggauucuccuacaaauauggcaaugggguguggaucggaagaacgaaguccaacaaacugcggaagggcuuugagaugauuugggaccccaauggguggaccgauacagacucugauuucuccguuaagcaagacguggucgcgaucaccgauuggagcggcuacuccggaucuuuugugcagcauccggaacucacaggccuggacugcauucgcccuuguuucuggguugagcuugugagagggcugccccgggaaaacaccacgaucuggacaagcggauccucuaucagcuucugcggcgucgauuccgacaccgccaauuggagcuggccugauggggcugagcuccccuuuaccauugacaaauga

SEQ ID NO: 216628 - RNA, 1413 nt, Artificial Sequence; identical to SEQ ID NO: 208137
  derived and/or modified CDS sequence (opt5) from neuraminidase__InfluenzaA__AHL89609

SEQ ID NO: 216629 - RNA, 1413 nt, Artificial Sequence
  derived and/or modified CDS sequence (opt5) from neuraminidase__InfluenzaA__AHL89621
augaaccccaaucagaagaucauuaccaucggcagcauuuccaucgccauugggaucaucucucugaugcuccaaauuggaaacaucauuagcaucugggcuucccacucuauucagacaggcagccagaaucauacggggaucugcaaccagagaauuaucaccuacgagaauagcacaugggugaaccacaccuaugucucuaucaauaacacaaauguuguggccggaaaagacaagaccagcgugacacuggcgggcaacuccagccuuuguucuauuuccgggugggcuaucuacaccaaagauaauagcauucggaucggaucuaagggcgacgucuucgugauucgcgaaccuuuuaucuccugcagccaucuggaguguagaacguucuuucucacccaaggcgcccugcuuaacgauaaacacucuaaugggacaguuaaggaccgguccccguaucgcgcccugaugagcugcccccucggagaagcuccuucccccuacaacucuaaguucgagagcguggccugguccgcuagcgccugucaugauggcaugggguggcugaccaucggaauuucuggcccugacaauggggcggucgccgugcugaaauauaacggaaucauuacagaaaccaucaaguccuggaaaaagcggauucucagaacgcaggagagcgagugcguuugugugaacggcucuugcuuuacaaucaugaccgauggccccagcaauggggcugccuccuacaaaaucuucaagauugaaaagggaaaagucacaaagucuaucgagcugaacgcuccuaauuuucacuaugaagaguguagcugcuacccggacaccggcaccgugaugugugugugccgcgauaacuggcacggguccaauagacccugggucagcuucaaccagaaucuugacuaccagauuggauauaucugcucuggcguuuuuggggauaacccucggcccaaagacggaaagggcuccuguaauccugugacaguggauggcgccgacggggucaaaggauucagcuacaaguauggcaacgggguguggauuggacgcacgaaaucuaauagacaucggaagggcuuugagaugaucugggaccccaacggguggaccgauacagacuccgauuucagcguuaagcaagacguggucgcgauuaccgauugguccggcuacucuggauccuuugugcagcacccggaacugacaggccucgacugcauccgcccuuguuucuggguugagcuggugagagggcuuccccgggaaaauaccacgaucuggacauccggaucuagcauuuccuucugcggcgucgauagcgacaccgccaacuggucuuggccugauggggcugagcugcccuuuaccaucgacaaauga

SEQ ID NO: 216630 - RNA, 1413 nt, Artificial Sequence; identical to SEQ ID NO: 208128
  derived and/or modified CDS sequence (opt5) from neuraminidase__InfluenzaA__AHL89633

SEQ ID NO: 216631 - RNA, 1413 nt, Artificial Sequence; identical to SEQ ID NO: 208137
  derived and/or modified CDS sequence (opt5) from neuraminidase__InfluenzaA__AHL89645

SEQ ID NO: 216632 - RNA, 1413 nt, Artificial Sequence; identical to SEQ ID NO: 208102
  derived and/or modified CDS sequence (opt5) from neuraminidase__InfluenzaA__AHL89657

SEQ ID NO: 216633 - RNA, 1413 nt, Artificial Sequence
  derived and/or modified CDS sequence (opt5) from neuraminidase__InfluenzaA__AHL89669
augaaccccaaucagaagaucauuaccaucggcagcauuuccaucgccauugggaucaucucucugaugcuccaaauuggaaacaucauuagcaucugggcuucccacucuauucagacaggcagccagaaucauacggggaucugcaaccagagaauuaucaccuacgaaaauuccacaugggugaaccacaccuaugucaauaucaacaauacaaacguuguggccggaaaagacaagaccucugugacacuggcgggcaauagcucccuuuguagcauuucugggugggcuaucuacaccaaagauaacuccauucggaucggaagcaagggcgacgucuucgugauucgcgagccuuuuaucucuugcucccaucuggaguguagaacguucuuucucacccaaggcgcccugcuuaaugauaaacacagcaacgggacaguuaaggaccggucuccguaucgcgcccugauguccugcccccucggagaagcuccuagccccuacaauuccaaguucgagucuguggccuggagcgcuuccgccugucaugauggcaugggguggcugaccaucggaauuagcggcccugacaacggggcggucgccgugcugaaauauaacggaaucauuacagaaaccaucaagucuuggaaaaagcggauucucagaacgcaggaguccgagugcguuugugugaauggcagcugcuuuacaaucaugaccgauggccccucuaacggggcugccagcuacaaaaucuucaagauugaaaagggaaaagucacaaaguccaucgagcugaaugcuccuaacuuucacuaugaagaguguucuugcuacccggacaccggcaccgugaugugugugugccgcgauaauuggcacgggagcaacagacccugggucuccuucaaucagaaccuugacuaccagguuggauauauuugcagcggcguguuuggggauaauccucggcccaaagacggaaagggcucuuguaacccuaugacaguggauggcgccgacggggucaaaggauucuccuacaaguauggcaaugggguguggaucggacgcacgaaaagcaacgagcugagaaagggcuuugaaaugauuugggaccccaauggguggaccgauacagacucugauuucuccguuaagcaagacguggucgcgaucaccgauuggagcggcuacuccggaucuuuugugcagcauccggagcucacaggccuggacugcauucggccuuguuucuggguugaacuugugcgcgggcugcccagagagaacaccacgaucuggacaagcggauccucuaucagcuucugcggcgucgauuccgacaccgccaauuggagcuggccugauggggcugaacuccccuuuaccauugacaaauga

SEQ ID NO: 216634 - RNA, 1413 nt, Artificial Sequence
  derived and/or modified CDS sequence (opt5) from neuraminidase__InfluenzaA__AHL89681
augaaccccaaucagaagaucauuaccaucggcagcauuuccaucgccauugggaucaucucucugaugcuccaaauuggaaacaucauuagcaucugggcuucccacucuauucagacaggcagccagaaucauacggggaucugcaaccagagaauuaucaccuacgaaaauuccacaugggugaaccacaccuaugucaauaucaacaauacaaacguuguggccggaaaagacaagaccucugugacacuggcgggcaauagcucccuuuguagcauuucugggugggcuaucuacaccaaagauaacuccauucggaucggaagcaagggcgacgucuucgugauucgcgagccuuuuaucucuugcucccaucuggaguguagaacguucuuucucacccaaggcgcccugcuuaaugauaaacacagcaacgggacaguuaaggaccggucuccguaucgcgcccugauguccugcccccucggagaagcuccuagccccuacaauuccaaguucgagucuguggccuggagcgcuuccgccugucaugauggcaugggguggcugaccaucggaauuagcggcccugacaacggggcggucgccgugcugaaauauaacggaaucauuacagaaaccaucaagucuuggaaaaagcggauucucagaacgcaggaguccgagugcguuugugugaauggcagcugcuuuacaaucaugaccgauggccccucuaacggggcugccagcuacaaaaucuucaagauugaaaagggaaaaaucacaaaguccauugagcugaaugcuccuaacuuucacuaugaagaguguucuugcuacccggacaccggcaccgucaugugugugugccgcgauaauuggcacgggagcaacagacccuggguguccuucaaucagaaccuugacuaccaggucggauauaucugcagcggcguuuuuggggauaauccucggcccaaagacggaaagggcucuuguaacccuaugacaguggauggcgccgacggggugaaaggauucuccuacaaguauggcaauggggucuggauuggacgcacgaaaagcaacaagcugagaaagggcuuugagaugaucugggaccccaauggguggaccgauacagacucugauuucuccgugaaacaagacguuguggcgauuaccgauuggagcggcuacuccggaucuuuuguccagcauccggaacucacaggccuggacugcauccggccuuguuucuggguggagcuuguucgcgggcugcccagagaaaacgccaccaucuggacgagcggauccucuauuagcuucugcggcguggauuccgacacagcuaauuggagcuggccugauggggccgagcuccccuuuaccaucgacaaguga

SEQ ID NO: 216635 - RNA, 1413 nt, Artificial Sequence
  derived and/or modified CDS sequence (opt5) from neuraminidase__InfluenzaA__AHL89693
augaaccccaaucagaagaucauuaccaucggcagcauuuccaucgccauugggaucaucucucugaugcuccaaauuggaaacaucauuagcaucugggcuucccacucuauucagacaggcagccagaaucauacggggaucugcaaccagagaauuaucaccuacgaaaauuccacaugggugaaccacaccuaugucaauaucaacaauacaaacguuguggccggaaaagacaagaccucugugacacuggcgggcaauagcucccuuuguagcauuucugggugggcuaucuacaccaaagauaacuccauucggaucggaagcaagggcgacgucuucgugauucgcgagccuuuuaucucuugcucccaucuggaguguagaacguucuuucucacccaaggcgcccugcuuaaugauaaacacagcaacgggacaguuaaggaccggucuccguaucgcgcccugauguccugcccccucggagaagcuccuagccccuacaauuccaaguucgagucuguggccuggagcgcuuccgccugucaugauggcaugggguggcugaccaucggaauuagcggcccugacaacggggcggucgccgugcugaaauauaagggaaucauuacaggcaccaucaaaucuuggagaaagcagauucuccggacgcaggaauccgagugcguuuguaugaacggcagcugcuuuacaaucaugaccgaugggcccucuaauggagcugccagcuacaaaaucuucaagauugagaagggcaaagugacaaaguccaucgaacugaacgcuccuaauuuucacuaugaggaauguucuugcuacccggacaccgggauugucaugugugugugccgcgauaacuggcacggaagcaauagacccuggguguccuucaaccagaaucuugacuaccaaaucggcuauauuugcagcggggucuuuggagauaacccucggcccaaagacggcgagggcucuuguaauccuguuaccguggauggggccgacggagugaagggcuucuccuacaaauaugacgauggggucuggaucggacgcacaaagagcaacagacugcggaaaggcuuugagaugauuugggaccccaauggguggacgaacaccgauucugacuucuccgugaagcaggauguuguggcgaucacagacuggagcggcuacuccggaucuuuuguccagcauccggaacucaccggccuggauugcauccgcccuuguuucuggguggagcuuguuagagggcugccccgggaaaauacaaccauuuggacgagcggauccucuaucagcuucugcggcgugaacuccgacacagccaauuggagcuggccugauggggcugagcuccccuuuaccauugacaaguga

SEQ ID NO: 216636 - RNA, 1413 nt, Artificial Sequence
  derived and/or modified CDS sequence (opt5) from neuraminidase__InfluenzaA__AHL89705
augaaccccaaucagaagaucauuaccaucggcagcauuuccaucgccauugggaucaucucucugaugcuccaaauuggaaacaucauuagcaucugggcuucccacucuauucagaauggcagccagaaccauacagggaucugcaaucagagaauuaucacguacgagaacuccaccugggugaaucacacauaugucucuaucaacaauaccaacguuguggccggaaaagacaagacaagcgugacccuggcgggcaauuccagccuuuguucuauuuccgggugggcuaucuacacaaaagauaacagcauucggaucggaucuaagggcgacgucuucgugauucgcgaaccuuuuaucuccugcagccaucuggaguguagaaccuucuuucucacgcaaggcgcccugcuuaaugauaaacacucuaacgggaccguuaaggaccgguccccguaucgcgcccugaugagcugcccccucggagaagcuccuucccccuacaauucuaaguucgagagcguggccugguccgcuagcgccugucaugauggcaugggguggcugacaaucggaauuucuggcccugacaacggggcggucgccgugcugaaauauaacggaaucauuaccgaaacaaucaaguccuggaaaaagcggauucucagaacccaggagagcgagugcguuugugugaauggcucuugcuuuacgaucaugacagauggccccagcaacggggcugccuccuacaaaaucuucaagauugaaaagggaaaagucaccaagucuaucgagcugaaugcuccuaacuuucacuaugaagaguguagcugcuacccggacacaggcaccgugaugugugugugccgcgauaauuggcacggguccaacagacccugggucagcuucaaucagaaccuugacuaccagauuggauauaucugcucuggcguuuuuggggauaauccucggcccaaagacggaaagggcuccuguaacccugugaccguggauggcgccgacggggucaaaggauucagcuacaaguauggcaaugggguguggauuggacgcacaaaaucuaacagacugcggaagggcuuugagaugaucugggaccccaauggguggacggauaccgacuccgauuucagcguuaagcaagacguggucgcgauuacagauugguccggcuacucuggcagcuuugugcagcauccggaacucaccggacuggacugcauccgcccuuguuucuggguugagcuugugagagggcugccccgggaaaacacaaccaucuggacguccggaucuagcauuuccuucugcggcgucgauagcgacacagccaauuggucuuggccugauggggcugagcuccccuuuaccaucgacaaauga

SEQ ID NO: 216637 - RNA, 1413 nt, Artificial Sequence; identical to SEQ ID NO: 208102
  derived and/or modified CDS sequence (opt5) from neuraminidase__InfluenzaA__AHL89717

SEQ ID NO: 216638 - RNA, 1413 nt, Artificial Sequence; identical to SEQ ID NO: 208102
  derived and/or modified CDS sequence (opt5) from neuraminidase__InfluenzaA__AHL89729

SEQ ID NO: 216639 - RNA, 1413 nt, Artificial Sequence
  derived and/or modified CDS sequence (opt5) from neuraminidase__InfluenzaA__AHL89753
augaaccccaaucagaagaucauuaccaucggcagcauuuccaucgccauugggaucaucucucugaugcuccaaauuggaaacaucauuagcaucugggcuucccacucuauucagacaggcagccagaaucauacggggaucugcaaccagagaauuaucaccuacgagaauagcacaugggugaaccacaccuaugucucuaucaauaacacaaauguuguggccggaaacgacaaaaccagcgugacacuggcgggcaauuccagccuuuguucuauuuccgggugggcuaucuacaccaaggauaacagcauucggaucggaucuaaaggcgacgucuucgugauucgcgaaccuuuuaucuccugcagccaucuggaguguagaacguucuuucucacccaaggcgcccugcuuaaugauaagcacucuaacgggacaguuaaagaccgguccccguaucgcgcccugaugagcugcccccucggagaagcuccuucccccuacaauucuaaguucgagagcguggccugguccgcuagcgccugucaugauggcaugggguggcugaccaucggaauuucuggcccugacaacggggcggucgccgugcugaaguauaacggaaucauuacagaaaccaucaaauccuggaagaaacggauucucagaacgcaggagagcgagugcguuugugugaauggcucuugcuuuacaaucaugaccgauggccccagcaacggggcugccuccuacaagaucuucaaaauugaaaagggaaaggucacaaaaucuaucgagcugaaugcuccuaacuuucacuaugaagaguguagcugcuacccggacaccggcaccgugaugugugugugccgcgauaauuggcacggguccaacagacccugggucagcuucaaucagaaccuugacuaccagauuggauauaucugcucuggcguuuuuggggauaauccucggcccaaggacggaaaaggcuccuguaacccugugacaguggauggcgccgacggggucaagggauucagcuacaaauauggcaaugggguguggauuggacgcacgaagucuaacagacugcggaaaggcuuugagaugaucugggaccccaauggguggaccgauacagacuccgauuucagcguuaagcaagacguggucgcgauuaccgauugguccggcuacucuggauccuuugugcagcauccggaacucacaggccuggacugcauccgcccuuguuucuggguugagcuugugagagggcugccccgggaaaacaccacgaucuggacauccggaucuagcauuuccuucugcggcgucgauagcgacaccgccaauuggucuuggccugauggggcugagcuccccuuuaccaucgacaaguga

SEQ ID NO: 216640 - RNA, 1413 nt, Artificial Sequence; identical to SEQ ID NO: 208102
  derived and/or modified CDS sequence (opt5) from neuraminidase__InfluenzaA__AHL89765

SEQ ID NO: 216641 - RNA, 1413 nt, Artificial Sequence; identical to SEQ ID NO: 208143
  derived and/or modified CDS sequence (opt5) from neuraminidase__InfluenzaA__AHL89777

SEQ ID NO: 216642 - RNA, 1413 nt, Artificial Sequence; identical to SEQ ID NO: 208102
  derived and/or modified CDS sequence (opt5) from neuraminidase__InfluenzaA__AHL89789

SEQ ID NO: 216643 - RNA, 1413 nt, Artificial Sequence
  derived and/or modified CDS sequence (opt5) from neuraminidase__InfluenzaA__AHL89801
augaaccccaaucagaagaucauuaccaucggcagcauuuccaucgccauugggaucaucucucugaugcuccaaauuggaaacaucauuagcaucugggcuucccacucuauucagacaggcagccagaaucauacggggaucugcaaccagagaauuaucaccuacgaaaauuccacaugggugaaccacaccuaugucaauaucaacaauacaaacguuguggccggaaaagacaagaccucuguggcgcuggcuggcaauagcucccuuuguagcauuucugggugggccaucuacacaaaagauaacuccauucggaucggaagcaagggcgacgucuucgugauucgcgagccuuuuaucucuugcucccaucuggaguguagaaccuucuuucucacgcaaggcgcccugcuuaaugauaaacacagcaacgggaccguuaaggaccggucuccguaucgcgcucugauguccugcccccucggagaagccccuagccccuacaauuccaaguucgagucuguggcuuggagcgccuccgcgugucaugauggcaugggguggcugacaaucggaauuagcggcccugacaacggggccgucgcugugcugaaauauaacggaaucauuaccgaaacaaucaagucuuggaaaaagcggauucucagaacccaggaguccgagugcguuugugugaauggcagcugcuuuacgaucaugacagauggccccucuaacggggccgcuagcuacaaaaucuucaagauugaaaagggaaaagucaccaaguccaucgagcugaaugccccuaacuuucacuaugaagaguguucuugcuacccggacacaggcaccgugaugugugugugccgcgauaauuggcacgggagcaacagacccugggucuccuucaaucagaaccuugacuaccagauuggauauaucugcagcggcguuuuuggggauaauccucggcccaaagacggaaagggcucuuguaacccugugaccguggauggcgcggacggggucaaaggauucuccuacaaguauggcaaugggguguggauuggacgcacaaaaagcaacagacugcggaagggcuuugagaugaucugggaccccaauggguggacgaacaccgauucugacuucuccguuaagcaagauguggucgccauuacagacuggagcggcuacuccggaucuuuugugcagcauccggaacucaccggccuggauugcauccgcccuuguuucuggguugagcuugugagagggcugccccgggaaaauacaaccaucuggacgagcggauccucuauuagcuucugcggcgucgacuccgauacagcuaacuggagcuggccugacggggccgagcuccccuuuaccaucgauaaauga

SEQ ID NO: 216644 - RNA, 1413 nt, Artificial Sequence
  derived and/or modified CDS sequence (opt5) from neuraminidase__InfluenzaA__AHL89813
augaaccccaaucagaagaucauuaccaucggcagcauuuccaucgccauugggaucaucucucugaugcuccaaauuggaaacaucauuagcaucugggcuucccacucuauucagacaggcagccagaaucauacggggaucugcaaccagagaauuaucaccuacgaaaauuccacaugggugaaccacaccuaugucaauaucaacaauacaaacguuguggccggaaaagacaagaccucugugacacuggcgggcaauagcucccuuuguagcauuucugggugggcuaucuacaccaaagauaacuccauucggaucggaagcaagggcgacgucuucgugauucgcgagccuuuuaucucuugcucccaucuggaguguagaacguucuuucucacccaaggcgcccugcuuaaugauaaacacagcaacgggacaguuaaggaccggucuccguaucgcgcccugauguccugcccccucggagaagcuccuagccccuacaauuccaaguucgagucuguggccuggagcgcuuccgccugucaugauggcaugggguggcugaccaucggaauuagcggcccugacaacggggcggucgccgugcugaaauauaacggaaucauuacagaaaccaucaagucuuggaaaaagcggauucucagaacgcaggaguccgagugcguuugugugaauggcagcugcuuuacaaucaugaccgauggccccucuaacggggcugccagcuacaaaaucuucaagauugaaaagggaaaagucacaaaguccaucgagcugaaugcuccuaacuuucacuaugaagaguguucuugcuacccggacaccggcaccgugaugugugugugccgcgauaauuggcacgggagcaacagacccugggucuccuucaaucagaaccuugacuaccagguuggauauauuugcagcggcguguuuggggauaauccucggcccaaagacggaaagggcucuuguaacccuaugacagccgauggcgcggacggggugaaaggauucuccuacaaguauggcaauggggucuggaucggacgcacgaaaagcaacaagcugagaaagggcuuugagaugauuugggaccccaauggguggaccgauacagacucugauuucuccgugaaacaagacguuguggccaucaccgauuggagcggcuacuccggaucuuuuguccagcauccggaacucacaggccuggacugcauucggccuuguuucuggguggagcuuguucgcgggcugcccagagaaaacgcuaccaucuggacgagcggauccucuaucagcuucugcggcguggauuccgacacagccaauuggagcuggccugauggggcugagcuccccuuuaccauugacaaguga

SEQ ID NO: 216645 - RNA, 1413 nt, Artificial Sequence; identical to SEQ ID NO: 208143
  derived and/or modified CDS sequence (opt5) from neuraminidase__InfluenzaA__AHL89825

SEQ ID NO: 216646 - RNA, 1413 nt, Artificial Sequence; identical to SEQ ID NO: 208102
  derived and/or modified CDS sequence (opt5) from neuraminidase__InfluenzaA__AHL89837

SEQ ID NO: 216647 - RNA, 1413 nt, Artificial Sequence
  derived and/or modified CDS sequence (opt5) from neuraminidase__InfluenzaA__AHL89849
augaaccccaaucagaagaucauuaccaucggcagcauuuccaucgccauugggaucaucucucugaugcuccaaauuggaaacaucauuagcaucugggcuucccacucuauucagacaggcagccagaaucauacggggaucugcaaccagagaauuaucaccuacgagaauagcacaugggugaaccacaccuaugucuacaucaauaacacaaauguuguggccggaaaagacaagaccucugugacacuggcgggcaacagcucccuuuguagcauuucugggugggcuaucuauaccaaagauaauuccauucggaucggaagcaagggcgacgucuucgugauucgcgaaccuuuuaucucuugcucccaucuggaguguagaacguucuuucucacccaaggcgcccugcuuaacgauaaacacagcaaugggacaguuaaggaccggucuccguaccgcgcccugauguccugcccccucggagaagcuccuagccccuauaacuccaaguucgagucuguggccuggagcgcuuccgccugucaugauggcaugggguggcugaccaucggaauuagcggcccugacaauggggcggucgccgugcugaaauacaacggaaucauuacagaaaccaucaagucuuggaaaaagcggauucucagaacgcaggaguccgagugcguuugugugaacggcagcugcuuuacaaucaugaccgauggccccucuaauggggcugccagcuauaaaaucuucaagauugaaaagggaauggucacaaaauccaucgagcugaacgcuccuaauuuucacuacgaagaguguucuugcuacccggacaccggcaccgugaugugugugugccgcgauaacuggcacgggagcaauagacccugggucuccuucaaccagaaucuugacuaucagauuggauacaucugcagcggcguuuuuggggauaacccucggcccaaggacggaaaaggcucuuguaauccugugacaguggauggcgccgacggggucaagggauucuccuauaaauacggcaacgggguguggauuggacgcacgaaguccaauagacugcggaaaggcuuugagaugaucugggaccccaacggguggaccaauacagauucugacuucuccguuaagcaagauguggucgcgauuaccgacuggagcggcuauuccggaucuuuugugcagcauccggaacucacaggccuggauugcauccgcccuuguuucuggguugagcuugugagagggcugccccgggaaaacaccacgaucuggacaagcggauccucuauuagcuucugcggcgucgacuccgauaccgccaauuggagcuggccugacggggcugagcuccccuuuaccaucgauaaguga

SEQ ID NO: 216648 - RNA, 1410 nt, Artificial Sequence; identical to SEQ ID NO: 208138
  derived and/or modified CDS sequence (opt5) from neuraminidase__InfluenzaA__AHL89861

SEQ ID NO: 216649 - RNA, 1410 nt, Artificial Sequence
  derived and/or modified CDS sequence (opt5) from neuraminidase__InfluenzaA__AHL89873
augaaccccaaucagaagaucauuaccaucggcagcgugucccugacaauuucuacgaucugcuucuuuaugcaaaccgccauucucaucacaaccgucacacugcacuucaaacaguacgaguuuaacagcccuccgaauaaccagguuaugcuuugugaacccaccaucauugagagaaauaucacagaaauuguguaucugaccaacacgaccaucgagaaggaaauuugcccuaaacucgcugaguaccggaauugguccaagccccagugugacaucacaggguucgccccuuuuucuaaagauaacagcauucgccuguccgcgggaggcgacaucugggugaccagagagcccuaugucucuugcgauccugacaaguguuaccaauucgcucuugggcagggaacaacccugaauaacgugcauagcaaugauacgguucgggaccgcacaccguauagaacccuccugaugaacgaacugggcgugcccuuucaccucgggacaaagcaggucugcaucgccugguccucuagcuccugucaugauggaaaagccuggcugcacgugugcauuaccggcgacgauaagaaugcuaccgccagcuucaucuacaacggccggcuuguugacucuauuguguccuggagcaaagagauccugcgcacacaggaaucugagugugucugcauuaaugggacguguaccguggugaugacagauggauccgcuagcggcaaggccgacaccaaaauccucuuuaucgaggaagggaagauuguccauacauccacccugucuggaagcgcgcaacacguugaggaaugcuccugcuauccuagauaccccggcgugcggugugugugccgcgauaacuggaaggggagcaacagaccuaucgucgacauuaauaucaaagaccacucuauuguguccagcuacguuuguucuggacuugugggcgauacgccccggaagaacgacagcuccucuagcucccauugccuggauccgaauaacgaggaaggcgggcacggagucaaaggcugggccuucgacgaugggaaugacguguggaugggacgcacaaucagcgagaagucuagacucggcuaugagaccuuuaaaguuaucgaagggugguccaacccuaagagcaaacugcagauuaaucgccaggugaucgucgauggaggcaaccggucuggcuacuccgggauuuucagcguggagggaaaguccuguaucaauagaugcuuuuaugucgaacugauucggggcagaaaggaggaaaccgaggugcucuggacaucuaacagcaucguuguguucugugggaccuccggaacauacggcacggggucuuggcccgacggcgcugauauuaaucugaugccuaucuga

SEQ ID NO: 216650 - RNA, 1410 nt, Artificial Sequence; identical to SEQ ID NO: 208815
  derived and/or modified CDS sequence (opt5) from neuraminidase__InfluenzaA__AHL89885

SEQ ID NO: 216651 - RNA, 1410 nt, Artificial Sequence
  derived and/or modified CDS sequence (opt5) from neuraminidase__InfluenzaA__AHL89897
augaaccccaaucagaagaucauuaccaucggcagcgugucccugacaauuucuacgaucugcuucuuuaugcaaauugccauccucaucaccacagucacccugcacuucaaacaguacgaguuuaacagcccuccgaauaaccagguuaugcuuugugaacccacaauuaucgagagaaauauuaccgaaaucguguaucugacaaacaccacgauugagaaggaaaucugcccuaaacucgcugaguaccggaauugguccaagccccagugugacauuaccggguucgccccuuuuucuaaagauaacagcauccgccuguccgcgggaggcgacaucugggugacaagagagcccuaugucucuugcgauccugacaaguguuaccaauucgcucuugggcagggaaccacacugaauaacgugcauagcaaugauaccguucgggaccgcacgccguauagaacacuccugaugaacgaacugggcgugcccuuucaccucgggaccaagcaggucugcauugccugguccucuagcuccugucaugauggaaaagccuggcugcacgugugcaucacaggcgacgauaagaaugcuaccgccagcuucauuuacaacggccggcuuguugacucuaucguguccuggagcaaagagauucugcgcacccaggaaucugagugugucugcaucaaugggacauguacgguggugaugaccgauggauccgcuagcggcaaggccgacacaaaaauccucuuuauugaggaagggaagaucguccauaccuccacacugucuggaagcgcgcaacacguugaggaaugcuccugcuauccuagauaccccggcgugcggugugugugccgcgauaacuggaaggggagcaacagaccuauugucgacaucaauauuaaagaccacucuaucguguccagcuacguuuguucuggacuugugggcgauacgccccggaagaacgacagcuccucuagcucccauugccuggauccgaauaacgaggaaggcgggcacggagucaaaggcugggccuucgacgaugggaaugacguguggaugggacgcaccaucagcgagaagucuagacucggcuaugagacauuuaaaguuauugaagggugguccaacccuaagagcaaacugcagaccaaucgccaggugaucgucgaucggggaaacagaucuggcuacuccggcauuuucagcguggaggggaaguccuguaucaaucggugcuuuuaugucgaacugauuagaggacgcaaggaggaaaccgaggugcucuggacaucuaacagcaucguuguguucuguggcaccuccgggacauacggaacgggcucuuggcccgacggggcugauauuaaucugaugccuaucuga

SEQ ID NO: 216652 - RNA, 1410 nt, Artificial Sequence; identical to SEQ ID NO: 208474
  derived and/or modified CDS sequence (opt5) from neuraminidase__InfluenzaA__AHL89909

SEQ ID NO: 216653 - RNA, 1410 nt, Artificial Sequence; identical to SEQ ID NO: 208113
  derived and/or modified CDS sequence (opt5) from neuraminidase__InfluenzaA__AHL89921

SEQ ID NO: 216654 - RNA, 1410 nt, Artificial Sequence; identical to SEQ ID NO: 208474
  derived and/or modified CDS sequence (opt5) from neuraminidase__InfluenzaA__AHL89933

SEQ ID NO: 216655 - RNA, 1410 nt, Artificial Sequence; identical to SEQ ID NO: 208113
  derived and/or modified CDS sequence (opt5) from neuraminidase__InfluenzaA__AHL89945

SEQ ID NO: 216656 - RNA, 1410 nt, Artificial Sequence
  derived and/or modified CDS sequence (opt5) from neuraminidase__InfluenzaA__AHL89957
augaaccccaaucagaagaucauuaccaucggcagcgugucccugacaauuucuacgaucugcuucuuuaugcaaauugccauccucaucaccacagucacccugcacuucaaacaguacgaguuuaacagcccuccgaauaaccagguuaugcuuugugaacccacaauuaucgagagaaauauuaccgaaaucguguaucugacaaacaccacgauugagaaggaaaucugcccuaaacucgcugaguaccggaauugguccaagccccagugugacauuaccggguucgccccuuuuucuaaagauaacagcauccgccuguccgcgggaggcgacaucugggugacaagagagcccuaugucucuugcgauccugacaaguguuaccaauucgcucuugggcagggaaccacacugaauaacgugcauagcaaugauaccguucgggaccgcacgccguauagaacacuccugaugaacgaacugggcgugcccuuucaccucgggaccaagcaggucugcauugccugguccucuagcuccugucaugauggaaaagccuggcugcacgugugcaucacaggcgacgauaagaaugcuaccgccagcuucauuuacaacggccggcuuguugacucuaucguguccuggagcaaagagauucugcgcacccaggaaucugagugugucugcaucaaugggacauguacgguggugaugaccgauggauccgcuagcggcaaggccgacacaaaaauccucuuuauuaaggaggggaagaucguccauaccuccacacugucuggaagcgcgcaacacguugaagagugcuccugcuauccuagauaccccggcgugcggugugugugccgcgauaacuggaaagggagcaacagaccuauugucgacaucaauauuaaggaccacucuaucguguccagcuacguuuguucuggacuugugggcgauacgccccggaaaaacgacagcuccucuagcucccauugccuggauccgaauaacgaagagggcgggcacggagucaagggcugggccuucgacgaugggaaugacguguggaugggacgcaccaucagcgaaaaaucuagacucggcuaugagacauuuaagguuauugaggggugguccaacccuaaaagcaagcugcagaucaaucgccaggugauugucgaucggggaaacagaucuggcuacuccggcaucuucagcguggaagggaaguccuguauuaaucggugcuuuuaugucgagcugaucagaggacgcaaagaagagaccgaagugcucuggaccucuaacagcauuguuguguucuguggcacauccgggaccuacggaacaggcucuuggcccgacggggcugauaucaaucugaugccuaucuga

SEQ ID NO: 216657 - RNA, 1410 nt, Artificial Sequence; identical to SEQ ID NO: 207956
  derived and/or modified CDS sequence (opt5) from neuraminidase__InfluenzaA__AHL89969

SEQ ID NO: 216658 - RNA, 1410 nt, Artificial Sequence; identical to SEQ ID NO: 207956
  derived and/or modified CDS sequence (opt5) from neuraminidase__InfluenzaA__AHL89981

SEQ ID NO: 216659 - RNA, 1410 nt, Artificial Sequence
  derived and/or modified CDS sequence (opt5) from neuraminidase__InfluenzaA__AHL89993
augaaccccaaucagaagaucauuaccaucggcagcgugucccugucuauuagcacaaucugcuucuuuaugcaaauugccauccucaucacgaccgucacacugcacuucaaacaguacgaguuuaacuccccuccgaauaaccagguuaugcuuugugaacccaccauuaucgagagaaauauuacagaaaucguguaucugaccaacacaaccauugagaaggaaaucugcccuaaacucgcugaguaccggaauuggucuaagccccagugugacauuacgggguucgccccuuuuagcaaagauaacuccauccgccugucugcgggaggcgacaucugggugaccagagagcccuaugucagcugcgauccugacaaguguuaccaauucgcucuugggcagggaacaacccugaauaacgugcauuccaaugauacaguucgggaccgcaccccguauagaacgcuccugaugaacgaacugggcgugcccuuucaccucgggacaaagcaggucugcauugccuggucuagcuccagcugucaugauggaaaagccuggcugcacgugugcaucaccggcgacgauaagaaugcuacagccucuuucauuuacaacggccggcuuguugacuccaucgugagcuggucuaaagagauucugcgcacccaggaauccgagugugucugcaucaaugggaccuguacacucgugaugacggauggaagcgcuuccggcaaggccgacaccaaaauccuguuuauugaggaagggaagaucgugcauacaucuacccuuagcggauccgcgcaacacgucgaggaaugcagcugcuauccuagauaccccggcguucggugugugugccgcgauaacuggaaggggucuaacagaccuauuguggacaucaauauuaaagaccacuccaucgucagcucuuacguguguagcggacugguuggcgauacaccccggaagaacgacuccucuagcuccagccauugccucgauccgaauaacgaggaaggcgggcacggagugaaaggcugggccuucgacgaugggaaugacgucuggaugggacgcaccaucucugagaaguccagacugggcuaugagacguuuaaagugauugaaggguggagcaacccuaagucuaaacugcagaucaaucggcagguuauuguggaucgcggaaacagauccggcuacagcggcaucuucuccgucgaggggaagucuuguauuaaucggugcuuuuauguggaacucaucagaggacgcaaggaggaaacagagguccuguggaccagcaacuccauugugguuuucuguggcaccucugggacauacggaaccggcagcuggcccgacggggcugauaucaaucuuaugccuaucuga

SEQ ID NO: 216660 - RNA, 1410 nt, Artificial Sequence
  derived and/or modified CDS sequence (opt5) from neuraminidase__InfluenzaA__AHL90005
augaaccccaaucagaagaucauuaccaucggcagcgugucccugacaauuucuacgaucugcuucuuuaugcaaauugccauccucaucaccacagucacccugcacuucaaacaguacgaguuuagcuccccuccgaacaaucagguuaugcuuugugaacccacaauuaucaagagaaacauuaccgagaucguguaucugacaaauaccacgauugaaaaagagaucugcccuaagcucgcugaauaccggaacuggucuaaaccccagugugacauuaccggguucgccccuuuuagcaaggauaauuccauccgccugucugcgggaggcgacaucugggugacaagagagcccuaugucagcugcgauccugacaaguguuaccaauucgcucuugggcagggaaccacacugaacaaugugcauuccaacgauaccguucacgaccggacgccguaucgcacacuccugaugaaugagcugggcgugcccuuucaucucgggaccaaacaggucugcauugccuggagcagcuccagcugucacgauggaaaggccuggcugcaugugugcguuacaggcgacgauaaaaacgcuaccgccucuuucaucuacaauggcagacuuguggacuccauugucagcuggucuaaggaaauccugcggacccaggaguccgaaugugugugcauuaacgggacauguacgguggucaugaccgauggaagcgcuuccggcaaagccgacacaaagauccucuuuaucgaggaggggaagauuguucacaccucuacacugagcggauccgcgcaacacguggaagagugcagcugcuauccucgcuaccccggcgugagaugugucugccgggauaauuggaaagggucuaaccgcccuaucguggacauuaacaucaaggacuacuccauuguuagcagauauguguguucuggacuugucggcgauacgccccggaaaaaugacagcuacuccucuagccauugccuggauccgaacaaugaagagggcgggcacggagugaagggcugggccuucgacgaugggaacgacguuuggaugggacgcaccaucuccgaaaaaucuagaucuggcuaugagacauuuaaggugaucgaggggugguccaauccuaacagcaaacuccagauuaaucggcaggucaucguggaucgcggaaacagaucuggcuacuccggcauuuucagcgucgaagggaaguccuguaucaaucggugcuuuuauguggagcugauuagaggacgcaaggaagagaccgaaguucuguggaccucuaacagcaucguggucuucuguggcacauccgggaccuacggaacaggcucuuggcccgacggggcugauauuaaucucaugccuaucuga

SEQ ID NO: 216661 - RNA, 1410 nt, Artificial Sequence; identical to SEQ ID NO: 208162
  derived and/or modified CDS sequence (opt5) from neuraminidase__InfluenzaA__AHL90017

SEQ ID NO: 216662 - RNA, 1410 nt, Artificial Sequence; identical to SEQ ID NO: 208113
  derived and/or modified CDS sequence (opt5) from neuraminidase__InfluenzaA__AHL90029

SEQ ID NO: 216663 - RNA, 1410 nt, Artificial Sequence; identical to SEQ ID NO: 208129
  derived and/or modified CDS sequence (opt5) from neuraminidase__InfluenzaA__AHL90041

SEQ ID NO: 216664 - RNA, 1410 nt, Artificial Sequence; identical to SEQ ID NO: 208129
  derived and/or modified CDS sequence (opt5) from neuraminidase__InfluenzaA__AHL90053

SEQ ID NO: 216665 - RNA, 1410 nt, Artificial Sequence; identical to SEQ ID NO: 214394
  derived and/or modified CDS sequence (opt5) from neuraminidase__InfluenzaA__AHL90065

SEQ ID NO: 216666 - RNA, 1410 nt, Artificial Sequence; identical to SEQ ID NO: 216656
  derived and/or modified CDS sequence (opt5) from neuraminidase__InfluenzaA__AHL90077

SEQ ID NO: 216667 - RNA, 1410 nt, Artificial Sequence; identical to SEQ ID NO: 208138
  derived and/or modified CDS sequence (opt5) from neuraminidase__InfluenzaA__AHL90089

SEQ ID NO: 216668 - RNA, 1410 nt, Artificial Sequence; identical to SEQ ID NO: 208815
  derived and/or modified CDS sequence (opt5) from neuraminidase__InfluenzaA__AHL90101

SEQ ID NO: 216669 - RNA, 1410 nt, Artificial Sequence; identical to SEQ ID NO: 208113
  derived and/or modified CDS sequence (opt5) from neuraminidase__InfluenzaA__AHL90113

SEQ ID NO: 216670 - RNA, 1413 nt, Artificial Sequence; identical to SEQ ID NO: 208704
  derived and/or modified CDS sequence (opt5) from neuraminidase__InfluenzaA__AHL90125

SEQ ID NO: 216671 - RNA, 1413 nt, Artificial Sequence
  derived and/or modified CDS sequence (opt5) from neuraminidase__InfluenzaA__AHL90136
augaaccccaaucagaagaucauuaccaucggcagcauuuccaucgccauugggaucaucucucugaugcuccaaauuggaaacaucauuagcaucugggcuucccacucuauucagacaggcagccagaauaacacggggaucugcaaucagagaauuaucaccuacgagaacuccacaugggugaaucauaccuaugucaacaucaauaacacaaauguuguggccggagaagacaaaaccucugugacacuggcgggcaacagcucccuuuguagcauuucugggugggcuaucuacaccaaggauaauuccauucggaucggaagcaaaggcgacgucuucgugauucgcgagccuuuuaucucuugcucccaccuggaauguagaacguucuuucucacccaaggcgcccugcuuaacgauaagcauagcaaugggacaguuaaagaccggucuccguaucgcgcccugauguccugcccccucggagaggcuccuagccccuacaacuccaaguucgaaucuguggccuggagcgcuuccgccugucacgauggcaugggguggcugaccaucggaauuagcggcccugacaacggggcggucgccgugcugaaguauaauggaaucauuacaggcaccaucaaaucuuggaagaaacagauucucagaacgcaggaguccgagugcguuuguaugaacggcagcugcuuuacaaucaugaccgaugggcccucuaauaaggcugccagcuacaaaaucuucaagauugaaaagggaaaagugacaaaguccaucgagcugaacgcuccuaauuuuuauuacgaagaguguucuugcuacccggacagcggcauggucaugugugugugccgggauaacuggcauggguccaaucgccccugggugagcuucaaccagaaucuugacuaucaaauuggauacaucugcucuggcgucuuuggggauaacccuagacccgaggacggagaaggcuccuguaauccuguuaccguggauggcgccaacggggugaaaggauucagcuauaaguacggcaauggggucuggauuggacggaccaaaucuaaccgccugagaaagggcuuugagaugaucugggaccccaauggguggacaaacacggacuccgauuucagcgugaaacaggacguuguggcgauuaccgauugguccggcuauucuggcagcuuuguccagcacccggaacucacaggacuggacugcauccggccuuguuucuggguggagcuuguucgcgggcugcccagagaaaacaccacaaucuggaccuccggaucuagcauuuccuucugcggcgugaauagcgauacggccaacuggucuuggccugacggggcugagcuccccuuuacaaucgauaaguga

SEQ ID NO: 216672 - RNA, 1413 nt, Artificial Sequence; identical to SEQ ID NO: 208704
  derived and/or modified CDS sequence (opt5) from neuraminidase__InfluenzaA__AHL90160

SEQ ID NO: 216673 - RNA, 1413 nt, Artificial Sequence
  derived and/or modified CDS sequence (opt5) from neuraminidase__InfluenzaA__AHL90172
augaaccccaaucagaagaucauuaccaucggcagcauuuccaucgccauugggaucaucucucugaugcuccaaauuggaaacaucauuagcaucugggcuucccacucuauucagacaggcagccagaauaacacggggaucugcaaucagagaauuaucaccuacgagaacuccacaugggugaaucauaccuaugucaacaucaauaacacaaauguuguggccggagaagacaaaaccucugugacacuggcgggcaacagcucccuuuguagcauuucugggugggcuaucuacaccaaggauaauuccauucggaucggaagcaaaggcgacgucuucgugauucgcgagccuuuuaucucuugcucccaccuggaauguagaacguucuuucucacccaaggcgcccugcuuaacgauaagcauagcaaugggacaguuaaagaccggucuccguaucgcgcccugauguccugcccccucggagaggcuccuagccccuacaacuccaaguucgaaucuguggccuggagcgcuuccgccugucacgauggcaugggguggcugaccaucggaauuagcggcccugacaacggggcggucgccgugcugaaguauaauggaaucauuacaggcaccaucaaaucuuggaagaaacagauucucagaacgcaggaguccgagugcguuuguaugaacggcagcugcuuuacaaucaugaccgaugggcccucuaauaaggcugccagcuacaaaaucuucaagauugaaaagggaaaagugacaaaguccaucgagcugaacgcuccuaauuuucauuaugaagaguguucuugcuacccggacaccggcauugucaugugugugugccgggauaacuggcacgggagcaaucgccccuggguguccuucaaccagaaucuugacuaccaaaucggauauauuugcagcggcgucuuuggggauaacccuagacccgaggacggagaaggcaauuguaacccuguuaccguggauggcgccaauggggugaaaggauucucuuacaaguauggcaacggggucuggaucggacggacaaaauccaaucgccugagaaagggcuuugagaugauuugggaccccaacggguggacgaacaccgacagcgauuucucugugaaacaggacguuguggcgaucacagauugguccggcuacagcggauccuuuguccagcacccggaacucaccggccuggacugcauccggccuuguuucuggguggagcuuguucgcgggcugcccagagaaaauacaaccauuuggacgucuggaagcuccaucucuuucugcggcgugaacagcgauacagccaauugguccuggccugacggggcugagcuccccuuuaccauugauaaguga

SEQ ID NO: 216674 - RNA, 1413 nt, Artificial Sequence; identical to SEQ ID NO: 208704
  derived and/or modified CDS sequence (opt5) from neuraminidase__InfluenzaA__AHL90184

SEQ ID NO: 216675 - RNA, 1413 nt, Artificial Sequence; identical to SEQ ID NO: 212002
  derived and/or modified CDS sequence (opt5) from neuraminidase__InfluenzaA__AHL90196

SEQ ID NO: 216676 - RNA, 1413 nt, Artificial Sequence; identical to SEQ ID NO: 208704
  derived and/or modified CDS sequence (opt5) from neuraminidase__InfluenzaA__AHL90220

SEQ ID NO: 216677 - RNA, 1413 nt, Artificial Sequence
  derived and/or modified CDS sequence (opt5) from neuraminidase__InfluenzaA__AHL90232
augaaccccaaucagaagaucauuaccaucggcagcauuuccaucgccauugggaucaucucucugaugcuccaaauuggaaacaucauuagcaucugggcuucccacucuauucagacaggcagccagaauaacacggggaucugcaaucagagaauuaucaccuacgagaacuccacaugggugaaucauaccuaugucaacaucaauaacacaaauguuguggccggagaagacaaaaccucugugacacuggcgggcaacagcucccuuuguagcauuucugggugggcuaucuacaccaaggauaauuccauucggaucggaagcaaaggcgacgucuucgugauucgcgagccuuuuaucucuugcucccaccuggaauguagaacguucuuucucacccaaggcgcccugcuuaacgauaagcauagcaaugggacaguuaaagaccggucuccguaucgcgcccugauguccugcccccucggagaggcuccuagccccuacaacuccaaguucgaaucuguggccuggagcgcuuccgccugucacgauggcaugggguggcugaccaucggaauuagcggcccugacaacggggcggucgccgugcugaaguauaauggaaucauuacaggcaccaucaaaucuuggaagaaacagauucucagaacgcaggaguccgagugcguuuguaugaacggcagcugcuuuacaaucaugaccgaugggcccucuaauaaggcugccagcuacaaaaucuucaagauugaaaagggaaaagugacaaaguccaucgagcugaacgcuccuaauuuucauuaugaagaguguucuugcuacccggacaccggcauugucaugugugugugccgggauaacuggcacgggagcaaucgccccuggguguccuucaaccagaaucuugacuaccaaaucggauauauuugcagcggcgucuuuggggauaacccuagacccgaggacggagaaggcucuuguaauccuguuaccgugaacggcgccaauggggugaaaggauucuccuacaaguaugauaacggcgucuggaucgggcggacaaaaagcaaucgccugagaaagggauuugagaugauuugggaccccaacggcuggacgaacaccgacucugauuucuccgugaaacaggacguuguggcgaucacagauuggagcggguacuccggcucuuuuguccagcacccggaacucaccggacuggacugcauccggccuuguuucuggguggagcuuguucgcggccugcccagagaaaauacaaccauuuggacgagcggguccucuaucagcuucugcggagugaacuccgauacagccaauuggagcuggccugacggcgcugagcuccccuuuaccauugauaaguga

SEQ ID NO: 216678 - RNA, 1413 nt, Artificial Sequence
  derived and/or modified CDS sequence (opt5) from neuraminidase__InfluenzaA__AHL90244
augaaccccaaucagaagaucauuaccaucggcagcauuuccaucgccauugggaucaucucucugaugcuccaaauuggaaacaucauuagcaucugggcuucccacucuauucagacaggcagccagaauaacacggggaucugcaaucagagaauuaucaccuacgagaacuccacaugggugaaucauaccuaugucaacaucaauaacacaaauguuguggccggagaagacaaaaccucugugacacuggcgggcaacagcucccuuuguagcauuucugggugggcuaucuacaccaaggauaauuccauucggaucggaagcaaaggcgacgucuucgugauucgcgagccuuuuaucucuugcucccaccuggaauguagaacguucuuucucacccaaggcgcccugcuuaacgauaagcauagcaaugggacaguuaaagaccggucuccguaucgcgcccugauguccugcccccucggagaggcuccuagccccuacaacuccaaguucgaaucuguggccuggagcgcuuccgccugucacgauggcaugggguggcugaccaucggaauuagcggcccugacaacggggcggucgccgugcugaaguauaauggaaucauuacaggcaccaucaaaucuuggaagaaacagauucucagaacgcaggaguccgagugcguuuguaugaacggcagcugcuuuacaaucaugaccgaugggcccucuaauaaggcugccagcuacaaaaucuucaagauugaaaagggaaaagugacaaaguccaucgagcugaacgcuccuaauuuucauuaugaagaguguucuugcuacccggacaccggcauugucaugugugugugccgggauaacuggcacgggagcaaucgccccuggguguccuucaaccagaaucuugacuaccaaaucggauauauuugcagcggcgucuuuggggauaacccuagacccgaggacggagaaggcucuuguaauccuaugaccguugauggcgccaacggggugaaaggauucuccuacaaguaugacaauggcguguggaucgggcggacaaaaagcaaccgccugagaaagggauuugagaugauuugggaccccaauggcuggacgaacaccgauucugacuucuccgucaaacaggaugugguugcgaucacagacuggagcggguacuccggcucuuuugugcagcacccggaacucaccggacuggauugcauccggccuuguuucugggucgagcuugugcgcggccugcccagagaaaacacaaccauuuggacgagcggguccucuaucagcuucugcggaguuaauuccgacacagccagcuggucuuggccugauggcgcugagcuccccuuuaccauugacaaguga

SEQ ID NO: 216679 - RNA, 1413 nt, Artificial Sequence; identical to SEQ ID NO: 209533
  derived and/or modified CDS sequence (opt5) from neuraminidase__InfluenzaA__AHL90256

SEQ ID NO: 216680 - RNA, 1413 nt, Artificial Sequence
  derived and/or modified CDS sequence (opt5) from neuraminidase__InfluenzaA__AHL90268
augaaccccaaucagaagaucauuaccaucggcagcauuuccaucgccauugggaucaucucucugaugcuccaaauuggaaacaucauuagcaucugggcuucccacucuauucagacaggcagccagaauaacacggggaucugcaaucagagaauuaucaccuacgagaacuccacaugggugaaucauaccuaugugaacaucaauaacacaaauguuguggccggagaagacaaaaccucugugacacuggcgggcaacagcucccuuuguagcauuucugggugggcuaucuacaccaaggauaauuccauucggaucggaagcaaaggcgacgucuucgugauucgcgagccuuuuaucucuugcucccaccuggaauguagaacguucuuucucacccaaggcgcccugcuuaacgauaagcauagcaaugggacaguuaaagaccggucuccguaucgcgcccugauguccugcccccucggagaggcuccuagccccuacaacuccaaguucgaaucuguggccuggagcgcuuccgccugucacgauggcaugggguggcugaccaucggaauuagcggcccugacaacggggcggucgccgugcugaaguauaauggaaucauuacaggcaccaucaaaucuuggaagaaacagauucucagaacgcaggaguccgagugcguuuguaugaacggcagcugcuuuacaaucaugaccgaugggcccucuaauaaggcugccagcuacaaaaucuucaagauugaaaagggaaaagugacaaaguccaucgagcugaacgcuccuaauuuucauuaugaagaguguucuugcuacccggacaccagcauugucaugugugugugccgggauaacuggcacggcuccaaucgccccugggugagcuucaaccagaaucuugacuaccaaaucggguauauuugcucuggagucuuuggcgauaacccuagacccgaggacggggaaggauccuguaauccuguuaccguggauggcgccaacggcgugaaaggguucagcuacaaguaugacaauggagucuggaucggccggacaaaaucuaaccgccugagaaagggguuugagaugauuugggaccccaauggauggacgaacaccgaucgggacuucuccgugaaacaggauguuguggcgaucacagacuggagcggcuacuccgggucuuuuguccagcacccggaacucaccggccuggauugcauccgcccuuguuucuggguggagcuuguuagaggacugccccgggaaaacacaaccauuuggacgagcggcuccucuaucagcuucugcggggucaauuccgacacagccaacuggagcuggccugauggagcugagcuccccuuuaccauugacaaguga

SEQ ID NO: 216681 - RNA, 1413 nt, Artificial Sequence; identical to SEQ ID NO: 209533
  derived and/or modified CDS sequence (opt5) from neuraminidase__InfluenzaA__AHL90280

SEQ ID NO: 216682 - RNA, 1413 nt, Artificial Sequence
  derived and/or modified CDS sequence (opt5) from neuraminidase__InfluenzaA__AHL90304
augaaccccaaucagaagaucauuaccaucggcagcauuuccaucgccauugggaucaucucucugaugcuccaaauuggaaacaucauuagcaucugggcuucccacucuauucagacaggcagccagaauaacacggagaucugcaaucagagaauuaucaccuacgaaaacuccacaugggugaaucauaccuaugugaacaucaauaacacaaauguuguggccggggaggacaaaaccucugugacacuggcgggaaacagcucccuuuguagcauuucuggcugggcuaucuacaccaaggauaauuccauucggaucgggagcaaaggagacgucuucgugauucgcgaaccuuuuaucucuugcucccaccuggaguguagaacguucuuucucacccaaggcgcccugcuuaacgauaagcauagcaauggcacaguuaaagaccggucuccguaucgcgcccugauguccugcccccucggggaagcuccuagccccuacaacuccaaguucgagucuguggccuggagcgcuuccgccugucacgauggaaugggcuggcugaccaucgggauuagcggaccugacaacggcgcggucgccgugcugaaguauaaugggaucauuacaggaaccaucaaaucuuggaagaaacagauucucagaacgcaggaguccgaaugcguuuguaugaacggcagcugcuuuacaaucaugaccgauggccccucuaauaaggcugccagcuacaaaaucuucaagauugagaaggggaaagugacaaaguccaucgaacugaacgcuccuaauuuucauuaugaggaguguucuugcuacccggacaccggaauugucaugugugugugccgggauaacuggcacggcagcaaucgccccuggguguccuucaaccagaaucuugacuaccaaaucggguauauuugcagcggagucuuuggcgauaacccuagacccgaagacggggagggaucuuguaauccuguuaccguggauggcgccaacggcgugaaaggguucuccuacaaguaugacaauggagucuggaucggccggacaaaaagcaaccgccugagaaagggguuugaaaugauuugggaccccaauggauggacgaacaccgauucugacuucuccgugaaacaggauguuguggcgaucacagacuggagcggcuacuccgggucuuuuguccagcacccggagcucaccggccuggauugcauccggccuuguuucuggguggaacuuguucgcggacugcccagagagaacacaaccauuuggacgagcggcuccucuaucagcuucugcggggucaauuccgacacagccaacuggagcuggccugauggagcugagcuccccuuuaccauugacaaguga

SEQ ID NO: 216683 - RNA, 1413 nt, Artificial Sequence; identical to SEQ ID NO: 208704
  derived and/or modified CDS sequence (opt5) from neuraminidase__InfluenzaA__AHL90316

SEQ ID NO: 216684 - RNA, 1413 nt, Artificial Sequence
  derived and/or modified CDS sequence (opt5) from neuraminidase__InfluenzaA__AHL90328
augaaccccaauaagaaaaucauuaccaucggcagcauuuccaucgccauugggaucaucucucugaugcuccagauuggaaacaucauuagcaucugggcuucccacucuauucaaacaggcagccagaauaacacggggaucugcaaucagagaauuaucaccuacgagaacuccacaugggugaaucauaccuaugucaacaucaauaacacaaauguuguggccggagaagacaagaccucugugacacuggcgggcaacagcucccuuuguagcauuucugggugggcuaucuacaccaaagauaauuccauucggaucggaagcaagggcgacgucuucgugauucgcgagccuuuuaucucuugcucccaccuggaauguagaacguucuuucucacccagggcgcccugcuuaacgauaaacauagcaaugggacaguuaaggaccggucuccguaucgcgcccugauguccugcccccucggagaggcuccuagccccuacaacuccaaguucgaaucuguggccuggagcgcuuccgccugucacgauggcaugggguggcugaccaucggaauuagcggcccugacaacggggcggucgccgugcugaaauauaauggaaucauuacaggcaccaucaagucuuggaaaaagcaaauucucagaacgcaggaguccgagugcguuuguaugaacggcagcugcuuuacaaucaugaccgaugggcccucuaauaaagcugccagcuacaagaucuucaagauugaaaaaggaaaggugacaaaauccaucgagcugaacgcuccuaauuuucauuaugaagaguguucuugcuacccggacaccggcauugucaugugugugugccgggauaacuggcacgggagcaaucgccccuggguguccuucaaccagaaucuugacuaccagaucggauauauuugcagcggcgucuuuggggauaacccuagacccgaggacggagaaggcucuuguaauccuguuaccguggauggcgccaacggggugaagggauucuccuacaaauaugacaauggcgucuggaucgggcggacaaagagcaaccgccugagaaaaggauuugagaugauuugggaccccaauggcuggacgaacaccgauucugacuucuccgugaagcaagauguuguggcggucacagacuggagcggguacuccggcucuuuugugcagcacccggaacucaccggacuggauugcauccggccuuguuucuggguugagcuugugcgcggccugcccagagaaaacacaaccaucuggacgagcggguccucuauuagcuucugcggagucaauuccgacacagccaacuggagcuggccugauggcgcugagcuccccuuuaccaucgacaaguga

SEQ ID NO: 216685 - RNA, 1413 nt, Artificial Sequence; identical to SEQ ID NO: 208704
  derived and/or modified CDS sequence (opt5) from neuraminidase__InfluenzaA__AHL90340

SEQ ID NO: 216686 - RNA, 1413 nt, Artificial Sequence
  derived and/or modified CDS sequence (opt5) from neuraminidase__InfluenzaA__AHL90352
augaaccccaaucagaagaucaugaccauuggcagcaucuccauugccaucgggauuaucucucugaugcuccaaaucggaaacauuaucagcauuugggcuucccacucuauccagacaggcagccagaauaacacggggauuugcaaucagagaaucauuaccuacgagaacuccacaugggugaaucauaccuaugucaacaucaauaacacaaauguuguggccggagaagacaaaaccucugugacacuggcgggcaacagcucccuuuguagcaucucugggugggcuauuuacaccaaggauaauuccauccggauuggaagcaaaggcgacgucuucgugauccgcgagccuuuuauuucuugcucccaccuggaauguagaacguucuuucucacccaaggcgcccugcuuaacgauaagcauagcaaugggacaguuaaagaccggucuccguaucgcgcccugauguccugcccccucggagaggcuccuagccccuacaacuccaaguucgaaucuguggccuggagcgcuuccgccugucacgauggcaugggguggcugaccaucggaaucagcggcccugacaacggggcggucgccgugcugaaguauaauggaauuaucacaggcaccauuaaaucuuggaagaaacagauccucagaacgcaggaguccgagugcguuuguaugaacggcagcugcuuuacaauuaugaccgaugggcccucuaauaaggcugccagcuacaaaaucuucaagaucgaaaagggaaaagugacaaaguccauugagcugaacgcuccuaauuuucauuaugaagaguguucuugcuacccggacaccggcaucgucaugugugugugccgggauaacuggcacgggagcaaucgccccuggguguccuucaaccagaaucuugacuaccaaauuggauauaucugcagcggcgucuuuggggauaacccuagacccgaggacggagaaggcucuuguuccccuguuaccguggauggcgccaauggggugaaaggauucagcuacaaguaugacaacggcgucuggauugggcggacaaaaucuaaucgccugagaaagggauuugagaugaucugggaccccaacggcuggacgaauaccgauuccgacuucagcgugaaacaggauguuguggcgauuacagacugguccggguacucuggcagcuuuguccagcacccggaacucaccggacuggauugcauccggccuuguuucuggguggagcuuguucgcggcaugcccagagaaaacacaaccaucuggacguccgggucuagcauuuccuucugcggagugaacagcgacacagccaauuggucuuggccugauggcgcugagcugcccuuuaccaucgacaaguga

SEQ ID NO: 216687 - RNA, 1413 nt, Artificial Sequence; identical to SEQ ID NO: 215533
  derived and/or modified CDS sequence (opt5) from neuraminidase__InfluenzaA__AHL90364

SEQ ID NO: 216688 - RNA, 1413 nt, Artificial Sequence; identical to SEQ ID NO: 209533
  derived and/or modified CDS sequence (opt5) from neuraminidase__InfluenzaA__AHL90376

SEQ ID NO: 216689 - RNA, 1410 nt, Artificial Sequence
  derived and/or modified CDS sequence (opt5) from neuraminidase__InfluenzaA__AHL90388
augaaccccaaucagaagaucauuaccaucggcagcgugucccugauuaucucuacaauuugcuucuuuaugcaaaucgccauccucauuacgaccgucacacugcacuucaaacaguacgaguuuaacagcuccccuaauaaccagguuaugcuuugugaaccgaccaucauugagagaaauaucacagaaauuguguaucugaccaacacaaucauugagaaggaaaucugccccaaacucgcugaguaccggaauuggucuaagccucagugugacaucaccggguucgcccccuuuagcaaagauaacuccauucgccugucugcgggaggcgacaucugggugacgagagagccuuaugucagcugcgaucccgacaaguguuaccaauucgcucuugggcagggaaccacacugaauaacgugcauuccaauaacaccguucgggaucgcacaccuuauagaacccuccugaugaaugaacugggcgugccguuucaccucgggacgaagcaggucugcauugccuggucuagcuccagcugucaugacggaaaagccuggcugcacgugugcaucacaggcgaugacaagaacgcuaccgccucuuucauuuacaauggccggcuuguugauuccaucgugagcuggucuaaagagauccugcgcacacaggaauccgagugugucugcauuaacgggaccuguaccguggugaugacagacggaagcgcuuccggcaaggccgauacgaaaauccucuuuauugaggaagggaagaucguccauaccucuacacugagcggauccgcgcaacacguugaggaaugcagcugcuaucccagauacccuggcgugcggugugugugccgcgacaacuggaaggggucuaauagacccauugucgauaucaacaucaaagaccacuccauugugagcucuuacguuuguagcggacuugugggcgacaccccucggaagaaugauuccucuagcuccagccauugccuggaccccaacaaugaggaaggcgggcacggagucaaaggcugggccuucgaugacgggaacgauguguggaugggacgcacaaucucugagaaguccagacucggcuaugagaccuuuaaaguuauugaaggguggagcaauccgaagucuaaacugcagaucaaccgccaggugauugucgaccggggaaauagauccggcuacagcggcaucuucuccguggaggggaagucuuguauuaaccggugcuuuuaugucgaacugaucagaggacgcaaggaggaaacggaggugcucuggacaagcaauuccaucguuguguucuguggcaccucugggaccuacggaacaggcagcuggccugauggggcugacauuaaccugaugcccaucuga

SEQ ID NO: 216690 - RNA, 1410 nt, Artificial Sequence; identical to SEQ ID NO: 208584
  derived and/or modified CDS sequence (opt5) from neuraminidase__InfluenzaA__AHL90400

SEQ ID NO: 216691 - RNA, 1410 nt, Artificial Sequence; identical to SEQ ID NO: 208584
  derived and/or modified CDS sequence (opt5) from neuraminidase__InfluenzaA__AHL90413

SEQ ID NO: 216692 - RNA, 1410 nt, Artificial Sequence
  derived and/or modified CDS sequence (opt5) from neuraminidase__InfluenzaA__AHL90425
augaaccccaaucagaagaucauuaccaucggcagcgugucccugacaauuucuacgaucugcuucuuuaugcaaaccgccauucucaucacaaccgucacacugcacuucaaacaguacgaguuuaacagcccuccgaauaaccagguuaugcuuugugaacccaccaucauugagagaaauaucacagaaauuguguaucugaccaacacgaccaucgagaaggaaauuugcccuaaacucgcugaguaccggaauugguccaagccccagugugacaucacaggguucgccccuuuuucuaaagauaacagcauucgccuguccgcgggaggcgacaucugggugaccagagagcccuaugucucuugcgauccugacaaguguuaccaauucgcucuugggcagggaacaacccugaauaacgugcauagcaaugauacgguucacgaccggacaccguaucgcacccuccugaugaacgaacugggcgugcccuuucaucucgggacaaagcaggucugcaucgccugguccucuagcuccugucacgauggaaaagccuggcugcaugugugcauuaccggcgacgauaagaaugcuaccgccagcuucaucuacaacggcagacuuguugacucuauuguguccuggagcaaagagauccugcggacacaggaaucugagugugucugcauuaaugggacguguaccguggugaugacagauggauccgcuagcggcaaggccgacaccaaaauccucuuuaucgaggaagggaagauuguccacacauccacccugucuggaagcgcgcaacacguugaggaaugcuccugcuauccucgcuaccccggcgugagaugugugugccgggauaacuggaaggggagcaaccgcccuaucgucgacauuaauaucaaagaccauucuauuguguccagcuacguuuguucuggacuugugggcgauacgcccagaaagaacgacagcuccucuagcucccacugccuggauccgaauaacgaggaaggcgggcauggagucaaaggcugggccuucgacgaugggaaugacguguggaugggacggacaaucagcgagaagucucgccucggcuaugagaccuuuaaaguuaucgaagggugguccaacccuaagagcaaacugcagauuaauagacaggugaucgucgaucggggagaccgcucuggcuacuccggcauuuucagcguggaggggaaguccuguaucaacagaugcuuuuaugucgaacugauucggggaagaaaggaggaaaccgaggugcucuggacaucuaauagcaucguuguguucuguggcaccuccgggacauacggaacgggcucuuggcccgauggggcugacauuaaccugaugccuaucuga

SEQ ID NO: 216693 - RNA, 1410 nt, Artificial Sequence; identical to SEQ ID NO: 208671
  derived and/or modified CDS sequence (opt5) from neuraminidase__InfluenzaA__AHL90437

SEQ ID NO: 216694 - RNA, 1410 nt, Artificial Sequence; identical to SEQ ID NO: 208584
  derived and/or modified CDS sequence (opt5) from neuraminidase__InfluenzaA__AHL90449

SEQ ID NO: 216695 - RNA, 1410 nt, Artificial Sequence; identical to SEQ ID NO: 208584
  derived and/or modified CDS sequence (opt5) from neuraminidase__InfluenzaA__AHL90461

SEQ ID NO: 216696 - RNA, 1410 nt, Artificial Sequence; identical to SEQ ID NO: 208584
  derived and/or modified CDS sequence (opt5) from neuraminidase__InfluenzaA__AHL90473

SEQ ID NO: 216697 - RNA, 1410 nt, Artificial Sequence; identical to SEQ ID NO: 208584
  derived and/or modified CDS sequence (opt5) from neuraminidase__InfluenzaA__AHL90485

SEQ ID NO: 216698 - RNA, 1410 nt, Artificial Sequence; identical to SEQ ID NO: 208675
  derived and/or modified CDS sequence (opt5) from neuraminidase__InfluenzaA__AHL90497

SEQ ID NO: 216699 - RNA, 1410 nt, Artificial Sequence; identical to SEQ ID NO: 208675
  derived and/or modified CDS sequence (opt5) from neuraminidase__InfluenzaA__AHL90509

SEQ ID NO: 216700 - RNA, 1410 nt, Artificial Sequence
  derived and/or modified CDS sequence (opt5) from neuraminidase__InfluenzaA__AHL90521
augaaccccaaucagaagaucauuaccaucggcagcgugucccugacaauuucuacgaucugcuucuuucuccaaauugccauccugaucaccacagucacccuucacuucaaacaguacgaguuuaacagcccuccgaauaaccagguuaugcugugugaacccacaauuaucgagagaaauauuaccgaaaucguguaucucacaaacaccacgauugagaaggaaaucugcccuaaacuggcugaguaccggaauugguccaagccccagugugacauuaccggguucgccccuuuuucuaaagauaacagcauccgccuuuccgcgggaggcgacaucugggugacaagagagcccuaugucucuugcgauccugacaaguguuaccaauucgcucuggggcagggaaccacacucaauaacgugcauagcaauaacaccguucgggaucgcacgccguauagaacacugcugaugaaugaacucggcgugcccuuucaccuggggaccaagcaggucugcauugccugguccucuagcuccugucaugacggaaaagccuggcuucacgugugcaucacaggcgaugacaagaacgcuaccgccagcuucauuuacaauggccggcugguugauucuaucguguccuggagcaaagagauucuccgcacccaggaaucugagugugucugcaucaacgggacauguacgguggugaugaccgacggauccgcuagcggcaaggccgauacaaaaauccuguuuauugaggaagggaagaucguccauaccuccacacuuucuggaagcgcgcaacacguugaggaaugcuccugcuauccuagauaccccggcgugcggugugugugccgcgacaacuggaaggggagcaauagaccuauugucgauaucaacauuaaagaccacucuaucguguccagcuacguuuguucuggacuggugggcgacacgccccggaagaaugauagcuccucuagcucccauugccucgacccgaacaaugaggaaggcgggcacggagucaaaggcugggccuucgaugacgggaacgauguguggaugggacgcaccaucagcgagaagucuagacugggcuaugagacauuuaaaguuauugaagggugguccaauccuaagagcaaacugcagaucaaccgccaggugauugucgaccggggaaauagaucuggcuacuccggcaucuucagcguggaggggaaguccuguauuaaccggugcuuuuaugucgaacucaucagaggacgcaaggaggaaaccgaggugcuguggaccucuaauagcauuguuguguucuguggcacauccgggaccuacggaacaggcucuuggcccgauggggcugacaucaaccuuaugccuaucuga

SEQ ID NO: 216701 - RNA, 1410 nt, Artificial Sequence
  derived and/or modified CDS sequence (opt5) from neuraminidase__InfluenzaA__AHL90533
augaaccccaaucagaagaucauuaccaucggcagcgugucccugacaauuucuacgaucugcuucuuuaugcaaaccgccauucucaucacaaccgucacacugcacuucaaacaguacgaguuuaacagcccuccgaauaaccagguuaugcuuugugaacccaccaucauugagagaaauaucacagaaauuguguaucugaccaacacgaccaucgagaaggaaauuugcccuaaacucgcugaguaccggaauugguccaagccccagugugacaucacaggguucgccccuuuuucuaaagauaacagcauucgccuguccgcgggaggcgacaucugggugaccagagagcccuaugucucuugcgauccugacaaguguuaccaauucgcucuugggcagggaacaacccugaauaacgugcauagcaaugauacgguucgggaccgcacaccguauagaacccuccugaugaacgaacugggcgugcccuuucaccucgggacaaagcaggucugcaucgccugguccucuagcuccugucaugauggaaaagccuggcugcacgugugcauuaccggcgacgauaagaaugcuaccgccagcuucaucuacaacggccggcuuguugacucuauuguguccuggagcaaagagauccugcgcacacaggaaucugagugugucugcauuaaugggacguguaccguggugaugacagauggauccgcuagcggcaaggccgacaccaaaauccucuuuaucgaggaagggaagauuguccauacauccacccugucuggaagcgcgcaacacguugaggaaugcuccugcuauccuagauaccccggcgugcggugugugugccgcgauaacuggaaggggagcaacagaccuaucgucgacauuaauaucaaagaccacucuauuguguccagcuacguuuguucuggacuugugggcgauacgccccggaagaacgacagcuccucuagcucccauugccuggauccgaauaacgaggaaggcgggcacggagucaaaggcugggccuucgacgaugggaaugacguguggaugggacgcacaaucagcgagaagucuagacucggcuaugagaccuuuaaaguuaucgaagggugguccaacccuaagagcaaacugcagauuaaucgccaggugaucgucgagcggggagauagaucuggcuacuccggcauuuucagcguggaagggaaguccuguaucaaccggugcuuuuaugucgagcugauuagaggacgcaaggaagagaccgaggugcucuggacaucuaauagcaucguuguguucuguggcaccuccgggacauacggaacgggcucuuggcccgacggggcugauauuaaccugaugccuaucuga

SEQ ID NO: 216702 - RNA, 1410 nt, Artificial Sequence; identical to SEQ ID NO: 208584
  derived and/or modified CDS sequence (opt5) from neuraminidase__InfluenzaA__AHL90545

SEQ ID NO: 216703 - RNA, 1410 nt, Artificial Sequence; identical to SEQ ID NO: 208671
  derived and/or modified CDS sequence (opt5) from neuraminidase__InfluenzaA__AHL90557

SEQ ID NO: 216704 - RNA, 1410 nt, Artificial Sequence
  derived and/or modified CDS sequence (opt5) from neuraminidase__InfluenzaA__AHL90569
augaaccccaaucagaagaucauuaccaucggcagcgugucccugacaauuucuacgaucugcuucuuuaugcaaauugccauccucaucaccacagucacccugcacuucaaacaguacgaguuuaacagcccuccgaauaaccagguuaugcuuugugaacccacaauuaucgagagaaauauuaccgaaaucguguaucugacaaacaccacgauugagaaggaaaucugcccuaaacucgcugaguaccggaauugguccaagccccagugugacauuaaaggguucgccccuuuuucuaaggauaacagcauccgccuguccgcgggaggcgacaucugggugaccagagagcccuaugucucuugcgauccugacaaguguuaccaauucgcucuugggcagggaacaacccugaauaacgugcauagcaauaacacaguucgggaucgcaccccguauagaacgcuccugaugaaugaacugggcgugcccuuucaccucgggacaaaacaggucugcauugccugguccucuagcuccugucaugacggaaaggccuggcugcacgugugcaucaccggcgaugacaaaaacgcuacagccagcuucauuuacaauggccggcuuguugauucuguggucuccuggagcaaggagauccugcgcacccaggaaucugagugugugugcauuaacgggaccuguacaguggucaugacggacggauccgcuagcggcaaagccgauaccaagauccucuuuaucgaggaagggaagauuguucauacauccacccugucuggaagcgcgcaacacguggaggaaugcuccugcuauccuagauaccccggcgugcggugugucugccgcgacaacuggaaagggagcaauagaccuaucguggauauuaacaucaaggaccacucuauuguuuccagcuacguguguucuggacuugucggcgacacaccccggaaaaaugauagcuccucuagcucccauugccuggacccgaacaaugaggaaggcgggcacggagugaagggcugggccuucgaugacgggaacgauguuuggaugggacgcaccaucagcgagaaaucuagacucggcuaugagacguuuaaggugaucgaagggugguccaauccuaaaagcaagcugcagauuaaccggcaggucaucguggaccgcggaaauagaucuggcuacuccggcauuuucagcgucgaggggaaguccuguaucaaccggugcuuuuauguggaacugauuagaggacgcaaagaggaaacagagguucucuggaccucuaauagcaucguggucuucuguggcaccuccgggacauacggaaccggcucuuggcccgauggggcugacauuaaccugaugccuaucuga

SEQ ID NO: 216705 - RNA, 1410 nt, Artificial Sequence; identical to SEQ ID NO: 208671
  derived and/or modified CDS sequence (opt5) from neuraminidase__InfluenzaA__AHL90581

SEQ ID NO: 216706 - RNA, 1410 nt, Artificial Sequence; identical to SEQ ID NO: 208675
  derived and/or modified CDS sequence (opt5) from neuraminidase__InfluenzaA__AHL90593

SEQ ID NO: 216707 - RNA, 1410 nt, Artificial Sequence
  derived and/or modified CDS sequence (opt5) from neuraminidase__InfluenzaA__AHL90605
augaaccccaaucagaagaucauuaccaucggcagcgugucccugacaauuucuacgaucugcuucuuuaugcaaauugccauccucaucaccacagucacccugcacuucaaacaguacgaguuuaacagcccuccgaauaaccagguuaugcuuugugaacccacaauuaucgagagaaauauuaccgaaaucguguaucugacaaacaccacgauugagaaggaaaucugcccuaaacucgcugaguaccggaauugguccaagccccagugugacauuaccggguucgccccuuuuucuaaagauaacagcauccgccuguccgcgggaggcgacaucugggugacaagagagcccuaugucucuugcgauccugacaaguguuaccaauucgcucuugggcagggaaccacacugaauaacgugcauagcaauaacaccguucgggaucgcacgccguauagaacacuccugaugaaugaacugggcgugcccuuucaccucgggaccaagcaggucugcauugccugguccucuagcuccugucaugacggaaaagccuggcugcacgugugcaucacaggcgaugacaagaacgcuaccgccagcuucauuuacaauggccggcuuguugauucuguggucuccuggagcaaagagauccugcgcacccaggaaucugagugugugugcauuaacgggacauguacgguggucaugaccgacggauccgcuagcggcaaggccgauacaaaaauccucuuuaucgaggaagggaagauuguucauaccuccacacugucuggaagcgcgcaacacguggaggaaugcuccugcuauccuagauaccccggcgugcggugugucugccgcgacaacuggaaggggagcaauagaccuaucguggauauuaacaucaaagaccacucuauuguuuccagcuacguguguucuggacuugucggcgacacgccccggaagaaugauagcuccucuagcucccauugccuggacccgaacaaugaggaaggcgggcacggagugaaaggcugggccuucgaugacgggaacgauguuuggaugggacgcaccaucagcgagaagucuagacucggcuaugagacauuuaaagugaucgaagggugguccaauccuaagagcaaacugcagauuaaccggcaggucaucguggaccgcggaaauagaucuggcuacuccggcauuuucagcgucgaggggaaguccuguaucaaccggugcuuuuauguggaacugauuagaggacgcaaggaggaaaccgagguucucuggaccucuaauagcaucguggucuucuguggcacauccgggaccuacggaacaggcucuuggcccgauggggcuaacauuaaucugaugccuaucuga

SEQ ID NO: 216708 - RNA, 1410 nt, Artificial Sequence; identical to SEQ ID NO: 208671
  derived and/or modified CDS sequence (opt5) from neuraminidase__InfluenzaA__AHL90629

SEQ ID NO: 216709 - RNA, 1410 nt, Artificial Sequence; identical to SEQ ID NO: 208671
  derived and/or modified CDS sequence (opt5) from neuraminidase__InfluenzaA__AHL90641

SEQ ID NO: 216710 - RNA, 1410 nt, Artificial Sequence; identical to SEQ ID NO: 208584
  derived and/or modified CDS sequence (opt5) from neuraminidase__InfluenzaA__AHL90653

SEQ ID NO: 216711 - RNA, 1410 nt, Artificial Sequence; identical to SEQ ID NO: 208671
  derived and/or modified CDS sequence (opt5) from neuraminidase__InfluenzaA__AHL90665

SEQ ID NO: 216712 - RNA, 1410 nt, Artificial Sequence
  derived and/or modified CDS sequence (opt5) from neuraminidase__InfluenzaA__AHL90677
augaaccccaaucagaagaucauuaccaucggcagcgugucccugacaauuucuacgaucugcuucuuuaugcaaaccgccauucucaucacaaccgucacacugcacuucaaacaguacgaguuuaacagcccuccgaauaaccagguuaugcuuugugaacccaccaucauugagagaaauaucacagaaauuguguaucugaccaacacgaccaucgagaaggaaauuugcccuaaacucgcugaguaccggaauugguccaagccccagugugacaucacaggguucgccccuuuuucuaaagauaacagcauucgccuguccgcgggaggcgacaucugggugaccagagagcccuaugucucuugcgauccugacaaguguuaccaauucgcucuugggcagggaacaacccugaauaacgugcauagcaauaacacgguucgggaucgcacaccguauagaacccuccugaugaaugaacugggcgugcccuuucaccucgggacaaagcaggucugcaucgccugguccucuagcuccugucaugacggaaaagccuggcugcacgugugcauuaccggcgaugacaagaacgcuaccgccagcuucaucuacaauggcaaacuuguugauucuauuguguccuggagcaaggagauccugcggacacaggaaucugagugugucugcauuaacgggacguguaccguggugaugacagacggauccgcuagcggcaaagccgauaccaagauccucuuuaucgaggaagggaagauuguccauacauccacccugucuggaagcgcgcaacacguugaggaaugcuccugcuauccucgcuaccccggcgugagaugugugugccgggacaacuggaaagggagcaaucgcccuaucgucgauauuaacaucaaggaccacucuauuguguccagcuacguuuguucuggacuugugggcgacacgccccggaaaaaugauagcuccucuagcucccauugccuggacccgaacaaugaggaaggcgggcacggagucaagggcugggccuucgaugacgggaacgauguguggaugggaagaacaaucagcgagaaaucucgccucggcuaugagaccuuuaagguuaucgaagggugguccaauccuaaaagcaagcugcagauuaacagacaggugaucgucgaccggggaaaucgcucuggcuacuccggcauuuucagcguggaggggaaguccuguaucaacagaugcuuuuaugucgaacugauucggggaagaaaagaggaaaccgaggugcucuggacaucuaauagcaucguuguguucuguggcaccuccgggacauacggaacgggcucuuggcccgauggggcugacauuaaccugaugccuaucuga

SEQ ID NO: 216713 - RNA, 1410 nt, Artificial Sequence; identical to SEQ ID NO: 208671
  derived and/or modified CDS sequence (opt5) from neuraminidase__InfluenzaA__AHL90689

SEQ ID NO: 216714 - RNA, 1410 nt, Artificial Sequence
  derived and/or modified CDS sequence (opt5) from neuraminidase__InfluenzaA__AHL90701
augaaccccaaucagaagaucauuaccaucggcagcgugucccugacaauuucuacgaucugcuucuuuaugcaaauugccauccucaucaccacagucacccugcacuucaaacaguacgaguuuaacagcccuccgaauaaccagguuaugcuuugugaacccacaauuaucgagagaaauauuaccgaaaucguguaucugacaaacaccacgauugagaaggaaaucugcccuaaacucgcugaguaccggaauugguccaagccccagugugacauuaccggguucgccccuuuuucuaaagauaacagcauccgccuguccgcgggaggcgggaucugggugacaagagagcccuaugucucuugcgacccugauaaguguuaccaauucgcucuuggacagggcaccacacugaauaacgugcauagcaauaacaccguucgggaccgcacgccguauagaacacuccugaugaaugaacugggggugcccuuucaccucggaaccaagcaggucugcauugccugguccucuagcuccugucaugauggcaaagccuggcugcacgugugcaucacaggcgacgauaagaacgcuaccgccagcuucauuuacaaugggcggcuuguugacucuguggucuccuggagcaaagauauccugcgcacccaggagucugaaugugugugcauuaacggaacauguacgguggucaugaccgacggcuccgcuagcgggaaggccgauacaaaaauccucuuuaucgaggagggaaagauuguucauaccuccacacugucuggcagcgcgcaacacguggaagagugcuccugcuauccuagauaccccggggugcggugugucugccgcgacaacuggaagggaagcaauagaccuaucguggauauuaacaucaaagaccacucuauuguuuccagcuacguguguucuggccuugucggcgacacgccccggaagaaugauagcuccucuagcucccauugccuggacccgaacaaugaagaagggggacacggcgugaaagggugggccuucgaugacggaaacgauguuuggaugggccgcaccaucagcgagaagucuagacucggguaugagacauuuaaagugaucgagggaugguccaauccuaagagcaaacugcagauuaaccggcaggucaucguggaccgcggcaauagaucuggcuacuccgggauuuucagcgucgaaggaaaguccuguaucaaccggugcuuuuauguggagcugauuagaggccgcaaggaagagaccgaaguucucuggaccucuaauagcaucguggucuucugugggacauccggaaccuacggcacagggucuuggcccgauggcgcugacauuaaccugaugccuaucuga

SEQ ID NO: 216715 - RNA, 1410 nt, Artificial Sequence; identical to SEQ ID NO: 211376
  derived and/or modified CDS sequence (opt5) from neuraminidase__InfluenzaA__AHL90713

SEQ ID NO: 216716 - RNA, 1413 nt, Artificial Sequence; identical to SEQ ID NO: 212009
  derived and/or modified CDS sequence (opt5) from neuraminidase__InfluenzaA__AHL90725

SEQ ID NO: 216717 - RNA, 1413 nt, Artificial Sequence; identical to SEQ ID NO: 211002
  derived and/or modified CDS sequence (opt5) from neuraminidase__InfluenzaA__AHL90749

SEQ ID NO: 216718 - RNA, 1413 nt, Artificial Sequence; identical to SEQ ID NO: 209533
  derived and/or modified CDS sequence (opt5) from neuraminidase__InfluenzaA__AHL90761

SEQ ID NO: 216719 - RNA, 1413 nt, Artificial Sequence
  derived and/or modified CDS sequence (opt5) from neuraminidase__InfluenzaA__AHL90773
augaaccccaaucagaagaucauuaccaucggcagcauuuccaucgccauugggaucaucucucugaugcuccaaauuggaaacaucauuagcaucugggcuucccacucuauucagacaggcagccagaauaacacggggaucugcaaucagagaauuaucaccuacgagaacuccacaugggugaaucauaccuaugucaacaucaauaacacaaauguuguggccggagaagacaaaaccucuaugacacuggcgggcaacagcucccuuuguagcauuucugggugggcuaucuacaccaaggauaauuccauucggaucggaagcaaaggcgacguguucgucauucgcgagccuuuuaucucuugcucccaccuggaauguagaacguucuuucucacccaaggcgcccugcuuaacgauaagcauagcaaugggacagugaaagaccggucuccguaucgcgcccugauguccugcccccucggagaggcuccuagccccuacaacuccaaguucgaaucuguugccuggagcgcuuccgccugucacgauggcaugggguggcugaccaucggaauuagcggcccugacaacggggcgguggccguccugaaguauaauggaaucauuacaggcaccaucaaaucuuggaagaaacagauucucagaacgcaggaguccgagugcguguguaugaacggcagcugcuuuacaaucaugaccgaugggcccucuaauaaggcugccagcuacaaaaucuucaagauugaaaagggaaaaguuacaaaguccaucgagcugaacgcuccuaauuuuuauuacgaagaguguucuugcuacccggacaccggcauugugaugugugucugccgggauaacuggcaugggagcaaucgccccuggguguccuucaaccagaaucuugacuaucaaaucggauacauuugcagcggcguguuuggggauaacccuagacccgaggaccgggaaggaucuuguaauccugucaccguugauggcgccaacggcgugaaaggguucuccuauaaguacggaaauggcguguggaucgggcgcacaaaaagcaacagacugcggaagggauuugagaugauuugggaccccaauggcuggacgaacaccgacucugauuucuccgucaaacaggacgugguugcgaucacagauuggagcggguauuccggcucuuuugugcagcacccggaacucaccggacuggacugcauccgcccuuguuucugggucgagcuugugagaggccugccccgggaaaacacaaccauuuggacgagcggguccucuaucagcuucugcggaguuaauuccgauacagccaacuggagcuggccugacggcgcugagcuccccuuuaccauugauaaguga

SEQ ID NO: 216720 - RNA, 1413 nt, Artificial Sequence
  derived and/or modified CDS sequence (opt5) from neuraminidase__InfluenzaA__AHL90785
augaaccccaaucagaagaucauuaccaucggcagcauuuccaucgccauugggaucaucucucugaugcuccaaauuggaaacaucauuagcaucugggcuucccacucuauucagacaggcagccagaauaacacggggaucugcaaucagagaauuaucaccuacgagaacuccacaugggugaaucauaccuaugugaacaucaauaacacaaauguuguggccggagaagacaaaaccucugugacacuggcgggcaacagcucccuuuguagcauuucugggugggcuaucuacaccaaggauaauuccauucggaucggaagcaaaggcgacgucuucgugauucgcgagccuuuuaucucuugcucccaccuggaauguagaacguucuuucucacccaaggcgcccugcuuaacgauaagcauagcaaugggacaguuaaagaccggucuccguaucgcgcccugauguccugcccccucggagaggcuccuagccccuacaacuccaaguucgaaucuguggccuggagcgcuuccgccugucacgauggcaugggguggcugaccaucggaauuagcggcccugacaacggggcggucgccgugcugaaguauaauggaaucauuacaggcaccaucaaaucuuggaagaaacagauucucagaacgcaggaguccgagugcguuuguaugaacggcagcugcuuuacaaucaugaccgaugggcccucuaauaaggcugccagcuacaaaaucuucaagauugaaaagggaaaagugacaaaguccaucgagcugaacgcuccuaauuuuuauuacgaagaguguucuugcuacccggacaccggcauugucaugugugugugccgggauaacuggcaugggagcaaucgccccuggguguccuucaaccagaaucuugacuaucaaaucggauacauuugcagcggcgucuuuggggauaacccuagacccgaggacggagaaggcucuuguaauccuguuaccgugaacggcgccgauggggugaaaggauucuccuauaaguacggcaauggggucuggaucggacggacaaaaagcaaccgccugagaaagggcuuugagaugauuugggaccccaauggguggacgaacaccgacucugauuucuccgugaaacaggacguuguggcgaucacagauuggagcggcuauuccggaucuuuuguccagcacccggaacucaccggccuggacugcauccggccuuguuucuggguggagcuuguucgcgggcugcccagagaaaacauuacaaucuggaccagcggauccucuauuagcuucugcggcgucaauuccgauacggccaacuggagcuggccugacggggcugagcuccccuuuacaaucgauaaguga

SEQ ID NO: 216721 - RNA, 1413 nt, Artificial Sequence
  derived and/or modified CDS sequence (opt5) from neuraminidase__InfluenzaA__AHL90797
augaaccccaaucagaagaucauuaccaucggcagcauuuccaucgccauugggaucaucucucugaugcuccaaauuggaaacaucauuagcaucugggcuucccacucuauucagacaggcagccagaauaacacggggaucugcaauaaaagaauuaucaccuacgagaacuccacaugggugaaucauaccuaugucaacaucaauaacacaaauguuguggccggagaagacaagaccucugugacacuggcgggcaacagcucccuuuguagcauuucugggugggcuaucuacaccaaagauaauuccauucggaucggaagcaagggcgacgucuucgugauucgcgagccuuuuaucgccugcucucaccuggaauguagaacguucuuucucacccagggcgcccugcuuaacgauaaacauuccaaugggacaguuaaggaccggagcccguaucgcgcucugaugucuugcccccucggagaggccccuucccccuacaacagcaaguucgaauccguggcuuggucugccagcgcgugucacgauggcaugggguggcugaccaucggaauuuccggcccugacaacggggccgucgcugugcugaaauauaauggaaucauuacaggcaccaucaagagcuggaaaaagcaaauucucagaacgcaggagucugagugcguuuguaugaacggcuccugcuuuacaaucaugaccgaugggcccagcgacaaagccgcuucuuacaagaucuucaagauugaaaaaggaaaggugacaaaaagcaucgagcugaaugccccuaacuuucauuaugaagaguguuccugcuacccggauaccggcauugucaugugugugugccgggacaauuggcacgggucuaaccgccccugggugagcuucaaucagaaccuugauuaccagaucggauauauuugcuccggcgucuuuggggacaauccuagacccgaggauggagaaggcagcuguucuccuguuaccguggacggcgcgaacggggugaagggauucuccuacaaauaugacaauggcgucuggaucgggcggacaaagagcaaccgccugagaaaaggauuugaggugauuugggaucccaauggcuggacgaacaccgacucugauuucuccguuaagcaagacguggucgccaucacagauuggagcggguacuccggcucuuuugugcagcacccggaacucaccggacuggacugcauccggccuuguuucuggguugagcuugugcgcggccugcccagagaaaauacaaccauuuggacgagcggguccucuaucagcuucugcggagucaacuccgauacagcuaacuggagcuggccugacggcgccgagcuccccuuuaccauugauaaguga

SEQ ID NO: 216722 - RNA, 1413 nt, Artificial Sequence; identical to SEQ ID NO: 209533
  derived and/or modified CDS sequence (opt5) from neuraminidase__InfluenzaA__AHL90809

SEQ ID NO: 216723 - RNA, 1413 nt, Artificial Sequence; identical to SEQ ID NO: 212009
  derived and/or modified CDS sequence (opt5) from neuraminidase__InfluenzaA__AHL90821

SEQ ID NO: 216724 - RNA, 1413 nt, Artificial Sequence
  derived and/or modified CDS sequence (opt5) from neuraminidase__InfluenzaA__AHL90833
augaaccccaaucagagaaucauuaccaucggcagcauuuccaucgccauugggaucaucucucugaugcuccaaauuggaaacaucauuagcaucugggcuucccacucuauucagacaggcagccagaauaacacggggaucugcaaucagcggauuaucaccuacgagaacuccacaugggugaaucauaccuaugucaacaucaauaacacaaauguuguggccggagaagacaagaccucugugacacuggcgggcaacagcucccuuuguagcauuucugggugggcuaucuacaccaaagauaauuccauucgcaucggaagcaagggcgacgucuucgugauuagagagccuuuuaucucuugcucccaccuggaaugucggacguucuuucucacccaaggcgcccugcuuaacgauaaacauagcaaugggacagccaaggaccgcucuccguauagagcucugauguccugcccccucggagaggccccuagccccuacaacuccaaauucgaaucuguugcuuggagcgccuccgcgugucacgauggcaugggguggcugaccaucggaauuagcggcccugacaacggggccguggcuguccugaaguauaauggaaucauuacaggcaccaucaagucuuggaaaaagcagauucuccggacgcaggaguccgagugcguguguaugaacggcagcugcuuuacaaucaugaccgaugggcccucuaauaaagccgcuagcuacaagaucuucaaaauugaaaagggaaagguuacaaaauccaucgagcugaacgccccuaauuuuuauuacgaagaguguucuugcuacccggacaccggcauugugaugugugucugccgcgauaacuggcaugggagcaauagacccuggguguccuucaaccagaaucuugacuaucaaaugggauacaucugcagcggcguguuuggggauaacccucggcccgaggacggagaaggcucuuguaauccugucaccguugauggcgcgaacggggugaagggauucuccuauaaauacggcaaugggguguggauuggacgcacaaagagcaacagacugcggaaaggcuuugagaugaucugggaccccaauggguggacgaacaccgacucugauuucuccgucaagcaggacgugguugccauuacagauuggagcggcuauuccggaucuuuugugcagcacccggaacucaccggccuggacugcauccgcccuuguuucugggucgagcuugugagagggcugccccgggaaaacacaaccaucuggacgagcggauccucuauuagcuucugcggcguuaauuccgauacagcuaacuggagcuggccugacggggccgagcuccccuuuaccaucgauaaauga

SEQ ID NO: 216725 - RNA, 1413 nt, Artificial Sequence; identical to SEQ ID NO: 209533
  derived and/or modified CDS sequence (opt5) from neuraminidase__InfluenzaA__AHL90845

SEQ ID NO: 216726 - RNA, 1413 nt, Artificial Sequence; identical to SEQ ID NO: 211002
  derived and/or modified CDS sequence (opt5) from neuraminidase__InfluenzaA__AHL90857

SEQ ID NO: 216727 - RNA, 1413 nt, Artificial Sequence; identical to SEQ ID NO: 209533
  derived and/or modified CDS sequence (opt5) from neuraminidase__InfluenzaA__AHL90869

SEQ ID NO: 216728 - RNA, 1413 nt, Artificial Sequence
  derived and/or modified CDS sequence (opt5) from neuraminidase__InfluenzaA__AHL90881
augaaccccaaucagaagaucauuaccaucggcagcauuuccaucgccauugggaucaucucuacaaugcugcaaauuggaagcaucauuuccaucugggcuucucacagcauucagacgggcucccagaacaauaccgggaucugcaaccagagaauuaucacauacgagaauagcaccugggugaaccauacauaugucaauaucaacaauaccaacguuguggccggagaagacaaaacaagcgugacccucgcgggcaauuccagccuguguucuauuuccgggugggcuaucuacacgaaggauaacagcauucggaucggaucuaaaggcgacgucuucgugauucgcgagccuuuuaucuccugcagccaccuugaauguagaaccuucuuucugacacaaggcgcccuccugaaugauaagcauucuaacgggaccguuaaagaccgguccccguaucgcgcccuuaugagcugcccccugggagaggcuccuucccccuacaauucuaaguucgaaagcguggccugguccgcuagcgccugucacgauggcaugggguggcucacaaucggaauuucuggcccugacaacggggcggucgccgugcugaaguauaacggaaucauuaccggcacgaucaaauccuggaagaaacagauucugagaacacaggagagcgagugcguuuguaugaauggcucuugcuuuaccaucaugacagaugggcccagcaacaaggcugccuccuacaaaaucuucaagauugaaaagggaaaagugaccaagucuaucgagcucaaugcuccuaacuuuuauuacgaagaguguagcugcuacccggacaccggcauugucaugugugugugccgggauaauuggcauggguccaaccgccccugggugagcuucaaucagaaccuggacuaucaaaucggauacauuugcucuggcgucuuuggggauaauccuagacccgaggacggagaaggcuccuguaacccuguuacaguggauggcgccaauggggugaaaggauucagcuauaaguacggcaacggggucuggaucggacggacgaaaucuaaucgccuuauuaagggcuuugagaugaucugggaccccaacggguggaccaauacagacuccgauuucagcgugaaacaggacguuguggcgaucaccgauugguccggcuauucuggaucuuuuguccagcacccggaacugacaggccucgacugcauuagaccuuguuucuggguggagcugguucgggggcuuccccgcgaaaacaccacgaucuggacauccggaucuagcauuuccuucugcggcgugaacagcgauaccgccaauuggucuuggccugacggggcugagcugcccuuuaccaucgauaaguga

SEQ ID NO: 216729 - RNA, 1413 nt, Artificial Sequence; identical to SEQ ID NO: 212009
  derived and/or modified CDS sequence (opt5) from neuraminidase__InfluenzaA__AHL90893

SEQ ID NO: 216730 - RNA, 1413 nt, Artificial Sequence; identical to SEQ ID NO: 211002
  derived and/or modified CDS sequence (opt5) from neuraminidase__InfluenzaA__AHL90905

SEQ ID NO: 216731 - RNA, 1413 nt, Artificial Sequence
  derived and/or modified CDS sequence (opt5) from neuraminidase__InfluenzaA__AHL90917
augaaccccaaucagaagaucauuaccaucggcagcauuuccaucgccauugggaucaucucucugacacuccaaauuggaaacaucauuagcaucugggcuucccacucuauucagacgggcagccagaauaacaccgggaucugcaaucagagaauuaucacauacgagaacuccaccugggugaaucauacauaugugaacaucaauaacaccaauguuguggccggagaagacaaaacaucugugacccuggcgggcaacagcucccuuuguagcauuucugggugggcuaucuacacgaaggauaauuccauucggaucggaagcaaaggcgacgucuucgugauucgcgagccuuuuaucucuugcucccaccuggaauguagaaccuucuuucucacacaaggcgcccugcuuaacgauaagcauagcaaugggaccguuaaagaccggucuccguaucgcgcccugauguccugcccccucggagaggcuccuagccccuacaacuccaaguucgaaucuguggccuggagcgcuuccgccugucacgauggcaugggguggcugacaaucggaauuagcggcccugacaacggggcggucgccgugcugaaguauaauggaaucauuaccggcacgaucaaaucuuggaagaaacagauucucagaacacaggaguccgagugcguuuguaugaacggcagcugcuuuaccaucaugacagaugggcccucuaauaaggcugccagcuacaaaaucuucaagauugaaaagggaaaagugaccaaguccaucgagcugaacgcuccuaauuuuuauuacgaagaguguucuugcuacccggacaccggcauugucaugugugugugccgggauaacuggcaugggagcaaucgccccuggguguccuucaaccagaaucuugacuaucaaaucggauacauuugcagcggcgucuuuggggauaacccuagacccgaggacggagaaggcucuuguaauccuguuacaguggauggcgccaacggggugaaaggauucuccuauaaguacggcaauggggucuggaucggacggacgaaaagcaaccgccugagaaagggcuuugagaugauuugggaccccaauggguggaccaacacagacucugauuucuccgugaaacaggacguuguggcgaucaccgauuggagcggcuauuccggaucuuuuguccagcacccggaacucacaggccuggacugcauccggccuuguuucuggguggagcuuguucgcgggcugcccagagaaaacaccacgauuuggacaagcggauccucuaucagcuucugcggcgucaauuccgauaccgccaacuggagcuggccugacggggcugagcuccccuuuaccauugauaaguga

SEQ ID NO: 216732 - RNA, 1413 nt, Artificial Sequence
  derived and/or modified CDS sequence (opt5) from neuraminidase__InfluenzaA__AHL90929
augaaccccaaucagaagaucauuaccaucggcagcauuuccaucgccauugggaucaucucucugaugcuccaaauuggaaacaucauuagcaucugggcuucccacucuauucagacaggcagccagaauaacacggggaucugcaaucagagaauuaucaccuacgagaacuccacaugggugaaucauaccuaugucaacaucaauaacacaaauguuguggccggagaagacaaaaccucuaugacacuggcgggcaacagcucccuuuguagcauuucugggugggcuaucuacaccaaggauaauuccauucggaucggaagcaaaggcgacguguucgucauucgcgagccuuuuaucucuugcucccaccuggaauguagaacguucuuucucacccaaggcgcccugcuuaacgauaagcauagcaaugggacagugaaagaccggucuccguaucgcgcccugauguccugcccccucggagaggcuccuagccccuacaacuccaaguucgaaucuguugccuggagcgcuuccgccugucacgauggcaugggguggcugaccaucggaauuagcggcccugacaacggggcgguggccguccugaaguauaauggaaucauuacaggcaccaucaaaucuuggaagaaacagauucucagaacgcaggaguccgagugcguguguaugaacggcagcugcuuuacaaucaugaccgaugggcccucuaauaaggcugccagcuacaaaaucuucaagauugaaaagggaaaaguuacaaaguccaucgagcugaacgcuccuaauuuuuauuacgaagaguguucuugcuacccggacaccggcauugugaugugugucugccgggauaacuggcaugggagcaaucgccccuggguguccuucaaccagaaucuugacuaucaaaucggauacauuugcagcggcguguuuggggauaacccuagacccgaggacggagaaggcucuuguaauccugucaccguugauggcgccaacggggugaaaggauucuccuauaaguacggcaaugggguguggaucggacggacaaaaagcaaccgccugagaaagggcuuugagaugauuugggaccccaauggguggacgaacaccgacucugauuucuccgucaaacaggacgugguugcgaucacagauuggagcggcuauuccggaucuuuugugcagcacccggaacucaccggccuggacugcauccggccuuguuucugggucgagcuugugcgcgggcugcccagagaaaacacaaccauuuggacgagcggauccucuaucagcuucugcggcguuaauuccgauacagccaacuggagcuggccugacggggcugagcuccccuuuaccauugauaaguga

SEQ ID NO: 216733 - RNA, 1413 nt, Artificial Sequence; identical to SEQ ID NO: 211002
  derived and/or modified CDS sequence (opt5) from neuraminidase__InfluenzaA__AHL90941

SEQ ID NO: 216734 - RNA, 1413 nt, Artificial Sequence; identical to SEQ ID NO: 211002
  derived and/or modified CDS sequence (opt5) from neuraminidase__InfluenzaA__AHL90953

SEQ ID NO: 216735 - RNA, 1413 nt, Artificial Sequence; identical to SEQ ID NO: 211002
  derived and/or modified CDS sequence (opt5) from neuraminidase__InfluenzaA__AHL90965

SEQ ID NO: 216736 - RNA, 1413 nt, Artificial Sequence
  derived and/or modified CDS sequence (opt5) from neuraminidase__InfluenzaA__AHL90977
augaaccccaaucagaagaucauuaccaucggcagcauuuccaucgccauugggaucaucucucugaugcuccaaauuggaaacaucauuagcaucugggcuucccacucuauucagacaggcagccagaauaacacggggaucugcaaucagagaauuaucaccuacgagaacuccacaugggugaaucauaccuaugugaacaucaauaacacaaauguuguggccggagaagacaaaaccucugugacacuggcgggcaacagcucccuuuguagcauuucugggugggcuaucuacaccaaggauaauuccauucggaucggaagcaaaggcgacgucuucgugauucgcgagccuuuuaucucuugcucccaccuggaauguagaacguucuuucucacccaaggcgcccugcuuaacgauaagcauagcaaugggacaguuaaagaccggucuccguaucgcgcccugauguccugcccccucggagaggcuccuagccccuacaacuccaaguucgaaucuguggccuggagcgcuuccgccugucacgauggcaugggguggcugaccaucggaauuagcggcccugacaacggggcggucgccgugcugaaguauaauggaaucauuacaggcaccaucaaaucuuggaagaaacagauucucagaacgcaggaguccgagugcguuuguaugaacggcagcugcuuuacaaucaugaccgaugggcccucuaauaaggcugccagcuacaaaaucuucaagauugaaaagggaaaagugacaaaguccaucgagcugaacgcuccuaauuuuuauuacgaagaguguucuugcuacccggacaccggcauugucaugugugugugccgggauaacuggcaugggagcaaucgccccuggguguccuucaaccagaaucuugacuaucaaaucggauacauuugcagcggcgucuuuggggauaacccuagacccgaggacggagaaggcucuuguaauccuguuaccguggauggcgccaacggggugaaaggauucuccuauaaguacggcaauggggucuggaucggacggacaaaaagcaaccgccugagaaagggcuuugagaugauuugggaccccaauggguggacgaacaccgacucugauuucuccgugaaacaggacguuguggcgaucgccgauuggagcggcuauuccggaucuuuuguccagcacccggaacucacaggccuggacugcauccggccuuguuucuggguggagcuuguucgcgggcugcccagagaaaacaccacaauuuggaccagcggauccucuaucagcuucugcggcgucaauuccgauacggcuaacuggagcuggccugacggggccgagcuccccuuuacaauugauaaguga

SEQ ID NO: 216737 - RNA, 1413 nt, Artificial Sequence; identical to SEQ ID NO: 212276
  derived and/or modified CDS sequence (opt5) from neuraminidase__InfluenzaA__AHL90989

SEQ ID NO: 216738 - RNA, 1413 nt, Artificial Sequence; identical to SEQ ID NO: 216732
  derived and/or modified CDS sequence (opt5) from neuraminidase__InfluenzaA__AHL91001

SEQ ID NO: 216739 - RNA, 1413 nt, Artificial Sequence
  derived and/or modified CDS sequence (opt5) from neuraminidase__InfluenzaA__AHL91013
augaaccccaaucagaagaucauuaccaucggcagcauuuccaucgccauugggaucaucucucugaugcuccaaauuggaaacaucauuagcaucugggcuucccacucuauucagacaggcagccagaauaacacggggaucugcucccagagaauuaucaccuacgagaauagcacaugggugaaccauaccuaugucaauaucaacaauacaaacguuguggccggagaagacaaaaccagcaugacacuggcgggcaauuccagccuuuguucuauuuccgggugggcuaucuacaccaaggauaacagcauucggaucggaucuaaaggcgacguguucgucauucgcgagccuuuuaucuccugcagccaccuggaauguagaacguucuuucucacccaaggcgcccugcuuaaugauaagcauucuaacgggacagugaaagaccgguccccguaucgcgcccugaugagcugcccccucggagaggcuccuucccccuacaauucuaaguucgaaagcguugccugguccgcuagcgccugucacgauggcaugggguggcugaccaucggaauuucuggcccugacaacggggcgguggccguccugaaguauaacggaaucauuacaggcaccaucagauccuggaaaaagcagauucuccggacgcaggagagcgagugcguguguaugaauggcucuugcuuuacaaucaugaccgaugggcccagcaacaaagcugccuccuacaagaucuucaaaauugaaaagggaaagguuacaaaaucuaucgagcugaaugcuccuaacuuuuauuacgaagaguguagcugcuacccggacaccggcauugugaugugugucugccgcgauaauuggcauggguccaacagacccugggugagcuucaaucagaaccuugacuaucaaaucggauacauuugcucuggcguguuuggggauaauccucggcccgaggacggagaaggcuccuguaacccugucaccguugauggcgccaauggggugaagggauucagcuauaaauacggcaacgggguguggaucggacgcacaaagucuaauagacugcggaaaggcuuugagaugauuugggaccccaacggguggacgaauaccgacuccgauuucagcgucaagcaggacgugguugcgaucacagauugguccggcuauucuggaucuuuugugcagcacccggaacucaccggccuggacugcauccgcccuuguuucugggucgagcuugugagagggcugccccgggaaaacacaaccauuuggacguccggaucuagcaucuccuucugcggcguuaacagcgauacagccaauuggucuuggccugacggggcugagcuccccuuuaccauugauaaauga

SEQ ID NO: 216740 - RNA, 1413 nt, Artificial Sequence; identical to SEQ ID NO: 216732
  derived and/or modified CDS sequence (opt5) from neuraminidase__InfluenzaA__AHL91025

SEQ ID NO: 216741 - RNA, 1410 nt, Artificial Sequence; identical to SEQ ID NO: 209977
  derived and/or modified CDS sequence (opt5) from neuraminidase__InfluenzaA__AHL91037

SEQ ID NO: 216742 - RNA, 1410 nt, Artificial Sequence; identical to SEQ ID NO: 211590
  derived and/or modified CDS sequence (opt5) from neuraminidase__InfluenzaA__AHL91049

SEQ ID NO: 216743 - RNA, 1410 nt, Artificial Sequence
  derived and/or modified CDS sequence (opt5) from neuraminidase__InfluenzaA__AHL91061
augaaccccaaucagaagaucauuaccaucggcagcgugucccugacaauuucuacgaucugcuucuuuaugcaaauugccauccucaucaccacagucacccugcacuucaaacaguacgaguuuaacagcccuccgaauaaccagguuaugcuuugugaacccacaauuaucgagagaaauauuaccgaaaucguguaucugacaaacaccacgauugagaaggaaaucugcccuaaacucgcugaguaccggaauugguccaagccccagugugacauuaccggguucgccccuuuuucuaaagauaacagcauccgccuguccgcgggaggcgacaucugggugacaagagagcccuaugucucuugcgauccugacaaguguuaccaauucgcucuugggcagggaaccacacugaauaacgugcauagcaauaacaccguucgggaucgcacgccguauagaacacuccugaugaaugaacugggcgugcccuuucaccucgggaccaagcaggucugcauugccugguccucuagcuccugucaugacggaaaagccuggcugcacgugugcaucacaggcgaugacaagaacgcuaccgccagcuucauuuacaauggccggcuuguugauucuguggucuccuggagcaaagagauccugcgcacccaggaaucugagugugugugcauuaacgggacauguacgguggucaugaccgacggauccgcuagcggcaaggccgauacaaaaauccucuuuaucgaggaagggaagauuguucauaccuccacacugucuggaagcgcgcaacacguggaggaaugcuccugcuauccuagauaccccggcgugcggugugucugccgcgacaacuggaaggggagcaauagaccuaucguggauauuaacaucaaagaccacucuauuguuuccagcuacguguguucuggacuugucggcgacacgccccggaagaaugauagcuccucuagcucccauugccugaacccgaauaacgaggaaggcgggcacggagugaaaggcugggccuucgacgaugggaaugacguuuggaugggacgcaccaucagcgagaagucuagacucggcuaugagacauuuaaagugaucgaagggugguccaaccauaagagcaaacugcagauuaaucggcaggucaucguggaucgcggaaacagaucuggcuacuccggcauuuucagcgucgaggggaaguccuguaucaaucggugcuuuuauguggaacugauuagaggacgcaaggaggaaaccgagguucucuggaccucuaacagcaucguggucuucuguggcacauccgggaccuacggaacaggcucuuggccugacggggcugaucugaaucuuaugcccauuuga

SEQ ID NO: 216744 - RNA, 1410 nt, Artificial Sequence
  derived and/or modified CDS sequence (opt5) from neuraminidase__InfluenzaA__AHL91073
augaaccccaaucagaagaucauuaccaucggcagcgugucccugacaauuucuacgaucugcuucuuuaugcaaauugccauccucaucaccacagucacccugcacuucaaacaguacgaguuuaacagcccuccgaauaaccagguuaugcuuugugaacccacaauuaucgagagaaauauuaccgaaaucguguaucugacaaacaccacgauugagaaggaaaucugcccuaaacucgcugaguaccggaccugguccaagccccagugugacauuacaggguucgccccuuuuucuaaagauaauagcauccgccuguccgcgggaggcgacaucugggugaccagagagcccuaugucucuugcgauccugacaaguguuaccaauucgcucuugggcagggaacaacccugaacaaugugcauagcaacaauacgguucgggaucgcacaccguauagaacccuccugaugaacgaacugggcgugcccuuucaccucgggacaaagcaggucugcauugccugguccagcagcuccugucaugacggaaaagccuggcugcacgugugcaucaccggcgaugacaagaaugcuaccgccagcuucauuuacaacggccggcuuguugauucuguggucuccuggagcaaagagauccugcgcacacaggaaucugagugugugugcauuaaugggacguguaccguggucaugacagacggauccgcuagcggcaaggccgauaccaaaauccucuuuaucgaggaagggaagauuguucauacauccacccugucuggaagcgcgcaacacguggaggaaugcuccugcuauccuagauaccccggcgugcggugugucugccgcgacaacuggaaggggagcaacagaccuaucguggauauuaauaucaaagaccacucuauuguuuccagcuacguguguucuggacuugucggcgacacgccccggaagaacgauagcuccucuggcagccauugccuggacccgaauaacgaggaagggggacacggcgugaaagggugggccuucgaugacggaaaugauguuuggaugggccgcacaaucuccgagaagucuagacucggguaugagaccuuuaaagugaucgaaggauggucuaaccauaaguccaaacugcagauuaaucggcaggucaucguggaccgcggcaacagaagcggcuacucugggauuuucuccgucgagggaaagagcuguaucaaucggugcuuuuauguggaacugauuagaggccgcaaggaggaaaccgagguucucuggacauccaacucuaucguggucuucugugggaccagcggaacauacggcacgggguccuggccugauggcgcugaccugaaucuuaugcccauuuga

SEQ ID NO: 216745 - RNA, 1410 nt, Artificial Sequence
  derived and/or modified CDS sequence (opt5) from neuraminidase__InfluenzaA__AHL91085
augaaccccaaucagaagaucauuaccaucggcagcgugucccugacaauuucuacgaucugcuucuuuaugcaaauugccauccucaucaccacagucacccugcacuucaaacaguacgaguuuaacagcccuccgaauaaccagguuaugcuuugugaacccaagauuaucgagagaaauauuacagaaaucguguaucugaccaacacaaccauugagaaagaaaucugcccuaagcucgcugaguaccggaauugguccaaaccccagugugacauuacgggguucgccccuuuuucuaaggauaacagcauccgccuguccgcgggaggcgacaucugggugaccagagagcccuaugucucuugcgauccugacaaguguuaccaauucgcucuugggcagggaacaacccugaauaacgugcauagcaauaacacaguucgggaucgcaccccguauagaacgcuccugaugaaugaacugggcgugcccuuucaccucgggacaaaacaggucugcauugccugguccucuagcuccugucaugacggaaaggccuggcugcacgugugcaucaccggcgaugacaaaaacgcuacagccagcuucauuuacaauggccggcuuguugauucuguggucuccuggagcaaggagauccugcgcacccaggaaucugagugugugugcauuaacgggaucuguaccguggucaugacagacggauccgcuagcggcaaagccgauacgaagauccucuuuauugaggaagggaagaucguucauaccuccacacugucuggaagcgcgcaacacguggaggaaugcuccugcuauccuagauaccccggcgugcggugugucugccgcgacaacuggaaagggagcaauagaccuauuguggauaucaacauuaaggaccacucuaucguuuccagcuacguguguucuggacuugucggcgacacaccccggaaaaaugauagcuccucuagcucccauugccuggacccgaacaaugaggaaggcgggcacggagugaagggcugggccuucgaugacgggaacgauguuuggaugggacgcaccaucagcgagaaaucuagacucggcuaugagaccuuuaaggugauugaagggugguccaauccuaaaagcaagcugcagaucaaccggcaggucauuguggaccgcggaaauagaucuggcuacuccggcaucuucagcgucgaggggaaguccuguauuaaccggugcuuuuauguggaacugaucagaggacgcaaagaggaaacggagguucucuggacaucuaauagcauuguggucuucuguggcaccuccgggaccuacggaacaggcucuuggcccgauggggcugacaucaaccugaugccuaucuga

SEQ ID NO: 216746 - RNA, 1410 nt, Artificial Sequence; identical to SEQ ID NO: 208671
  derived and/or modified CDS sequence (opt5) from neuraminidase__InfluenzaA__AHL91097

SEQ ID NO: 216747 - RNA, 1410 nt, Artificial Sequence
  derived and/or modified CDS sequence (opt5) from neuraminidase__InfluenzaA__AHL91109
augaaccccaaucagaagaucauuaccaucggcagcgugucccugacaauuucuacgaucugcuucuuuaugcaaauugccauccucaucaccacagucacccugcacuucaaacaguacgaguuuaacagcccuccgaauaaccagguuaugcuuugugaacccacaauuaucgagagaaauauuaccgaaaucguguaucugacaaacaccacgauugagaaggaaaucugcccuaaacucgcugaguaccggaauugguccaagccccagugugacauuaccggguucgccccuuuuucuaaagauaacagcauccgccuguccgcgggaggcgacaucugggugacaagagagcccuaugucucuugcgauccugacaaguguuaccaauucgcucuugggcagggaaccacacugaauaacgugcauagcaauaacaccguucgggaucgcacgccguauagaacacuccugaugaaugaacugggcgugcccuuucaccucgggaccaagcaggucugcauugccugguccucuagcuccugucaugacggaaaagccuggcugcacgugugcaucacaggcgaugacaagaacgcuaccgccagcuucauuuacaauggccggcuuguugauucuguggucuccuggagcaaagagauccugcgcacccaggaaucugagugugugugcauuaacgggacauguacgguggucaugaccgacggauccgcuagcggcaaggccgauacaaaaauccucuuuaucgaggaagggaagauuguucauaccuccacacugucuggaagcgcgcaacacguggaggaaugcuccugcuauccuagauaccccggcgugcggugugucugccgcgacaacuggaaggggagcaauagaccuaucguggauauuaacaucaaagaccacucuauuguuuccagcuacguguguucuggacuugucggcgacacgccccggaagaaugauagcuccucuagcucccauugccuggacccgaacaaugaggaaggcgggcacggagugaaaggcugggccuucgaugacgggaacgauguuuggaugggacgcaccaucagcgagaagucuagacucggcuaugagacauuuaaagugaucgaagggugguccaaucauaagagcaaacugcagauuaaccggcaggucaucguggaccgcggaaauagaucuggcuacuccggcauuuucagcgucgaggggaaguccuguaucaaccggugcuuuuauguggaacugauuagaggacgcaaggaggaaaccgagguucucuggaccucuaauagcaucguggucuucuguggcacauccgggaccuacggaacaggcucuuggccugauggggcugaccugaacauuaugcccaucuga

SEQ ID NO: 216748 - RNA, 1410 nt, Artificial Sequence; identical to SEQ ID NO: 209977
  derived and/or modified CDS sequence (opt5) from neuraminidase__InfluenzaA__AHL91121

SEQ ID NO: 216749 - RNA, 1410 nt, Artificial Sequence
  derived and/or modified CDS sequence (opt5) from neuraminidase__InfluenzaA__AHL91133
augaaccccaaucagaagaucauuaccaucggcagcgugucccugacaauuucuacgaucugcuucuuuaugcaaauugccauccucaucaccacagucacccugcacuucaaacaguuugaguucaacagcccuccgaauaaccagguuaugcuuugugaacccacaauuaucgagagaaauauuaccgaaaucguguaccugacaaacaccacgauugagaaggaaaucugcccuaaacucgcugaguaucggaauugguccaagccccagugugacauuaccggguuugccccuuucucuaaagauaacagcauccgccuguccgcgggaggcgacaucugggugacaagagagcccuacgucucuugcgauccugacaaguguuaucaauuugcucuugggcagggaaccacacugaauaacgugcauagcaauaacaccguucgggaucgcacgccguacagaacacuccugaugaaugaacugggcgugcccuuccaccucgggaccaagcaggucugcauugccugguccucuagcuccugucaugacggaaaagccuggcugcacgugugcaucacaggcgaugacaagaacgcuaccgccagcuuuauuuauaauggccggcuuguugauucuguggucuccuggagcaaagagauccugcgcacccaggaaucugagugugugugcauuaacgggacauguacgguggucaugaccgacggauccgcuagcggcaaggccgauacaaaaauccucuucaucgaggaagggaagauuguucauaccuccacacugucuggaagcgcgcaacacguggaggaaugcuccugcuacccuagauaucccggcgugcggugugucugccgcgacaacuggaaggggagcaauagaccuaucguggauauuaacaucaaagaccacucuauuguuuccagcuacguguguucuggacuugucggcgacacgccccggaagaaugauagcuccucuagcucccauugccuggacccgaacaaugaggaaggcgggcacggagugaaaggcugggccuuugaugacgggaacgauguuuggaugggacgcaccaucagcgagaagucuagacucggcuacgagacauucaaagugaucgaagggugguccaaucauaagagcaaacugcagauuaaccggcaggucaucguggaccgcggaaauagaucuggcuauuccggcauuuuuagcgucgaggggaaguccuguaucaaccggugcuucuacguggaacugauuagaggacgcaaggaggaaaccgagguucucuggaccucuaauagcaucguggucuucuguggcacauccgggaccuauggaacaggcucuuggccugauggggcugaccugaaccuuaugcccauuuga

SEQ ID NO: 216750 - RNA, 1410 nt, Artificial Sequence; identical to SEQ ID NO: 211376
  derived and/or modified CDS sequence (opt5) from neuraminidase__InfluenzaA__AHL91145

SEQ ID NO: 216751 - RNA, 1410 nt, Artificial Sequence; identical to SEQ ID NO: 211376
  derived and/or modified CDS sequence (opt5) from neuraminidase__InfluenzaA__AHL91157

SEQ ID NO: 216752 - RNA, 1410 nt, Artificial Sequence; identical to SEQ ID NO: 206784
  derived and/or modified CDS sequence (opt5) from neuraminidase__InfluenzaA__AHL91169

SEQ ID NO: 216753 - RNA, 1410 nt, Artificial Sequence; identical to SEQ ID NO: 214218
  derived and/or modified CDS sequence (opt5) from neuraminidase__InfluenzaA__AHL94987

SEQ ID NO: 216754 - RNA, 1410 nt, Artificial Sequence; identical to SEQ ID NO: 214218
  derived and/or modified CDS sequence (opt5) from neuraminidase__InfluenzaA__AHL94999

SEQ ID NO: 216755 - RNA, 1410 nt, Artificial Sequence
  derived and/or modified CDS sequence (opt5) from neuraminidase__InfluenzaA__AHL95011
augaaccccaaucagaagaucauuaccaucggcagcgugucccugacaauuucuacgaucugcuucuuuaugcaaauugccauccucaucaccacagucacccugcacuucaaacaguacgaguuuaacagcccuccgaauaaccagguuaugcuuugugaacccacaauuaucgagagaaauauuaccgaaaucguguaucugacaaacaccacgauugagaaggaaaucugcccuaaacccgcugaguaccggaauugguccaagccucagugugacauuaccggguucgcccccuuuucuaaagauaacagcauccgccucuccgcgggaggcgacaucugggugacaagagagccuuaugucucuugcgauccggacaaguguuaccaauucgcucuggggcagggaaccacacuuaauaacgugcauagcaauaacaccguucgggaucgcacgcccuauagaacacugcucaugaaugaacugggcgugccuuuucaccuggggaccaagcaggucugcauugccugguccucuagcuccugucaugacggaaaagccuggcuccacgugugcaucacaggcgaugacaagaacgcuaccgccagcuucauuuacaauggccggcugguugauucuguggucuccuggagcaaagagauccuucgcacccaggaaucugagugugugugcauuaacgggacauguacgguggucaugaccgacggauccgcuagcggcaaggccgauacaaaaauccuguuuaucgaggaagggaagauuguucauaccuccacacucucuggaagcgcgcaacacguggaggaaugcuccugcuaucccagauacccuggcgugcggugugucugccgcgacaacuggaaggggagcaauagacccaucguggauauuaacaucaaagaccacucuauuguuucccgguacguguguagcggacuggucggcgacaccccgcgcaagaaugauucuagcuccucuagccauugccuugacccuaacaaugaggaaggcgggcacggagugaaaggcugggccuucgaugacgggaacgauguuuggaugggaagaacgaucaaugagacaucccggcugggcuaugagaccuuuaaggugaucgaagggugguucaaccccaaaagcaagcuccagauuaaucgccaggucaucguggacagaggagaucggucuggcuacuccggcauuuuuagcgucgaggggaaaucuuguaucaacagaugcuucuauguggaacugauucgcggacggaaggaggaaaccgagguucuguggacauccaauagcaucguggucuucuguggcaccuccgggacauacggaacgggcucuuggccugacggggcugaucucaaccugaugcccauuuga

SEQ ID NO: 216756 - RNA, 1410 nt, Artificial Sequence; identical to SEQ ID NO: 215975
  derived and/or modified CDS sequence (opt5) from neuraminidase__InfluenzaA__AHL95023

SEQ ID NO: 216757 - RNA, 1410 nt, Artificial Sequence; identical to SEQ ID NO: 214218
  derived and/or modified CDS sequence (opt5) from neuraminidase__InfluenzaA__AHL95035

SEQ ID NO: 216758 - RNA, 1410 nt, Artificial Sequence; identical to SEQ ID NO: 214218
  derived and/or modified CDS sequence (opt5) from neuraminidase__InfluenzaA__AHL95047

SEQ ID NO: 216759 - RNA, 1410 nt, Artificial Sequence; identical to SEQ ID NO: 215966
  derived and/or modified CDS sequence (opt5) from neuraminidase__InfluenzaA__AHL95059

SEQ ID NO: 216760 - RNA, 1410 nt, Artificial Sequence; identical to SEQ ID NO: 214218
  derived and/or modified CDS sequence (opt5) from neuraminidase__InfluenzaA__AHL95071

SEQ ID NO: 216761 - RNA, 1410 nt, Artificial Sequence; identical to SEQ ID NO: 214218
  derived and/or modified CDS sequence (opt5) from neuraminidase__InfluenzaA__AHL95083

SEQ ID NO: 216762 - RNA, 1410 nt, Artificial Sequence; identical to SEQ ID NO: 214218
  derived and/or modified CDS sequence (opt5) from neuraminidase__InfluenzaA__AHL95095

SEQ ID NO: 216763 - RNA, 1410 nt, Artificial Sequence; identical to SEQ ID NO: 214218
  derived and/or modified CDS sequence (opt5) from neuraminidase__InfluenzaA__AHL95107

SEQ ID NO: 216764 - RNA, 1410 nt, Artificial Sequence
  derived and/or modified CDS sequence (opt5) from neuraminidase__InfluenzaA__AHL95119
augaaccccaaucagaagaucauuaccaucggcagcgugucccugacaauuucuacgaucugcuucuuuaugcaaauugccauccucaucaccacagucacccugcacuucaaacaguacgaguuuaacagcccuccgaauaaccagguuaugcuuugugaacccacaauuaucgagagaaauauuaccgaaaucguguaucugacaaacaccacgauugagaaggaaaucugcccuaaacccgcugaguaccggaauugguccaagccucagugugacauuaccggguucgcccccuuuucuaaagauaacagcauccgccucuccgcgggaggcgacaucugggugacaagagagccuuaugucucuugcgauccggacaaguguuaccaauucgcucuggggcagggaaccacacuuaauaacgugcauagcaauaacaccguucgggaucgcacgcccuauagaacacugcucaugaaugaacugggcgugccuuuucaccuggggaccaagcaggucugcauugccugguccucuagcuccugucaugacggaaaagccuggcuccacgugugcaucacaggcgaugacaagaacgcuaccgccagcuucauuuacaauggccggcugguugauucuguggucuccuggagcaaagagauccuucgcacccaggaaucugagugugugugcauuaacgggacauguacgguggucaugaccgacggauccgcuagcggcaaggccgauacaaaaauccuguuuaucgaggaagggaagauuguucauaccuccacacucucuggaagcgcgcaacacguggaggaaugcuccugcuaucccagauacccuggcgugcggugugucugccgcgacaacuggaaggggagcaauagacccaucguggauauuaacaucaaagaccacucuauuguuucccgguacguguguagcggacuggucggcgacaccccgcgcaagaaugauucucuuagcuccucucauugccuggacccuaacaaugaggaaggcgggcacggagugaaaggcugggccuucgaugacgggaacgauguuuggaugggaagaacgaucaaugagacaagccggcucggcuaugagaccuuuaaggugaucgaagggugguccaaccccaaaagcaagcugcagauuaaucgccaggucaucguggacagaggagaucggucuggcuacuccggcauuuucagcgucgaggggaaaucuuguaucaacagaugcuuuuauguggaacugauucgcggacggaaggaggaaaccgagguucucuggacauccaauagcaucguggucuucuguggcaccuccgggacauacggaacgggcucuuggccugacggggcugaucugaaccuuaugcccauuuga

SEQ ID NO: 216765 - RNA, 1410 nt, Artificial Sequence; identical to SEQ ID NO: 215447
  derived and/or modified CDS sequence (opt5) from neuraminidase__InfluenzaA__AHL95131

SEQ ID NO: 216766 - RNA, 1410 nt, Artificial Sequence; identical to SEQ ID NO: 215955
  derived and/or modified CDS sequence (opt5) from neuraminidase__InfluenzaA__AHL95143

SEQ ID NO: 216767 - RNA, 1410 nt, Artificial Sequence
  derived and/or modified CDS sequence (opt5) from neuraminidase__InfluenzaA__AHL95155
augaaccccaaucagaagaucauuaccaucggcagcgugucccugacaauuucuacgaucugcuucuuuaugcaaauugccauccucaucaccacagucacccugcacuucaaacaguacgaguuuaacagcccuccgaauaaccagguuaugcuuugugaacccacaauuaucgagagaaauauuaccgaaaucguguaucugacaaacaccacgauugagaaggaaaucugcccuaaacccgcugaguaccggaauugguccaagccucagugugggauuaccggauucgcccccuuuucuaaagacaacagcauccgccucuccgcgggcggggauaucugggugacaagagagccuuaugucucuugcgacccggauaaguguuaccaauucgcucugggacagggcaccacacuuaauaacgugcauagcaauaacaccguucgggaccgcacgcccuauagaacacugcucaugaaugaacugggggugccuuuucaccugggaaccaagcaggucugcauugccugguccucuagcuccugucaugauggcaaagccuggcuccacgugugcaucacaggcgacgauaagaacgcuaccgccagcuucauuuacaaugggcggcugguugacucuguggucuccuggagcaaagagauccuucgcacccaggaaucugagugugugugcauuaacggaacauguacgguggucaugaccgauggcuccgcuagcgggaaggccgacacaaaaauccuguuuaucgaggaaggaaagauuguucauaccuccacacucucuggcagcgcgcaacacguggaggaaugcuccugcuaucccagauacccuggggugcggugugucugccgcgauaacuggaagggaagcaauagacccaucguggacauuaacaucaaagaucacucuauuguuuccagcuacguguguucuggccuggucggcgacaccccgcggaagaaugacagcuccucuagcucccauugccuugauccuaacaaugaggaagggagccacggagugaaaggcugggccuucgacgaugggaacgacguuuggaugggacgcacgaucaaugagacaucuagacugggcuaugagaccuuuaaggugaucgaagggugguccaaccccaaaagcaagcuccagauuaaucggcaggucaucguggaucgcggagacagaucuggcuacuccggcauuuucagcgucgaggggaaauccuguaucaaccggugcuuuuauguggaacugauuagaggacgcaaggaggaaaccgagguucuguggacaucuaauagcaucguggucuucuguggcaccuccgggacauacggaacgggcucuuggccugauggggcugaccucaaccugaugcccauuuga

SEQ ID NO: 216768 - RNA, 1410 nt, Artificial Sequence
  derived and/or modified CDS sequence (opt5) from neuraminidase__InfluenzaA__AHL95167
augaaccccaaucagaagaucauuaccaucggcagcgugucccugacaauuucuacgaucugcuucuuuaugcaaauugccauccucaucaccacagucacccugcacuucaaacaguacgaguuuaacagcccuccgaauaaccagguuaugcuuugugaacccacaauuaucgagagaaauauuaccgaaaucguguaucugacaaacaccacgauugagaaggaaaucugcccuaaacccgcugaguaccggaauugguccaagccucagugugacauuaccggguucgcccccuuuucuaaagauaacagcauccgccucuccgcgggaggcgacaucugggugacaagagagccuuaugucucuugcgauccggacaaguguuaccaauucgcucuggggcagggaaccacacuuaauaacgugcauagcaauaacaccguucgggaucgcacgcccuauagaacacugcucaugaaugaacugggcgugccuuuucaccuggggaccaagcaggucugcauugccugguccucuagcuccugucaugacggaaaagccuggcuccacgugugcaucacaggcgaugacaagaacgcuaccgccagcuucauuuacaauggccggcugguugauucuguggucuccuggagcaaagagauccuucgcacccaggaaucugagugugugugcauuaacgggacauguacgguggucaugaccgacggauccgcuagcggcaaggccgauacaaaaauccuguuuaucgaggaagggaagauuguucauaccuccacacucucuggaagcgcgcaacacguggaggaaugcuccugcuaucccagauacccuggcgugcggugugucugccgcgacaacuggaaggggagcaauagacccaucguggauauuaacaucaaagaccacucuauuguuucccgguaccuguguagcggacuugugggcgacaccccgcgcaagaaugauucuagcuccucuagccauugccuggacccuaacaaugaggaaggcgggcacggagucaaaggcugggccuucgaugacgggaacgauguguggaugggaagaacgaucaaugagacaucccggcucggcuaugagaccuuuaagguuaucgaaggguggagcaaccccaaaucuaagcugcagauuaaucgccaggugaucgucgacagaggagaucgguccggcuacagcggcauuuucucuguggaggggaaauccuguaucaacagaugcuuuuaugucgaacugauucgcggacggaaggaggaaaccgaggugcucuggacaagcaauuccaucguuguguucuguggcaccucugggacauacggaacgggcagcuggccugacggggcugaucugaaccuuaugcccauuuga

SEQ ID NO: 216769 - RNA, 1410 nt, Artificial Sequence; identical to SEQ ID NO: 214218
  derived and/or modified CDS sequence (opt5) from neuraminidase__InfluenzaA__AHL95179

SEQ ID NO: 216770 - RNA, 1410 nt, Artificial Sequence; identical to SEQ ID NO: 214218
  derived and/or modified CDS sequence (opt5) from neuraminidase__InfluenzaA__AHL95191

SEQ ID NO: 216771 - RNA, 1410 nt, Artificial Sequence; identical to SEQ ID NO: 214218
  derived and/or modified CDS sequence (opt5) from neuraminidase__InfluenzaA__AHL95203

SEQ ID NO: 216772 - RNA, 1410 nt, Artificial Sequence; identical to SEQ ID NO: 214218
  derived and/or modified CDS sequence (opt5) from neuraminidase__InfluenzaA__AHL95215

SEQ ID NO: 216773 - RNA, 1410 nt, Artificial Sequence
  derived and/or modified CDS sequence (opt5) from neuraminidase__InfluenzaA__AHL95227
augaaccccaaucagaagaucauuaccaucggcagcgugucccugacaauuucuacgaucugcuucuuuaugcaaauugccauccucaucaccacagucacccugcacuucaaacaguacgaguuuaacagcccuccgaauaaccagguuaugcuuugugaacccacaauuaucgagagaaauauuaccgaaaucguguaucugacaaacaccacgauugagaaggaaaucugcccuaaacccgcugaguaccggaauugguccaagccucagugugggauuaccggauucgcccccuuuucuaaagacaacagcauccgccucuccgcgggcggggauaucugggugacaagagagccuuaugucucuugcgacccggauaaguguuaccaauucgcucugggacagggcaccacacuuaauaacaugcauagcaauaacaccgugcgggaccgcacgcccuauagaacacugcucaugaaugaacuggggguuccuuuucaccugggaaccaaacaggugugcauugccugguccucuagcuccugucaugauggcaaggccuggcuccacgucugcaucacaggcgacgauaagaacgcuaccgccagcuucauuuacaaugggcggcugguggacucuguuguguccuggagcaaagagauccuucgcacccaggaaucugagugugucugcauuaacggaacauguacgguggugaugaccgauggcuccgcuagcgggaaggccgacacaaaaauccuguuuaucgaggaaggaaagauuguccauaccuccacacucucuggcagcgcgcaacacguugaggaaugcuccugcuaucccagauacccuggggugcggugugugugccgcgauaacuggaagggaagcaauagacccaucgucgacauuaacaucaaagaucacucuauuguguccagcuacguuuguucuggccuggugggcgacaccccgcgggagaaugacagcuccucuagcucccauugccuugauccuaacaaugaagaagggggacacggcgucaaggggugggccuucgacgauggaaacgacguguggaugggccgcacgaucaaugagacaagcagacugggguaugagaccuuuaaaguuaucgagggauggucuaaccccaaguccaaacuccagauuaaucgccaggugaucgucgaucggggcgacagaagcggcuacucugggauuuucuccguggaaggaaagagcuguaucaaccggugcuuuuaugucgagcugauuagaggccgcaaagaagagaccgaggugcuguggacauccaauucuaucguuguguucugugggaccagcggaacauacggcacgggguccuggccugauggcgcugaccucaaccugaugcccauuuga

SEQ ID NO: 216774 - RNA, 1410 nt, Artificial Sequence; identical to SEQ ID NO: 215955
  derived and/or modified CDS sequence (opt5) from neuraminidase__InfluenzaA__AHL95239

SEQ ID NO: 216775 - RNA, 1410 nt, Artificial Sequence
  derived and/or modified CDS sequence (opt5) from neuraminidase__InfluenzaA__AHL95251
augaaccccaaucagaagaucauuaccaucggcagcgugucccugacaauuucuacgaucugcuucuuuaugcaaauugccauccucaucaccacagucacccugcacuucaaacaguacgaguuuaacagcccuccgaauaaccagguuaugcuuugugaacccacaauuaucgagagaaauauuaccgaaaucguguaucugacaaacaccacgauugagaaggaaaucugcccuaaacccgcugaguaccggaauugguccaagccucagugugggauuaccggauucgcccccuuuucuaaagacaacagcauccgccucuccgcgggcggggauaucugggugacaagagagccuuaugucucuugcgacccggauaaguguuaccaauucgcucugggacagggcaccacacuuaauaacgugcauagcaauaacaccguucgggaccgcacgcccuauagaacacugcucaugaaugaacugggggugccuuuucaccugggaaccaagcaggucugcauugccugguccucuagcuccugucaugauggcaaagccuggcuccacgugugcaucacaggcgacgauaagaacgcuaccgccagcuucauuuacaaugggcggcugguugacucuguggucuccuggagcaaagagauccuucgcacccaggaaucugagugugugugcauuaacggaacauguacgguggucaugaccgauggcuccgcuagcgggaaggccgacacaaaaauccuguuuaucaaggagggaaagauuguucauaccuccacacucucuggcagcgcgcaacacguggaagagugcuccugcuaucccagauacccuggggugcggugugucugccgcgauaacuggaaaggaagcaauagacccaucguggacauuaacaucaaggaucacucuauuguuuccagcuacguguguucuggccuggucggcgacaccccgcggaaaaaugacagcuccucuagcucccauugccuugauccuaacaaugaagaagggggacacggcgugaaggggugggccuucgacgauggaaacgacguuuggaugggccgcacgaucaaugagacaagcagacugggguaugagaccuuuaaagugaucgagggauggucuaaccccaaguccaaacuccagauuaaucggcaggucaucguggaucgcggcgacagaagcggcuacucugggauuuucuccgucgaaggaaagagcuguaucaaccggugcuuuuauguggagcugauuagaggccgcaaggaagagaccgaaguucuguggacauccaauucuaucguggucuucugugggaccagcggaacauacggcacgggguccuggccugauggcgcugaccucaaccugaugcccauuuga

SEQ ID NO: 216776 - RNA, 1410 nt, Artificial Sequence; identical to SEQ ID NO: 214218
  derived and/or modified CDS sequence (opt5) from neuraminidase__InfluenzaA__AHL95263

SEQ ID NO: 216777 - RNA, 1410 nt, Artificial Sequence
  derived and/or modified CDS sequence (opt5) from neuraminidase__InfluenzaA__AHL95275
augaaccccaaucagaagaucauuaccaucggcagcgugucccugacaauuucuacgaucugcuucuuuaugcaaauugccauccucaucaccacagucacccugcacuucaaacaguacgaguuuaacagcccuccgaauaaccagguuaugcuuugugaacccacaauuaucgagagaaauauuaccgaaaucguguaucugacaaacauuaccaucgagaaggaaauuugcccuaaacccgcugaguaccggaauugguccaagccucagugugggaucacgggauucgcccccuuuucuaaagacaacagcauccgccucuccgcgggcggggauauuugggugaccagagagccuuaugucucuugcgacccggauaaguguuaccaauucgcucugggacagggcacaacccuuaauaacgugcauagcaauaacacaguucgggaccgcacccccuauagaacgcugcucaugaaugaacugggggugccuuuucaccugggaacaaagcaggucugcaucgccugguccucuagcuccugucaugauggcaaagccuggcuccacgugugcauuaccggcgacgauaagaacgcuacagccagcuucaucuacaaugggcggcugguugacucuguggucuccuggagcaaagagauucuucgcacccaggaaucugagugugugugcaucaacggaaccuguacaguggucaugacggauggcuccgcuagcgggaaggccgacaccaaaauccuguuuauugaggaaggaaagaucguucauacauccacccucucuggcagcgcgcaacacguggaggaaugcuccugcuaucccagauacccuggggugcggugugucugccgcgauaacuggaagggaagcaauagacccauuguggacaucaacauuaaagaucacucuaucguuuccagcuacguguguucuggccuggucggcgacacaccgcggaagaaugacagcuccucuagcucccauugccuugauccuaacaaugaggaagggggacacggcgugaaagggugggccuucgacgauggaaacgacguuuggaugggccgcaccaucaaugagacgagcagacugggguaugagacauuuaaggugauugaaggauggucuaaccccaaauccaagcuccagaucaaucggcaggucauuguggaucgcggcgacagaagcggcuacucugggaucuucuccgucgagggaaaaagcuguauuaaccggugcuuuuauguggaacugaucagaggccgcaaggaggaaaccgagguucuguggaccuccaauucuauuguggucuucugugggacaagcggaaccuacggcacaggguccuggccugauggcgcugaccucaaccugaugcccaucuga

SEQ ID NO: 216778 - RNA, 1410 nt, Artificial Sequence; identical to SEQ ID NO: 215461
  derived and/or modified CDS sequence (opt5) from neuraminidase__InfluenzaA__AHL95299

SEQ ID NO: 216779 - RNA, 1410 nt, Artificial Sequence
  derived and/or modified CDS sequence (opt5) from neuraminidase__InfluenzaA__AHL95310
augaaccccaaucagaagaucauuaccaucggcagcgugucccugacaauuucuacgaucugcuucuuuaugcaaauugccauccucaucaccacagucacccugcacuucaaacaguacgaguuuaacagcccuccgaauaaccagguuaugcuuugugaacccacaauuaucgagagaaauauuaccgaaaucguguaucugacaaacaccacgauugagaaggaaaucugcccuaaacccgcugaguaccggaauugguccaagccucagugugacauuaccggguucgcccccuuuucuaaagauaacagcauccgccucuccgcgggaggcgacaucugggugacaagagagccuuaugucucuugcgauccggacaaguguuaccaauucgcucuggggcagggaaccacacuuaauaacgugcauagcaauaacaccguucgggaucgcacgcccuauagaacacugcucaugaaugaacugggcgugccuuuucaccuggggaccaagcaggucugcauugccugguccucuagcuccugucaugacggaaaagccuggcuccacgugugcaucacaggcgaugacaagaacgcuaccgccagcuucauuuacaauggccggcugguugauucuguggucuccuggagcaaagagauccuucgcacccaggaaucugagugugugugcauuaacgggacauguacgguggucaugaccgacggauccgcuagcggcaaggccgauacaaaaauccuguuuaucgaggaagggaagauuguucauaccuccacacucucuggaagcgcgcaacacguggaggaaugcuccugcuaucccagauacccuggcgugcggugugucugccgcgacaacuggaaggggagcaauagacccaucguggauauuaacaucaaagaccacucuauuguuucccgguacguguguagcggacuggucggcgacaccccgcgcaagaaugauucuagcuccucuagccauugccuugacccuaacaaugaggaaggcgggcacggagugaaaggcugggccuucgaugacgggaacgauguuuggaugggaagaacgaucaaugagacaucccggcugggcuaugagaccuuuaaggugaucgaaggguggagcaaccccaaaucuaagcuccagauuaaucgccaggucaucguggacagaggagaucgguccggcuacagcggcauuuucucugucgaggggaaauccuguaucaacagaugcuuuuauguggaacugauucgcggacggaaggaggaaaccgagguucuguggacaagcaauuccaucguggucuucuguggcaccucugggacauacggaacgggcagcuggccugacggggcuaaccucaaucugaugcccauuuga

SEQ ID NO: 216780 - RNA, 1410 nt, Artificial Sequence; identical to SEQ ID NO: 215966
  derived and/or modified CDS sequence (opt5) from neuraminidase__InfluenzaA__AHL95322

SEQ ID NO: 216781 - RNA, 1410 nt, Artificial Sequence; identical to SEQ ID NO: 215943
  derived and/or modified CDS sequence (opt5) from neuraminidase__InfluenzaA__AHL95334

SEQ ID NO: 216782 - RNA, 1410 nt, Artificial Sequence; identical to SEQ ID NO: 214218
  derived and/or modified CDS sequence (opt5) from neuraminidase__InfluenzaA__AHL95423

SEQ ID NO: 216783 - RNA, 1410 nt, Artificial Sequence; identical to SEQ ID NO: 215966
  derived and/or modified CDS sequence (opt5) from neuraminidase__InfluenzaA__AHL95435

SEQ ID NO: 216784 - RNA, 1410 nt, Artificial Sequence; identical to SEQ ID NO: 215943
  derived and/or modified CDS sequence (opt5) from neuraminidase__InfluenzaA__AHL95447

SEQ ID NO: 216785 - RNA, 1410 nt, Artificial Sequence
  derived and/or modified CDS sequence (opt5) from neuraminidase__InfluenzaA__AHL95461
augaaccccaaucagaagaucauuaccaucggcagcgugucccugacaauuucuacgaucugcuucuuuaugcaaauugccauccucaucaccacagucacccugcacuucaaacaguacgaguuuaacccuccgcccaauaaccagguuaugcuuugugaaccuacaauuaucgagagaaauauuaccgaaaucguguaucugacaaacaccacgauugagaaggaaaucugccccaaaccugcugaguaccggaauuggagcaagccccagugugggauuaccggauucgccccuuuuuccaaagacaacucuauccgccucagcgcgggcggggauaucugggugacaagagagccguaugucuccugcggacccgacaaguguuaccaauucgcucugggccaggggaccacacuuaauaacaugcauucuaauaacaccgugcgggaucgcacgccuuauagaacacugcucaugaaugaacugggaguucccuuucaccugggcaccaaacaggugugcauugccuggagcuccagcucuugucaugacggcaaggccuggcuccacgucugcaucacaggggaugacaagaacgcuaccgccuccuucauuuacaauggacggcugguggauagcguugugucuugguccaaagagauccuucgcacccaggaaagcgagugugucugcauuaacggcacauguacgguggugaugaccgacgggucugcuuccggaaaggccgauacaaaaauccuguuuaucgaggaaggcaagauuguccauaccagcacacucuccgggucugcgcaacacguugaggaaugcagcugcuauccuagauaccccggagugcggugugugugccgcgacaacuggaagggcuccaauagaccgaucgucgauauuaacaucaaagaccacagcauugugucuuccuacguuuguagcggccuggugggggauaccccucggaagaaugacucuagcuccucuagccauugccuugaccccaacaaugaggaaggaggccacggggucaaaggaugggccuucgaugacggcaacgauguguggauggggcgcacgaucaaugagacauccagacugggauaugagaccuuuaagguuaucgaaggcuggagcaacccuaaaucuaagcuccagauuaaucgccaggugaucgucgaccggggcgauagauccggguacagcggaauuuucucuguggagggcaaauccuguaucaaccggugcuuuuaugucgaacugauuagagggcgcaaggaggaaaccgaggugcuguggacaagcaauuccaucguuguguucuguggaaccucuggcacauacgggacgggcagcuggcccgacggagcugaucucaaccugaugcccauuuga

SEQ ID NO: 216786 - RNA, 1410 nt, Artificial Sequence; identical to SEQ ID NO: 214994
  derived and/or modified CDS sequence (opt5) from neuraminidase__InfluenzaA__AHL95473

SEQ ID NO: 216787 - RNA, 1410 nt, Artificial Sequence; identical to SEQ ID NO: 214218
  derived and/or modified CDS sequence (opt5) from neuraminidase__InfluenzaA__AHL95485

SEQ ID NO: 216788 - RNA, 1410 nt, Artificial Sequence; identical to SEQ ID NO: 214218
  derived and/or modified CDS sequence (opt5) from neuraminidase__InfluenzaA__AHL95497

SEQ ID NO: 216789 - RNA, 1410 nt, Artificial Sequence
  derived and/or modified CDS sequence (opt5) from neuraminidase__InfluenzaA__AHL95509
augaaccccaaucagaagaucauuaccaucggcagcgugucccugacaauuucuacgaucugcuucuuuaugcaaauugccauccucaucaccacagucacccugcacuucaaacaguacgaguuuaacagcccuccgaauaaccagguuaugcuuugugaacccacaauuaucgagagaaauauuaccgaaaucguguaucugacaaacaccacgauugagaaggaaaucugcccuaaacccgcugaguaccggaauugguccaagccucagugugggauuaccggauucgcccccuuuucuaaagacaacagcauccgccucuccgcgggcggggauaucugggugacaagagagccuuaugucucuugcgacccggauaaguguuaccaauucgcucugggacagggcaccacacuuaauaacgugcauagcaauaacaccguucgggaccgcacgcccuauagaacacugcucaugaaugaacugggggugccuuuucaccugggaaccaagcaggucugcauugccugguccucuagcuccugucaugauggcaaagccuggcuccacgugugcaucacaggcgacgauaagaacgcuaccgccagcuucauuuacaaugggcggcugguugacucuguggucuccuggagcaaagagauccuucgcacccaggaaucugagugugugugcauuaacggaacauguacgguggucaugaccgauggcuccgcuagcgggaaggccgacacaaaaauccuguuuaucgaggaaggaaagauuguucauaccuccacacucucuggcagcgcgcaacacguggaggaaugcuccugcuaucccagauacccuggggugcggugugucugccgcgauaacuggaagggaagcaauagacccaucguggacauuaacaucaaaaaucacucuauuguuuccagcuacguguguucuggccuggucggcgauaccccgcggaagaacgacagcuccucuagcucccauugccuugacccuaauaacgaggaagggggacacggcgugaaagggugggccuucgaugacggaaaugauguuuggaugggccgcacgaucaacgagacaagcagacugggguaugagaccuuuaaggugaucgaaggauggucuaaucccaaauccaagcuccagauuaaccggcaggucaucguggaccgcggcgauagaagcggcuacucugggauuuucuccgucgagggaaaaagcuguaucaaucggugcuuuuauguggaacugauuagaggccgcaaggaggaaaccgagguucuguggacauccaacucuaucguggucuucugugggaccagcggaacauacggcacgggguccuggccugacggcgcugaucucaaucugaugcccauuuga

SEQ ID NO: 216790 - RNA, 1410 nt, Artificial Sequence; identical to SEQ ID NO: 214218
  derived and/or modified CDS sequence (opt5) from neuraminidase__InfluenzaA__AHL95521

SEQ ID NO: 216791 - RNA, 1410 nt, Artificial Sequence; identical to SEQ ID NO: 214218
  derived and/or modified CDS sequence (opt5) from neuraminidase__InfluenzaA__AHL95533

SEQ ID NO: 216792 - RNA, 1410 nt, Artificial Sequence; identical to SEQ ID NO: 214218
  derived and/or modified CDS sequence (opt5) from neuraminidase__InfluenzaA__AHL95545

SEQ ID NO: 216793 - RNA, 1410 nt, Artificial Sequence
  derived and/or modified CDS sequence (opt5) from neuraminidase__InfluenzaA__AHL95557
augaaccccaaucagaagaucauuaccaucggcagcgugucccugacaauuucuacgaucugcuucuuuauucaaaucgccauccucauuaccacagucacccugcacuucaaacaguacgaguuuaacagcccuccgaauaaccagguuaugcuuugugaacccacaaucauugagagaaauaucaccgaaauuguguaucugacaaacaccacgaucgagaaggaaauuugcccuaaacccgcugaguaccggaauugguccaagccucagugugggaucaccggauucgcccccuuuucuaaagacaacagcauccgccucuccgcgggcggggauauuugggugacaagagagccuuaugucucuugcgacccggauaaguguuaccaauucgcucugggacagggcaccacacuuaauaacgugcauagcaauaacaccgcccgggaccgcacgcccuauagaacacugcucaugaaugaacuggggguuccuuuucaccugggaaccaaacaggugugcaucgccugguccucuagcuccugucaugauggcaaggcuuggcuccacgucugcauuacaggcgacgauaagaacgccaccgcuagcuucaucuacaaugggcggcugguggacucuguuguguccuggagcaaagagauucuucgcacccaggaaucugagugugucugcaucaacggaacauguacgguggugaugaccgauggcuccgccagcgggaaggcggacacaaaaauccuguuuauugaggaaggaaagaucguccauaccuccacacucucuggcagcgcccaacacguugaggaaugcuccugcuaucccagauacccuggggugcggugugugugccgcgauaacuggaagggaagcaauagacccauugucgacaucaacauuaaagaucacucuaucguguccagcuacguuuguucuggccuggugggcgacaccccgcggaagaaugacagcuccucuagcucccauugccuugauccuaacaaugaggaagggggacacggcgucaaagggugggcuuucgacgauggaaacgacguguggaugggccgcacgaucaaugagacaagcagacugggguaugagaccuuuaagguuauugaaggauggucuaaccccgaguccaaacuccagaucaaucgccaggugauugucgaucggggcgacagaagcggcuacucugggaucuucuccguggaaggaaagagcuguauuaaccggugcuuuuaugucgagcugaucagaggccgcaaagaagagaccgaggugcuguggacauccaauucuauuguuguguucugugggaccagcggaacauacggcacgggguccuggccugauggcgccgaccucaaccugaugcccaucuga

SEQ ID NO: 216794 - RNA, 1410 nt, Artificial Sequence; identical to SEQ ID NO: 215943
  derived and/or modified CDS sequence (opt5) from neuraminidase__InfluenzaA__AHL95569

SEQ ID NO: 216795 - RNA, 1410 nt, Artificial Sequence; identical to SEQ ID NO: 214218
  derived and/or modified CDS sequence (opt5) from neuraminidase__InfluenzaA__AHL95581

SEQ ID NO: 216796 - RNA, 1410 nt, Artificial Sequence
  derived and/or modified CDS sequence (opt5) from neuraminidase__InfluenzaA__AHL95605
augaaccccaaucagaagaucauuaccaucggcagcgugucccugacaauuucuacgaucugcuucuuuaugcaaauugccauccucaucaccacagucacccugcacuucaaacaguacgaguuuaacagcccuccgaauaaccagguuaugcuuugugaacccacaauuaucgagagaaauauuaccgaaaucguguaucugacaaacaccacgauugagaaggaaaucugcccuaaacccgcugaguaccggaauugguccaagccucagugugggauuaccggauucgcccccuuuucuaaagacaacagcauccgccucuccgcgggcggggauaucugggugacaagagagccuuaugucucuugcgacccggauaaguguuaccaauucgcucugggacagggcaccacacuuaauaacgugcauagcaauaacaccguucgggaccgcacgcccuauagaacacugcucaugaaugaacugggggugccuuuucaccugggaaccaagcaggucugcauugccugguccucuagcuccugucaugauggcaaagccuggcuccacgugugcaucacaggcgacgauaagaacgcuaccgccagcuucauuuacaaugggcggcugguugacucuguggucuccuggagcaaagagauccuucgcacccaggaaucugagugugugugcauuaacggaacauguacgguggucaugaccgauggcuccgcuagcgggaaggccgacacaaaaauccuguuuaucgaggaaggaaagauuguucauaccuccacacucucuggcagcgcgcaacacguggaggaaugcuccugcuaucccagauacccuggggugcggugugucugccgcgauaacuggaagggaagcaauagacccaucguggacauuaacaucaaagaucacucuauuguuuccagcuacguguguucuggccuggucggcgacaccccgcggaagaaugacaucagcuccucuagccauugccuugauccuaacaaugaggaagggggacacggcgugaaagggugggccuucgacgauggaaacgacguuuggaugggccgcacgaucaaugagacauccagacugggguaugagaccuuuaaggugauugaaggauggagcaaccccaaaucuaagcuccagaucaaucggcaggucauuguggaucgcggcgacagauccggcuacagcgggaucuucucugucgagggaaaauccuguauuaaccggugcuuuuauguggaacugaucagaggccgcaaggaggaaaccgagguucuguggacaagcaauuccauuguggucuucugugggaccucuggaacauacggcacggggagcuggccugauggcgcugaccucaaccugaugcccaucuga

SEQ ID NO: 216797 - RNA, 1410 nt, Artificial Sequence; identical to SEQ ID NO: 214218
  derived and/or modified CDS sequence (opt5) from neuraminidase__InfluenzaA__AHL95617

SEQ ID NO: 216798 - RNA, 1410 nt, Artificial Sequence; identical to SEQ ID NO: 214218
  derived and/or modified CDS sequence (opt5) from neuraminidase__InfluenzaA__AHL95629

SEQ ID NO: 216799 - RNA, 1410 nt, Artificial Sequence; identical to SEQ ID NO: 214218
  derived and/or modified CDS sequence (opt5) from neuraminidase__InfluenzaA__AHL95641

SEQ ID NO: 216800 - RNA, 1410 nt, Artificial Sequence; identical to SEQ ID NO: 214218
  derived and/or modified CDS sequence (opt5) from neuraminidase__InfluenzaA__AHL95653

SEQ ID NO: 216801 - RNA, 1410 nt, Artificial Sequence; identical to SEQ ID NO: 216796
  derived and/or modified CDS sequence (opt5) from neuraminidase__InfluenzaA__AHL95665

SEQ ID NO: 216802 - RNA, 1410 nt, Artificial Sequence; identical to SEQ ID NO: 214218
  derived and/or modified CDS sequence (opt5) from neuraminidase__InfluenzaA__AHL95677

SEQ ID NO: 216803 - RNA, 1410 nt, Artificial Sequence
  derived and/or modified CDS sequence (opt5) from neuraminidase__InfluenzaA__AHL95689
augaaccccaaucagaagaucauuaccaucggcagcgugucccugacaauuucuacgaucugcuucuuuaugcaaauugccauccucaucaccacagucacccugcacuucaaacaguacgaguuugacagcccuccgaacaaucagguuaugcuuugugaacccacaauuaucgagagaaacauuaccgaaaucguguaucugacaaauaccacgauugagaaggaaaucugcccuaaacccgcugaguaccggaacugguccaagccucagugugggauuaccggauucgcccccuuuucuaaagauaauagcauccgccucuccgcgggcggggacaucugggugacaagagagccuuaugucucuugcgauccggacaaguguuaccaauucgcucugggacagggcaccacacuuaacaaugugcauagcaacaauaccguucgggaucgcacgcccuauagaacacugcucaugaacgaacugggggugccuuuucaccugggaaccaagcaggucugcauugccugguccucuagcuccugucaugacggcaaagccuggcuccacgugugcaucacaggcgaugacaagaaugcuaccgccagcuucauuuacaacgggcggcugguugauucuguggucuccuggagcaaagagauccuucgcacccaggaaucugagugugugugcauuaauggaacauguacgguggucaugaccgacggcuccgcuagcgggaaggccgauacaaaaauccuguuuaucgaggaaggaaagauuguucauaccuccacacucucuggcagcgcgcaacacguggaggaaugcuccugcuaucccagauacccuggggugcggugugucugccgcgacaacuggaagggaagcaacagacccaucguggauauuaauaucaaagaccacucuauuguuuccagcuacguguguucuggccuggucggcgacaccccgcggaagaacgauagcuccucuagcucccauugccuugacccuaauaacgaggaagggggacacggcgugaaagggugggccuucgaugacggaaaugauguuuggaugggccgcacgaucaacgagacaagcagacugggguaugagaccuuuaaggugaucgaaggauggucuaaucccaaauccaagcuccagauuaaccggcaggucaucguggaccgcggcgauagaagcggcuacucugggauuuucuccgucgagggaaaaagcuguaucaaucggugcuuuuauguggaacugauuagaggccgcaaggaggaaaccgagguucuguggacauccaacucuaucguggucuucugugggaccagcggaacauacggcacgggguccuggccugacggcgcuaaucucaaccugaugcccauuuga

SEQ ID NO: 216804 - RNA, 1410 nt, Artificial Sequence; identical to SEQ ID NO: 214218
  derived and/or modified CDS sequence (opt5) from neuraminidase__InfluenzaA__AHL95701

SEQ ID NO: 216805 - RNA, 1410 nt, Artificial Sequence; identical to SEQ ID NO: 214218
  derived and/or modified CDS sequence (opt5) from neuraminidase__InfluenzaA__AHL95713

SEQ ID NO: 216806 - RNA, 1410 nt, Artificial Sequence
  derived and/or modified CDS sequence (opt5) from neuraminidase__InfluenzaA__AHL95725
augaaccccaaucagaagaucauuaccaucggcagcgugucccugacaauuucuacgaucugcuucuuuaugcaaauugccauccucaucaccacagucacccugcacuucaaacaguacgaguuugacccuccgcccaacaaucagguuaugcuuugugaaccuacaauuaucgagagaaacauuaccgaaaucguguaucugacaaauaccacgauugagaaggaaaucugccccaaaccugcugaguaccggaacuggagcaagccccagugugggauuaccggauucgccccuuuuuccaaagauaauucuauccgccucagcgcgggcggggacaucugggugacaagagagccguaugucuccugcgaucccgacaaguguuaccaauucgcucugggacagggcaccacacuuaacaaugugcauucuaacaauaccguucgggaucgcacgccuuauagaacacugcucaugaacgaacugggggugcccuuucaccugggaaccaagcaggucugcauugccuggagcuccagcucuugucaugacggcaaagccuggcuccacgugugcaucacaggcgaugacaagaaugcuaccgccuccuucauuuacaacgggcggcugguugauagcguggucucuugguccaaagagauccuucgcacccaggaaagcgagugugugugcauuaauggaacauguacgguggucaugaccgacggcucugcuuccgggaaggccgauacaaaaauccuguuuaucgaggaaggaaagauuguucauaccagcacacucuccggcucugcgcaacacguggaggaaugcagcugcuauccuagauaccccggggugcggugugucugccgcgacaacuggaagggauccaacagaccgaucguggauauuaauaucaaagaccacagcauuguuucuuccuacguguguagcggccuggucggcgacaccccucggaagaacgauucuagcuccucuagccauugccuugaccccaauaacgaggaagggggacacggcgugaaagggugggccuucgaugacggaaaugauguuuggaugggccgcacgaucaacgagacauccagacugggguaugagaccuuuaaggugaucgaaggauggagcaauccuaaaucuaagcuccagauuaaccggcaggucaucguggaccgcggcgauagauccggcuacagcgggauuuucucugucgagggaaaauccuguaucaaucggugcuuuuauguggaacugauuagaggccgcaaggaggaaaucgagguucuguggaccagcaacuccauuguggucuucugugggacaucuggaaccuacggcacagggagcuggcccgacggcgcugaucucaaucugaugcccaucuga

SEQ ID NO: 216807 - RNA, 1410 nt, Artificial Sequence; identical to SEQ ID NO: 215955
  derived and/or modified CDS sequence (opt5) from neuraminidase__InfluenzaA__AHL95737

SEQ ID NO: 216808 - RNA, 1410 nt, Artificial Sequence
  derived and/or modified CDS sequence (opt5) from neuraminidase__InfluenzaA__AHL95749
augaaccccaaucagaagaucauuaccaucggcagcgugucccugacaauuucuacgaucugcuucuuuaugcaaauugccauccucaucaccacagucacccugcacuucaaacaguacgaguuuaacagcccuccgaauaaccagguuaugcuuugugaacccacaauuaucgagagaaauauuaccgaaaucguguaucugacaaacaccacgauugagaaggaaaucugcccuaaacccgcugaguaccggaauugguccaagccucagugugggauuaccggauucgcccccuuuucuaaagacaacagcauccgccucuccgcgggcggggauaucugggugacaagagagccuuaugucucuugcgacccggauaaguguuaccaauucgcucugggacagggcaccacacuuaauaacgugcauagcaauaacaccgcccgggaccgcacgcccuauagaacacugcucaugaaugaacuggggguuccuuuucaccugggaaccaaacaggugugcauugccugguccucuagcuccugucaugauggcaaggcuuggcuccacgucugcaucacaggcgacgauaagaacgccaccgcuagcuucauuuacaaugggcggcugguggacucuguuguguccuggagcaaagagauccuucgcacccaggaaucugagugugucugcauuaacggaacauguacgguggugaugaccgauggcuccgccagcgggaaggcggacacaaaaauccuguuuaucgaggaaggaaagauuguccauaccuccacacucucuggcagcgcccaacacguugaggaaugcuccugcuaucccagauacccuggggugcggugugugugccgcgauaacuggaagggaagcaauagacccaucgucgacauuaacaucaaagaucacucuauuguguccagcuacguuuguucuggccuggugggcgacaccccgcggaagaaugacagcuccucuagcucccauugccuugauccuaacaaugaggaagggggacacggcgucaaagggugggcuuucgacgauggaaacgacguguggaugggccgcacgaucaaugagacaagcagacugggguaugagaccuuuaagguuaucgaaggauggucuaaccccaaauccaagcuccagauuaaucgccaggugaucgucgaucggggcgacagaagcggcuacucugggauuuucuccguggagggaaaaagcuguaucaaccggugcuuuuaugucgaacugauuagaggccgcaaggaggaaaccgaggugcuguggacauccaauucuaucguuguguucugugggaccagcggaacauacggcacgggguccuggccugauggcgccgaccucaaccugaugcccauuuga

SEQ ID NO: 216809 - RNA, 1410 nt, Artificial Sequence; identical to SEQ ID NO: 214218
  derived and/or modified CDS sequence (opt5) from neuraminidase__InfluenzaA__AHL95761

SEQ ID NO: 216810 - RNA, 1410 nt, Artificial Sequence; identical to SEQ ID NO: 214218
  derived and/or modified CDS sequence (opt5) from neuraminidase__InfluenzaA__AHL95773

SEQ ID NO: 216811 - RNA, 1410 nt, Artificial Sequence
  derived and/or modified CDS sequence (opt5) from neuraminidase__InfluenzaA__AHL95785
augaaccccaaucagaagaucauuaccaucggcagcgugucccugacaauuucuacgaucugcuucuuuaugcaaauugccauccucaucaccacagucacccugcacuucaaacaguacgaguuuaacagcccuccgaauaaccagguuaugcuuugugaacccacaauuaucgagagaaauauuaccgaaaucguguaucugacaaacaccacgauugagaaggaaaucugcccuaaacccgcugaguaccggaauugguccaagccucagugugacauuaccggguucgcccccuuuucuaaagauaacagcgugcgccucuccgcgggaggcgacaucugggucacaagagagccuuaugugucuugcgauccggacaaguguuaccaauucgcucuggggcagggaaccacacuuaauaacguucauagcaauaacaccgugcgggaucgcacgcccuauagaacacugcucaugaaugaacugggcgucccuuuucaccuggggaccaaacaggugugcaucgccugguccucuagcuccugucaugacggaaaggccuggcuccacguuugcauuacaggcgaugacaagaacgcuaccgccagcuucaucuacaauggccggcugguggauucugucguguccuggagcaaagagauucuucgcacccaggaaucugagugugugugcaucaacgggacauguacggucguuaugaccgacggauccgcuagcggcaaggccgauacaaaaauucuguuuaucgaggaagggaagaucgugcauaccuccacacucucuggaagcgcgcaacacguggaggaaugcuccugcuaucccagauacccuggcguccggugugugugccgcgacaacuggaaggggagcaauagacccauuguugauaucaacauuaaagaccacucuaucguguccagcuacgucuguucuggacuggugggcgacaccccgcggaagaaugauagcuccucuagcucccauugccuugacccuaacaaugaggaaggcgggcacggaguuaaaggcugggccuucgaugacgggaacgauguguggaugggacgcacgauuaaugagacaagcagacugggcuaugagaccuuuaaggucaucgaaggguggucuaaccccaaauccaagcuccagaucaaucgccaggugauugucgaccggggagauagaagcggcuacucuggcaucuucuccguggaggggaaaagcuguauuaaccggugcuuuuauguugaacugaucagaggacgcaaggaggaaaccgaggugcuguggacauccaauucuauugucguguucuguggcaccagcgggacauacggaacgggcuccuggccugacggggcugaucucaaccugaugcccaucuga

SEQ ID NO: 216812 - RNA, 1410 nt, Artificial Sequence; identical to SEQ ID NO: 215943
  derived and/or modified CDS sequence (opt5) from neuraminidase__InfluenzaA__AHL95797

SEQ ID NO: 216813 - RNA, 1410 nt, Artificial Sequence; identical to SEQ ID NO: 214218
  derived and/or modified CDS sequence (opt5) from neuraminidase__InfluenzaA__AHL95833

SEQ ID NO: 216814 - RNA, 1410 nt, Artificial Sequence; identical to SEQ ID NO: 215943
  derived and/or modified CDS sequence (opt5) from neuraminidase__InfluenzaA__AHL95845

SEQ ID NO: 216815 - RNA, 1410 nt, Artificial Sequence
  derived and/or modified CDS sequence (opt5) from neuraminidase__InfluenzaA__AHL95857
augaaccccaaucagaagaucauuagcaucggcuccgugucucugaccauuagcacaaucugcuucuuuaugcaaauugccauccucaucacgaccgucacacugcacuucaaacaguacgaguuuaacuccccuccgaauaaccagguuaugcuuugugaacccaccauuaucgagagaaauauuacagaaaucguguaucugaccaacacaaccauugagaaggaaaucugcccuaaacccgcugaguaccggaauuggucuaagccucagugugggauuacgggauucgcccccuuuagcaaagacaacuccauccgccucucugcgggcggggauaucugggugaccagagagccuuaugucagcugcgacccggauaaguguuaccaauucgcucugggacagggcacaacccuuaauaacgugcauuccaauaacacaguucgggaccgcacccccuauagaacgcugcucaugaaugaacugggggugccuuuucaccugggaacaaagcaggucugcauugccuggucuagcuccagcugucaugauggcaaagccuggcuccacgugugcaucaccggcgacgauaagaacgcuacagccucuuucauuuacaaugggcggcugguugacuccguggucagcuggucuaaagagauccuucgcacccaggaauccgagugugugugcauuaacggaaccuguacaguggucaugacggauggcagcgcuuccgggaaggccgacaccaaaauccuguuuaucgaggaaggaaagauuguucauacaucuacccucagcggcuccgcgcaacacguggaggaaugcagcugcuaucccagauacccuggggugcggugugucugccgcgauaacuggaagggaucuaauagacccaucguggacauuaacaucaaagaucacuccauuguuagcucuuacguguguagcggccuggucggcgacacaccgcggaagaaugacuccucuagcuccagccauugccuugauccuaacaaugaggaagggggacacggcgugaaagggugggccuucgacgauggaaacgacguuuggaugggccgcaccaucaaugagacgucuagacugggguaugagacauuuaaggugaucgaaggaugguccaaccccaaaagcaagcuccagauuaaucggcaggucaucguggaucgcggcgacagaucuggcuacuccgggauuuucagcgucgagggaaaauccuguaucaaccggugcuuuuauguggaacugauuagaggccgcaaggaggaaaccgagguucuguggaccucuaauagcaucguggucuucugugggacauccggaaccuacggcacagggucuuggccugauggcgcugaccucaaccugaugcccauuuga

SEQ ID NO: 216816 - RNA, 1410 nt, Artificial Sequence; identical to SEQ ID NO: 214218
  derived and/or modified CDS sequence (opt5) from neuraminidase__InfluenzaA__AHL95869

SEQ ID NO: 216817 - RNA, 1410 nt, Artificial Sequence
  derived and/or modified CDS sequence (opt5) from neuraminidase__InfluenzaA__AHL95881
augaaccccaaucagaagaucauuaccaucggcagcgugugcaugacaauugggauggccaaccugauccuccaaauuggaaauaucaucuccauuuggaucucucacagcauucaggucggcaaccagucccagaucgagacguguaaucaaucuguuauuaccuacgaaaacaauacaugggugaaccagaccuaugugaauaucagcaacacaaaucuggcugccgggcaguccgucgugucuguuaaacuugcgggaaacagcucccugugcccugugagcggcugggcuauuuacucuaaggacaauuccgucagaaucgggagcaaaggagauguguucguuauccgggagccguuuauuucuuguagcccccucgaaugccgcaccuucuuucugacacagggcgcccuucugaacgacaagcauuccaauggcaccaucaaagauagaucuccuuaucggacgcucauguccugucccauuggggaggugccuagccccuacaacucccgcuucgaaucugucgccuggagcgcuuccgccugccacgacggaaucaacuggcugaccauuggcaucagcgggccugauucuggagcuguggccgugcugaaguauaauggcaucauuacagacaccaucaaguccuggagaaacaauauucuccggacacaagagagcgagugugcgugcgucaacgggucuuguuuuaccaucaugacggauggaccgagcgacggccaggccuccuacaaaauuuuccgcaucgaaaagggcaaaaucguuaagucuguggagaugaaugcucccaacuaucauuacgaagagugcagcuguuacccugauuccagcgagauuacaugcgugugcagagacaauuggcacgggucuaaccggcccugggucuccuuuaaucagaaccuggaauaucagaucggauacauuuguagcggcaucuucggggauaauccucgccccaacgacaaaaccggaucuugcggcccgguguccagcaauggggccaacggaguuaagggcuuuuccuucaaguauggcaaugggguguggauuggaagaacaaaaucuaucagcucccggaagggcuuugagaugauuugggauccuaacggguggaccggaaccgacaacaauuucucuaucaaacaagacaucgucggcauuaacgaauggagcggguacuccggcagcuuugugcagcaucccgagcuuacaggacuggauuguauccgcccuugcuucuggguugaacucauuagaggccggcccaaggagaauacgaucuggaccucuggguccagcauuucuuucuguggagugaacuccgacacagucggcuggagcuggcccgauggggcugagcugccuuuuaccaucgacaaauga

SEQ ID NO: 216818 - RNA, 1410 nt, Artificial Sequence
  derived and/or modified CDS sequence (opt5) from neuraminidase__InfluenzaA__AHL95892
augaaccccaaucagaagaucauuaccaucggcagcgugucccugacaauuucuacgaucugcuucuuuaugcaaauugccauccucaucaccacagucacccugcacuucaaacaguacgaguuuaacagcccuccgaauaaccagguuaugcuuugugaacccacaauuaucgagagaaauauuaccgaaaucguguaucugacaaacaccacgauugagaaggaaaucugcccuaaacccgcugaguaccggaauugguccaagccucagugugggauuaccggauucgcccccuuuucuaaagacaacagcauccgccucuccgcgggcggggauaucugggugacaagagagccuuaugucucuugcgacccggauaaguguuaccaauucgcucugggacagggcaccacacuuaauaacgugcauagcaauaacaccguucgggaccgcacgcccuauagaacacugcucaugaaugaacugggggugccuuuucaccugggaaccaagcaggucugcauugccugguccucuagcuccugucaugauggcaaagccuggcuccacgugugcaucacaggcgacgauaagaacgcuaccgccagcuucauuuacaaugggcggcugguugacucuguggucuccuggagcaaagagauccuucgcacccaggaaucugagugugugugcauuaacggaacauguacgguggucaugaccgauggcuccgcuagcgggaaggccgacacaaaaauccuguuuaucgaggaaggaaagauuguucauaccuccacacucucuggcagcgcgcaacacguggaggaaugcuccugcuaucccagauacccuggggugcggugugucugccgcgauaacuggaagggaagcaauagacccaucguggacauuaacaucaaagaucacucuauuguuucccgguacguguguagcggccuggucggcgacaccccgcgcaagaaugacucuagcuccucuagccauugccuugauccuaacaaugaggaagggggacacggcgugaaagggugggccuucgacgauggaaacgacguuuggaugggcagaacgaucaaugagacaucccggcugggguaugagaccuuuaaggugaucgaaggauggagcaaccccaaaucuaagcuccagauuaaucgccaggucaucguggauagaggcgaccgguccggcuacagcgggauuuucucugucgagggaaaauccuguaucaacagaugcuuuuauguggaacugauucgcggccggaaggaggaaaccgagguucuguggacaagcaauuccaucguggucuucugugggaccucuggaacauacggcacggggagcuggccugauggcgcugaccucaaccugaugcccauuuga

SEQ ID NO: 216819 - RNA, 1410 nt, Artificial Sequence; identical to SEQ ID NO: 214218
  derived and/or modified CDS sequence (opt5) from neuraminidase__InfluenzaA__AHL95904

SEQ ID NO: 216820 - RNA, 1410 nt, Artificial Sequence
  derived and/or modified CDS sequence (opt5) from neuraminidase__InfluenzaA__AHL95916
augaaccccaaucagaagaucauuaccaucggcagcgugucccugacaauuucuacgaucugcuucuuuaugcaaauugccauccucaucaccacagucacccugcacuucaaacaguacgagcuuaacagcccuccgaauaaccagguuaugcugugugaacccacaauuaucgagagaaauauuaccgaaaucguguaucucacaaacaccacgauugagaaggaaaucugcccuaaacccgcugaguaccggaauugguccaagccucagugugggauuaccggauuugcccccuucucuaaagacaacagcauccgccuguccgcgggcggggauaucugggugacaagagagccuuaugucucuugcgacccggauaaguguuaccaauuugcucuuggacagggcaccacacugaauaacgugcauagcaauaacaccguucgggaccgcacgcccuauagaacacuccugaugaaugaacugggggugccuuuccaccucggaaccaagcaggucugcauugccugguccuccucuuccugucaugauggcaaagccuggcugcacgugugcaucacaggcgacgauaagaacgcuaccgccagcuuuauuuacaaugggcggcuuguugacucuguggucuccuggagcaaagagauccugcgcacccaggaaucugagugugugugcauuaacggaacauguacgguggucaugaccgauggcuccgcuagcgggaaggccgacacaaaaauccucuucaucgaggaaggaaagauuguucauaccuccacacugucuggcagcgcgcaacacguggaggaaugcuccugcuaucccagauacccuggggugcggugugucugccgcgauaacuggaagggaagcaauagacccaucguggacauuaacaucaaagaucacucuauuguuuccagcuacguguguucuggccuugucggcgacaccccgcggaagaaugacagcuccucuagcucccauugccuggauccuaacaaugaggaagggggacacggcgugaaagggugggccuuugacgauggaaacgacguuuggaugggccgcacgaucaaugagacaagcagacucggguaugagaccuucaaggugaucgaaggauggucuaaccccaaauccaagcugcagauuaaucggcaggucaucguggaucgcggcgacagaagcggcuacucugggauuuuuagcgucgagggaaaaagcuguaucaaccggugcuucuauguggaacugauuagaggccgcaaggaggaaaccgagguucucuggacauccaauucuaucguggucuuuugugggaccagcggaacauacggcacgggguccuggccugauggcgcugaccugaaccuuaugcccauuuga

SEQ ID NO: 216821 - RNA, 1410 nt, Artificial Sequence; identical to SEQ ID NO: 215955
  derived and/or modified CDS sequence (opt5) from neuraminidase__InfluenzaA__AHL95928

SEQ ID NO: 216822 - RNA, 1410 nt, Artificial Sequence; identical to SEQ ID NO: 215943
  derived and/or modified CDS sequence (opt5) from neuraminidase__InfluenzaA__AHL95940

SEQ ID NO: 216823 - RNA, 1410 nt, Artificial Sequence; identical to SEQ ID NO: 214218
  derived and/or modified CDS sequence (opt5) from neuraminidase__InfluenzaA__AHL95952

SEQ ID NO: 216824 - RNA, 1410 nt, Artificial Sequence; identical to SEQ ID NO: 214218
  derived and/or modified CDS sequence (opt5) from neuraminidase__InfluenzaA__AHL95964

SEQ ID NO: 216825 - RNA, 1410 nt, Artificial Sequence; identical to SEQ ID NO: 214218
  derived and/or modified CDS sequence (opt5) from neuraminidase__InfluenzaA__AHL95976

SEQ ID NO: 216826 - RNA, 1410 nt, Artificial Sequence; identical to SEQ ID NO: 214218
  derived and/or modified CDS sequence (opt5) from neuraminidase__InfluenzaA__AHL95988

SEQ ID NO: 216827 - RNA, 1410 nt, Artificial Sequence; identical to SEQ ID NO: 214218
  derived and/or modified CDS sequence (opt5) from neuraminidase__InfluenzaA__AHL96000

SEQ ID NO: 216828 - RNA, 1410 nt, Artificial Sequence
  derived and/or modified CDS sequence (opt5) from neuraminidase__InfluenzaA__AHL96012
augaaccccaaucagaagaucauuaccaucggcagcgugucccugacaauuucuacgaucugcuucuuuaugcaaauugccauccucaucaccacagucacccugcacuucaaacaguacgaguuuaacagcccuccgaauaaccagguuaugcuuugugaacccacaauuaucgagagaaauauuaccgaaaucguguaucugacaaacaccacgauugagaaggaaaucugcccuaaacccgcugaguaccggaauugguccaagccucagugugggauuaccggauucgcccccuuuucuaaagacaacagcauccgccucuccgcgggcggggauaucugggugacaagagucccuuaugugucuugcgacccggauaaguguuaccaauucgcucugggacagggcaccacacuuaauaacguucauagcaauaacaccgugcgggaccgcacgcccuauagaacacugcucaugaaugagcugggggucccuuuucaccugggaaccaaacaggugugcauugccugguccucuagcuccugucaugauggcaaggccuggcuccacguuugcaucacaggcgacgauaagaacgcuaccgccagcuucauuuacaaugggcggcugguggacucugucguguccuggagcaaagaaauccuucgcacccaggagucugaaugugugugcauuaacggaacauguacggucguuaugaccgauggcuccgcuagcgggaaggccgacacaaaaauccuguuuaucgaggagggaaagauugugcauaccuccacacucucuggcagcgcgcaacacguggaagagugcuccugcuaucccagauacccugggguccggugugugugccgcgauaacuggaagggaagcaauagacccaucguugacauuaacaucaaagaucacucuauuguguccagcuacgucuguucuggccuggugggcgacaccccgcggaagaaugacagcuccucuagcucccauugccuugauccuaacaaugaagaagggggacacggcguuaaagggugggccuucgacgauggaaacgacguguggaugggccgcacgaucaaugagacaagcagacugggguaugagaccuuuaaggucaucgagggauggucuaaccccaaauccaagcuccagauuaaucgccaggugaucgucgaucggggcgacagaagcggcuacucugggauuuucuccguggaaggaaaaagcuguaucaaccggugcuuuuauguugagcugauuagaggccgcaaggaagagaccgaagugcuguggacauccaauucuaucgucguguucugugggaccagcggaacauacggcacgggguccuggccugauggcgcugaccucaaccugaugcccauuuga

SEQ ID NO: 216829 - RNA, 1410 nt, Artificial Sequence
  derived and/or modified CDS sequence (opt5) from neuraminidase__InfluenzaA__AHL96024
augaaccccaaucagaagaucauuaccaucggcagcgugucccugacaauuucuacgaucugcuucuuuaugcaaauugccauccucaucaccacagucacccugcacuucaaacaguacgaguuuaacagcccuccgaauaaccagguuaugcuuugugaacccacaauuaucgagagaaauauuaccgaaaucguguaucugacaaacaccacgauugagaaggaaaucugcccuaaacccgcugaguaccggaauugguccaagccucagugugggauuaccggauucgcccccuuuucuaaagacaacagcauccgccucuccgcgggcggggauaucugggugacaagagagccuuaugucucuugcgacccggauaaguguuaccaauucgcucugggacagggcaccacacuuaauaacgugcauagcaauaacaccguucgggaccgcacgcccuauagaacacugcucaugaaugaacugggggugccuuuucaccugggaaccaagcaggucugcauugccugguccucuagcuccugucaugauggcaaagccuggcuccacgugugcaucacaggcgacgauaagaacgcuaccgccagcuucauuuacaaugggcggcugguugacucuguggucuccuggagcaaagagaaccuucgcacccaggaaucugagugugugugcaucaacggaacauguacgguggucaugaccgauggcuccgcuagcgggaaggccgacacaaaaauucuguuuaucgaggaaggaaagaucguucauaccuccacacucucuggcagcgcgcaacacguggaggaaugcuccugcuaucccagauacccuggggugcggugugucugccgcgauaauuggaagggaagcaacagacccauuguggacaucaauauuaaagaucacucuaucguuuccagcuacguguguucuggccuggucggcgacaccccgcggaagaacgacagcuccucuagcucccauugccuugauccuaauaacgaggaagggggacacggcgugaaagggugggccuucgacgauggaaaugacguuuggaugggccgcacgauuaacgagacaagcagacugggguaugagaccuuuaaggugaucgaaggauggucuaaucccaaauccaagcuccagaucaaccggcaggucauuguggaucgcggcgacagaagcggcuacucugggaucuucuccgucgagggaaaaagcuguauuaaucggugcuuuuauguggaacugaucagaggccgcaaggaggaaaccgagguucuguggacauccaacucuauuguggucuucugugggaccagcggaacauacggcacgggguccuggccugauggcgcugaccucaaucugaugcccaucuga

SEQ ID NO: 216830 - RNA, 1410 nt, Artificial Sequence; identical to SEQ ID NO: 214218
  derived and/or modified CDS sequence (opt5) from neuraminidase__InfluenzaA__AHL96036

SEQ ID NO: 216831 - RNA, 1410 nt, Artificial Sequence; identical to SEQ ID NO: 215461
  derived and/or modified CDS sequence (opt5) from neuraminidase__InfluenzaA__AHL96048

SEQ ID NO: 216832 - RNA, 1410 nt, Artificial Sequence; identical to SEQ ID NO: 214218
  derived and/or modified CDS sequence (opt5) from neuraminidase__InfluenzaA__AHL96059

SEQ ID NO: 216833 - RNA, 1410 nt, Artificial Sequence; identical to SEQ ID NO: 215955
  derived and/or modified CDS sequence (opt5) from neuraminidase__InfluenzaA__AHL96071

SEQ ID NO: 216834 - RNA, 1410 nt, Artificial Sequence; identical to SEQ ID NO: 216796
  derived and/or modified CDS sequence (opt5) from neuraminidase__InfluenzaA__AHL96083

SEQ ID NO: 216835 - RNA, 1410 nt, Artificial Sequence; identical to SEQ ID NO: 214218
  derived and/or modified CDS sequence (opt5) from neuraminidase__InfluenzaA__AHL96095

SEQ ID NO: 216836 - RNA, 1410 nt, Artificial Sequence
  derived and/or modified CDS sequence (opt5) from neuraminidase__InfluenzaA__AHL96107
augaaccccaaucagaagaucauuaccaucggcagcgugucccugacaauuucuacgaucugcuucuuuaugcaaauugccauccucaucaccacagucacccugcacuucaaacaguacgaguuuaacagcccuccgaauaaccagguuaugcuuugugaacccacaauuaucgagagaaauauuaccgaaaucguguaucugacaaacaccacgauugagaaggaaaucugcccuaaacccgcugaguaccggaauugguccaagccucagugugggauuaccggauucgcccccuuuucuaaagacaacagcauccgccucuccgcgggcggggauaucugggugacaagagagccuuaugucucuugcgacccggauaaguguuaccaauucgcucugggacagggcaccacacuuaauaacaugcauagcaauaacaccgugcgggaccgcacgcccuauagaacacugcucaugaaugaacuggggguuccuuuucaccugggaaccaaacaggugugcauugccugguccucuagcuccugucaugauggcaaggccuggcuccacgucugcaucacaggcgacgauaagaacgcuaccgccagcuucauuuacaaugggcggcugguggacucuguuguguccuggagcaaagagauccuucgcacccaggaaucugagugugucugcauuaacggaacauguacgguggugaugaccgauggcuccgcuagcgggaaggccgacacaaaaauccuguuuaucgaggaaggaaagauuguccauaccuccacacucucuggcagcgcgcaacacguugaggaaugcuccugcuaucccagauacccuggggugcggugugugugccgcgauaacuggaagggaagcaauagacccaucgucgacauuaacaucaaagaucacucuauuguguccagcuacguuuguucuggccuggugggcgacaccccgcggaagaaugacaacagcuccucuagccauugccuugauccuaauaacgaggaagggggacacggcgucaaagggugggccuucgacgauggaaaugacguguggaugggccgcacgaucaacgagacauccagacugggguaugagaccuuuaagguuaucgaaggauggagcaaucccaaaucuaagcuccagauuaaccgccaggugaucgucgaucggggcgacagauccggcuacagcgggauuuucucuguggagggaaaauccuguaucaaucggugcuuuuaugucgaacugauuagaggccgcaaggaggaaaccgaggugcuguggacaagcaacuccaucguuguguucugugggaccucuggaacauacggcacggggagcuggccugauggcgcugaccucaaucugaugcccauuuga

SEQ ID NO: 216837 - RNA, 1410 nt, Artificial Sequence; identical to SEQ ID NO: 214218
  derived and/or modified CDS sequence (opt5) from neuraminidase__InfluenzaA__AHL96119

SEQ ID NO: 216838 - RNA, 1410 nt, Artificial Sequence; identical to SEQ ID NO: 215955
  derived and/or modified CDS sequence (opt5) from neuraminidase__InfluenzaA__AHL96131

SEQ ID NO: 216839 - RNA, 1410 nt, Artificial Sequence; identical to SEQ ID NO: 214218
  derived and/or modified CDS sequence (opt5) from neuraminidase__InfluenzaA__AHL96143

SEQ ID NO: 216840 - RNA, 1410 nt, Artificial Sequence; identical to SEQ ID NO: 214218
  derived and/or modified CDS sequence (opt5) from neuraminidase__InfluenzaA__AHL96167

SEQ ID NO: 216841 - RNA, 1410 nt, Artificial Sequence; identical to SEQ ID NO: 214218
  derived and/or modified CDS sequence (opt5) from neuraminidase__InfluenzaA__AHL96179

SEQ ID NO: 216842 - RNA, 1410 nt, Artificial Sequence
  derived and/or modified CDS sequence (opt5) from neuraminidase__InfluenzaA__AHL96191
augaaccccaaucagaagaucauuaccaucggcagcgugucccugacaauuucuacgaucugcuucuuuaugcaaauugccauccucaucaccacagucacccugcacuucaaacaguacgaguuugacagcccuccgaacaaucagguuaugcuuugugaacccacaauuaucgagagaaacauuaccgaaaucguguaucugacaaauaccacgauugagaaggaaaucugcccuaaacccgcugaguaccggaacugguccaagccucagugugggauuaccggauucgcccccuuuucuaaagauaauagcauccgccucuccgcgggcggggacaucugggugacaagagagccuuaugucucuugcgauccggacaaguguuaccaauucgcucugggacagggcaccacacuuaacaauaugcauagcaacaauaccgugcgggaucgcacgcccuauagaacacugcucaugaacgaacuggggguuccuuuucaccugggaaccaaacaggugugcauugccugguccucuagcuccugucaugacggcaaggccuggcuccacgucugcaucacaggcgaugacaagaaugcuaccgccagcuucauuuacaacgggcggcugguggauucuguuguguccuggagcaaagagauccuucgcacccaggaaucugagugugucugcauuaauggaacauguacgguggugaugaccgacggcuccgcuagcgggaaggccgauacaaaaauccuguuuaucgaggaaggaaagauuguccauaccuccacacucucuggcagcgcgcaacacguugaggaaugcuccugcuaucccagauacccuggggugcggugugugugccgcgacaacuggaagggaagcaacagacccaucgucgauauuaauaucaaagaccacucuauuguguccagcuacguuuguucuggccuggugggcgacaccccgcggaagaacgauagcuccucuagcucccauugccuugacccuaauaacgaggaagggggacacggcgucaaagggugggccuucgaugacggaaaugauguguggaugggccgcacgaucaacgagacaagcagacugggguaugagaccuuuaagguuaucgaaggauggucuaaucccaaauccaagcuccagauuaaccgccaggugaucgucgaccggggcgauagaagcggcuacucugggauuuucuccguggagggaaaaagcuguaucaaucggugcuuuuaugucgaacugauuagaggccgcaaggaggaaaccgaggugcuguggacauccaacucuaucguuguguucugugggaccagcggaacauacggcacgggguccuggccugacggcgcugaucucaaucugaugcccauuuga

SEQ ID NO: 216843 - RNA, 1410 nt, Artificial Sequence; identical to SEQ ID NO: 215943
  derived and/or modified CDS sequence (opt5) from neuraminidase__InfluenzaA__AHL96203

SEQ ID NO: 216844 - RNA, 1410 nt, Artificial Sequence; identical to SEQ ID NO: 215955
  derived and/or modified CDS sequence (opt5) from neuraminidase__InfluenzaA__AHL96215

SEQ ID NO: 216845 - RNA, 1410 nt, Artificial Sequence; identical to SEQ ID NO: 214218
  derived and/or modified CDS sequence (opt5) from neuraminidase__InfluenzaA__AHL96227

SEQ ID NO: 216846 - RNA, 1410 nt, Artificial Sequence; identical to SEQ ID NO: 214218
  derived and/or modified CDS sequence (opt5) from neuraminidase__InfluenzaA__AHL96239

SEQ ID NO: 216847 - RNA, 1410 nt, Artificial Sequence; identical to SEQ ID NO: 214218
  derived and/or modified CDS sequence (opt5) from neuraminidase__InfluenzaA__AHL96251

SEQ ID NO: 216848 - RNA, 1410 nt, Artificial Sequence; identical to SEQ ID NO: 214218
  derived and/or modified CDS sequence (opt5) from neuraminidase__InfluenzaA__AHL96263

SEQ ID NO: 216849 - RNA, 1410 nt, Artificial Sequence; identical to SEQ ID NO: 215999
  derived and/or modified CDS sequence (opt5) from neuraminidase__InfluenzaA__AHL96277

SEQ ID NO: 216850 - RNA, 1410 nt, Artificial Sequence
  derived and/or modified CDS sequence (opt5) from neuraminidase__InfluenzaA__AHL96308
augaaccccaaucagaagaucauuaccaucggcagcgugucccugacaauuucuacgaucugcuucuuuaugcaaauugccauccucaucaccacagucacccugcacuucaaacaguacgaguuuaacuucccuccgaauaaccagguuaugcuuugugaacccacaauuaucgagagaaauauuaccgaaaucguguaucugacaaacaccacgauugagaaggaaaucugcccuaaacccgcugaguaccggaauuggagcaagccucagugugggauuaccggauuugcccccuucuccaaagacaacucuauccgccucagcgcgggcggggauaucugggugacaagagagccuuaugucuccugcgacccggauaaguguuaccaauuugcucugggacagggcaccacacuuaauaacgugcauucuaauaacaccguucgggaccgcacgcccuauagaacacugcucaugagcgaacugggggugccuuuccaccugggaaccaagcaggucugcauugccugguccuccucuuccugucaugauggcaaagccuggcuccacgugugcaucacaggcgacgauaagaaugcuaccgccagcuuuauuuacaacgggcggcugguugacucuguggucuccuggagcaaagagauccuucgcacccaggaaucugagugugugugcauuaauggaacauguacgguggucaugaccgauggcuccgcuagcgggaaggccgacacaaaaauccuguucaucgaggaaggaaagauuguucauaccuccacacucucuggcagcgcgcaacacguggaggaaugcuccugcuaucccagauacccuggggugcggugugucugccgcgauaacuggaagggaagcaacagacccaucguggacauuaauaucaaagaucacucuauuguuuccagcuacguguguucuggccuggucggcgacaccccgcggaagaacgacagcuccucuagcucccauugccuugauccuaauaacgaggaagggggacacggcgugaaagggugggccuuugacgauggaaaugacguuuggaugggccgcacgaucaacgagacaagcagacugggguaugagaccuucaaggugaucgaaggauggucuaaucccaaauccaagcuccagauuaaccggcaggucaucguggaucgcggcgacagaagcggcuacucugggauuuuuagcgucgagggaaaaagcuguaucaaucggugcuucuauguggaacugauuagaggccgcaaggaggaaaccgagguucuguggacauccaacucuaucguggucuucugugggaccagcggaacauacggcacgggguccuggccugauggcgcugaccucaaucugaugcccauuuga

SEQ ID NO: 216851 - RNA, 1410 nt, Artificial Sequence; identical to SEQ ID NO: 215447
  derived and/or modified CDS sequence (opt5) from neuraminidase__InfluenzaA__AHL96321

SEQ ID NO: 216852 - RNA, 1410 nt, Artificial Sequence; identical to SEQ ID NO: 214218
  derived and/or modified CDS sequence (opt5) from neuraminidase__InfluenzaA__AHL96333

SEQ ID NO: 216853 - RNA, 1410 nt, Artificial Sequence
  derived and/or modified CDS sequence (opt5) from neuraminidase__InfluenzaA__AHL96345
augaaccccaaucagaagaucauuaccaucggcagcgugucccugacaauuucuacgaucugcuucuuuaugcaaauugccauccucaucaccacagucacccugcacuucaaacaguacgaguuuaacagcccuccgaauaaccagguuaugcuuugugaacccacaauuaucgagagaaauauuaccgaaaucguguaucugacaaacaccacgauugagaaggaaaucugcccuaaacccgcugaguaccggaauugguccaagccucagugugggauuaccggauucgcccccuuuucuaaagacaacagcauccgccucuccgcgggcggggauaucugggugacaagagagccuuaugucucuugcgacccggauaaguguuaccaauucgcucugggacagggcaccacacuuaauaacgugcauagcaauaacaccguucgggaccgcacgcccuauagaacacugcucaugaaugaacugggggugccuuuucaccugggaaccaagcaggucugcauugccugguccucuagcuccugucaugauggcaaagccuggcuccacgugugcaucacaggcgacgauaagaacgcuaccgccagcuucauuuacaaugggcggcugguugacucuguggucuccuggagcaaagagauccuucgcacccaggaaucugagugugugugcauuaacggaacauguacgguggucaugaccgauggcuccgcuagcgggaaggccgacacaaaaauccuguuuaucgaggaaggaaagauuguucauaccuccacacucucuggcagcgcgcaacacguggaggaaugcuccugcuaucccagauacccuggggugcggugugucugccgcgauaacuggaagggaagcaauagacccaucguggacauuaacaucaaagaucacucuauuguuuccagcuacguguguucuggccuggucggcgacaccccgcggaagaaugacaacagcuccucuagccauugccuugauccuaauaacgaggaagggggacacggcgugaaagggugggccuucgacgauggaaaugacguuuggaugggccgcacgaucaacgagacauccagacugggguaugagaccuuuaaggugaucgaaggauggagcaaucccaaaucuaagcuccagauuaaccggcaggucaucguggaucgcggcgacagauccggcuacagcgggauuuucucugucgagggaaaauccuguaucaaucggugcuuuuauguggaacugauuagaggccgcaaggaggaaaccgagguucuguggacaagcaacuccaucguggucuucugugggaccucuggaacauacggcacggggagcuggccugauggcgcugaccucaaucugaugcccauuuga

SEQ ID NO: 216854 - RNA, 1410 nt, Artificial Sequence; identical to SEQ ID NO: 215943
  derived and/or modified CDS sequence (opt5) from neuraminidase__InfluenzaA__AHL96357

SEQ ID NO: 216855 - RNA, 1410 nt, Artificial Sequence; identical to SEQ ID NO: 214218
  derived and/or modified CDS sequence (opt5) from neuraminidase__InfluenzaA__AHL96369

SEQ ID NO: 216856 - RNA, 1410 nt, Artificial Sequence; identical to SEQ ID NO: 214218
  derived and/or modified CDS sequence (opt5) from neuraminidase__InfluenzaA__AHL96381

SEQ ID NO: 216857 - RNA, 1410 nt, Artificial Sequence; identical to SEQ ID NO: 215955
  derived and/or modified CDS sequence (opt5) from neuraminidase__InfluenzaA__AHL96393

SEQ ID NO: 216858 - RNA, 1410 nt, Artificial Sequence
  derived and/or modified CDS sequence (opt5) from neuraminidase__InfluenzaA__AHL96405
augaaccccaaucagaagaucauuaccaucggcagcgugucccugacaauuucuacgaucugcuucuuuaugcaaauugccauccucaucaccacagucacccugcacuucaaacaguacgaguuuaacagcccuccgaauaaccagguuaugcuuugugaacccacaauuaucgagagaaauauuaccgaaaucguguaucugacaaacaccacgauugagaaggaaaucugcccuaaacccgcugaguaccggaauugguccaagccucagugugggauuaccggauucgcccccuuuucuaaagacaacagcauccgccucuccgcgggcggggauaucugggugacaagagagccuuaugucucuugcgacccggauaaguguuaccaauucgcucugggacagggcaccacacuuaauaacgugcauagcaauaacaccguucgggaccgcacgcccuauagaacacugcucaugaaugaacugggggugccuuuucaccugggaaccaagcaggucugcauugccugguccucuagcuccugucaugauggcaaagccuggcuccacgugugcaucacaggcgacgauaagaacgcuaccgccagcuucauuuacaaugggcggcugguugacucuguggucuccuggagcaaagagauccuucgcacccaggaaucugagugugugugcauuaacggaacauguacgguggucaugaccgauggcuccgcuagcgggaaggccgacacaaaaauccuguuuaucgaggaaggaaagauuguucauaccuccacacucucuggcagcgcgcaacacguggaggaaugcuccugcuaucccagauacccuggggugcggugugucugccgcgauaacuggaagggaagcaauagacccaucguggacauuaacaucaaagaucacucuauuguuuccagcuacguguguucuggccuggucggcgacaccccgcggaagaaugacagcuccucuagcucccauugccuugggccuaacaaugaggaaggaggccacggggugaaaggaugggccuucgaugacggcaacgauguuuggauggggcgcacgaucaaugagacaagcagacugggauaugagaccuuuaaggugaucgaaggcuggucuaaccccaaauccaagcuccagauuaaucggcaggucaucguggaccgcggcgauagaagcggguacucuggaauuuucuccgucgagggcaaaagcuguaucaaccggugcuuuuauguggaacugauuagagggcgcaaggaggaaaccgagguucuguggacauccaauucuaucguggucuucuguggaaccagcggcacauacgggacgggcuccuggccugacggagcugaucucaaccugaugcccauuuga

SEQ ID NO: 216859 - RNA, 1410 nt, Artificial Sequence; identical to SEQ ID NO: 214218
  derived and/or modified CDS sequence (opt5) from neuraminidase__InfluenzaA__AHL96417

SEQ ID NO: 216860 - RNA, 1410 nt, Artificial Sequence; identical to SEQ ID NO: 214218
  derived and/or modified CDS sequence (opt5) from neuraminidase__InfluenzaA__AHL96429

SEQ ID NO: 216861 - RNA, 1410 nt, Artificial Sequence
  derived and/or modified CDS sequence (opt5) from neuraminidase__InfluenzaA__AHL96441
augaaccccaaucagaagaucauuaccaucggcagcgugucccugacaauuucuacgaucugcuucuuuaugcaaauugccauccucaucaccacagucacccugcacuucaaacauuacgaguuuaacagcccuccgaauaaccagguuaugcuuugugaacccacaauuaucgagagaaauauuaccgaaaucguguaucugacaaacaccacgauugagaaggaaaucugcccuaaacccgcugaguaccggaauugguccaagccucagugugacauuaccggguucgcccccuuuucuaaagauaacagcauccgccucuccgcgggaggcgacaucugggugacaagagagccuuaugucucuugcgauccggacaaguguuaccaguucgcucuggggcaaggaaccacacuuaauaacgugcacagcaauaacaccguucgggaucgcacgcccuauagaacacugcucaugaaugaacugggcgugccuuuucaucuggggaccaagcaggucugcauugccugguccucuagcuccugucacgacggaaaagccuggcuccaugugugcaucacaggcgaugacaagaacgcuaccgccagcuucauuuacaauggccggcugguugauucuguggucuccuggagcaaagagauccuucgcacccaggaaucugagugugugugcauuaacgggacauguacgguggucaugaccgacggauccgcuagcggcaaggccgauacaaaaauccuguuuaucgaggaagggaagauuguucacaccuccacacucucuggaagcgcgcagcacguggaggaaugcuccugcuaucccagauacccuggcgugcggugugucugccgcgacaacuggaaggggagcaauagacccaucguggauauuaacaucaaagaccauucuauuguuucccgguacguguguagcggacuggucggcgacaccccgcgcaagaaugauucuagcuccucuagccacugccuuaacccuaauaacgaggaaggcgggcauggagugaaaggcugggccuucgacgaugggaaugacguuuggaugggaagaacgaucaacgagacaucccggcugggcuaugagaccuuuaaggugaucgaaggguggagcaaucccaaaucuaagcuccaaauuaaccgccagaucauugucgauagaggagaccgguccggcuacagcggcaucuucucuguggaggggaaauccuguauuaauagaugcuuuuaugucgaacugauccgcggacggaaggaggaaaccgaggugcuguggacaagcaacuccauuguuguguucuguggcaccucugggacauacggaacgggcagcuggccugauggggcugaccucaaucugaugcccaucuga

SEQ ID NO: 216862 - RNA, 1410 nt, Artificial Sequence; identical to SEQ ID NO: 214218
  derived and/or modified CDS sequence (opt5) from neuraminidase__InfluenzaA__AHL96453

SEQ ID NO: 216863 - RNA, 1410 nt, Artificial Sequence; identical to SEQ ID NO: 214218
  derived and/or modified CDS sequence (opt5) from neuraminidase__InfluenzaA__AHL96465

SEQ ID NO: 216864 - RNA, 1410 nt, Artificial Sequence
  derived and/or modified CDS sequence (opt5) from neuraminidase__InfluenzaA__AHL96477
augaaccccaaucagaagaucauuaccaucggcagcgugugcaugacaauugggauggccaaccugauccuccaaauuggaaauaucaucuccauuuggaucucucacagcauucaggucggcaaccagucccagaucgagacguguaaucaaucuguuauuaccuacgaaaacaauacaugggugaaccagaccuaugugaauaucagcaacacaaauuucgcugccgggcaguccgucgugucuguuaaacuggcgggaaacagcucccuuugcccugugagcggcugggcuauuuacucuaaggacaauuccgucagaaucgggagcaaaggagauguguuuguuauccgggagccguucauuucuuguagcccccuggaaugccgcaccuuuuuccucacacagggcgcccugcuuaacgacaagcauuccaauggcaccaucaaagauagaucuccuuaucggacgcugauguccugucccauuggggaggugccuagccccuacaacucccgcuuugaaucugucgccuggagcgcuuccgccugccacgacggaaucaacuggcucaccauuggcaucagcgggccugauucuggagcuguggccgugcugaaguauaauggcaucauuacagacaccaucaaguccuggagaaacaauauucugcggacacaagagagcgagugugcgugcgucaacgggucuuguuucaccaucaugacggauggaccgagcgacggccaggccuccuacaaaauuuuucgcaucgaaaagggcaaaaucguuaagucuguggagaugaaugcucccaacuaucauuacgaagagugcagcuguuacccugauuccagcgagauuacaugcgugugcagagacaauuggcacgggucuaaccggcccugggucuccuucaaucagaaccucgaauaucagaucggauacauuuguagcggcaucuuuggggauaauccucgccccaacgacaaaaccggaucuugcggcccgguguccagcaauggggccaacggaguuaagggcuucuccuuuaaguauggcaaugggguguggauuggaagaacaaaaucuaucagcucccggaagggcuucgagaugauuugggauccuaacggguggaccggaaccgacaacaauuuuucuaucaaacaagacaucgucggcauuaacgaauggagcggguacuccggcagcuucgugcagcaucccgagcugacaggacuugauuguauccgcccuugcuucuggguugaacugauuagaggccggcccaaggagaauacgaucuggaccucuggguccagcauuucuuuuuguggagugaacuccgacacagucggcuggagcuggcccgauggggcugagcucccuuucaccaucgacaaauga

SEQ ID NO: 216865 - RNA, 1410 nt, Artificial Sequence; identical to SEQ ID NO: 215955
  derived and/or modified CDS sequence (opt5) from neuraminidase__InfluenzaA__AHL96488

SEQ ID NO: 216866 - RNA, 1410 nt, Artificial Sequence; identical to SEQ ID NO: 214218
  derived and/or modified CDS sequence (opt5) from neuraminidase__InfluenzaA__AHL96500

SEQ ID NO: 216867 - RNA, 1410 nt, Artificial Sequence; identical to SEQ ID NO: 214218
  derived and/or modified CDS sequence (opt5) from neuraminidase__InfluenzaA__AHL96512

SEQ ID NO: 216868 - RNA, 1410 nt, Artificial Sequence; identical to SEQ ID NO: 215447
  derived and/or modified CDS sequence (opt5) from neuraminidase__InfluenzaA__AHL96524

SEQ ID NO: 216869 - RNA, 1410 nt, Artificial Sequence
  derived and/or modified CDS sequence (opt5) from neuraminidase__InfluenzaA__AHL96536
augaaccccaaucagaagaucauuaccaucggcagcgugucccugacaauuucuacgaucugcuucuuuacccaaauugccauccucaucacaaccgucacacugcacuucaaacaguacgaguuuaacagcccuccgaauaaccagguuaugcuuugugaacccaccauuaucgagagaaauauuacagaaaucguguaucugaccaacacgaccauugagaaggaaaucugcccuaaacccgcugaguaccggaauugguccaagccucagugugggauuacaggauucgcccccuuuucuaaagacaacagcauccgccucuccgcgggcggggauaucugggugaccagagagccuuaugucucuugcgacccggauaaguguuaccaauucgcucugggacagggcacaaccauuaauaacgugcauagcaauaacacgguucgggaccgcacacccuauagaacccuucugaugaaugaacucggggugccuuuucaccugggaacaaagcaggucugcaucgccugguccucuagcuccugucaugauggcaaagccuggcugcacgugugcauuaccggcgacgauaagaacgcuaccgccagcuucaucuacaaugggcggcucguugacucuguggucuccuggagcaaagagauucugcgcacacaggaaucugagugugugugcaucaacggaacguguaccguggucaugacagauggcuccgcuagcgggaaggccgacaccaaaauccuuuuuauugaggaaggaaagaucguucauacauccacccugucuggcagcgcgcaacacguggaggaaugcuccugcuaucccagauacccuggggugcggugugucugccgcgauaacuggaagggaagcaauagacccauuguggacaucaacauuaaagaucacucuaucguuuccagcuacguguguucuggccucgucggcgacacgccgcggaagaaugacagcuccucuagcucccauugccuggauccuaacaaugaggaagggggacacggcgugaaagggugggccuucgacgauggaaacgacguuuggaugggccgcacaaucaaugagaccagcagacuuggguaugagaccuuuaaggugauugaaggauggucuaaccccaaauccaagcugcagaucaaucggcaggucauuguggaucgcggcgacagaagcggcuacucugggaucuucuccgucgagggaaaaagcuguauuaaccggugcuuuuauguggaacucaucagaggccgcaaggaggaaacagagguucuguggaccuccaauucuauuguggucuucugugggacaagcggaacguacggcaccggguccuggccugauggcgcugaccugaaccucaugcccaucuga

SEQ ID NO: 216870 - RNA, 1410 nt, Artificial Sequence; identical to SEQ ID NO: 215955
  derived and/or modified CDS sequence (opt5) from neuraminidase__InfluenzaA__AHL96548

SEQ ID NO: 216871 - RNA, 1410 nt, Artificial Sequence
  derived and/or modified CDS sequence (opt5) from neuraminidase__InfluenzaA__AHL96560
augaaccccaaucagaagaucauuaccaucggcagcgugucccugacaauuucuacgaucugcuucuuuaugcaaauugccauccucaucaccacagucacccugcacuucaaacaguacgaguuuaacagcccuccgaauaaccagguuaugcuuugugaacccacaauuaucgagagaaauauuaccgaaaucguguaucugacaaacaccacgauugagaaggaaaucugcccuaaacccgcugaguaccggaauugguccaagccucagugugggauuaccggauucgcccccuuuucuaaagacaacagcauccgccucuccgcgggcggggauaucugggugacaagagagccuuaugucucuugcgacccggauaaguguuaccaauucgcucugggacagggcaccacacuuaauaacgugcauagcaauaacaccguucgggaccgcacgcccuauagaacacugcucaugaaugaacugggggugccuuuucaccugggaaccaagcaggucugcauugccugguccucuagcuccugucaugauggcaaagccuggcuccacgugugcaucacaggcgacgauaagaacgcuaccgccagcuucauuuacaaugggcggcugguugacucuguggucuccuggagcaaagagauccuucgcacccaggaaucugagugugugugcauuaacggaacauguacgguggucaugaccgauggcaacgcuuccgggaaggccgacacaaaaauccuguuuaucgaggaaggaaagauuguucauaccagcacacucuccggcucugcgcaacacguggaggaaugcagcugcuaucccagauacccuggggugcggugugucugccgcgauaauuggaagggauccaacagacccaucguggacauuaauaucaaagaucacagcauuguuucuuccuacguguguagcggccuggucggcgacaccccgcggaagaacgacucuagcuccucuagccauugccuugauccuaauaacgaggaagggggacacggcgugaaagggugggccuucgacgauggaaaugacguuuggaugggccgcacgaucaacgagacauccagacugggguaugagaccuuuaaggugaucgaaggauggagcaaucccaaaucuaagcuccagauuaaccggcaggucaucguggaucgcggcgacagauccggcuacagcgggauuuucucugucgagggaaaauccuguaucaaucggugcuuuuauguggaacugauuagaggccgcaaggaggaaaccgagguucuguggacaagcaacuccaucguggucuucugugggaccucuggaacauacggcacggggagcuggccugauggcgcugaccucaaucugaugcccauuuga

SEQ ID NO: 216872 - RNA, 1410 nt, Artificial Sequence; identical to SEQ ID NO: 215429
  derived and/or modified CDS sequence (opt5) from neuraminidase__InfluenzaA__AHL96572

SEQ ID NO: 216873 - RNA, 1410 nt, Artificial Sequence; identical to SEQ ID NO: 216864
  derived and/or modified CDS sequence (opt5) from neuraminidase__InfluenzaA__AHL96584

SEQ ID NO: 216874 - RNA, 1410 nt, Artificial Sequence
  derived and/or modified CDS sequence (opt5) from neuraminidase__InfluenzaA__AHL96595
augaaccccaaucagaagaucauuaccaucggcagcgugucccugacaauuucuacgaucugcuucuuuaugcaaauugccauccucaucaccacagucacccugcacuucaaacaguacgaguuuaacagcccuccgaauaaccagguuaugcuuugugaacccacaauuaucgagagaaauauuaccgaaaucguguaucugacaaacaccacgauugagaaggaaaucugcccuaaacccgcugaguaccggaauugguccaagccucagugugggauuaccggauucgcccccuuuucuaaagacaacagcauccgccucuccgcgggcggggauaucugggugacaagagagccuuaugucucuugcgacccggauaaguguuaccaauucgcucugggacagggcaccacacuuaauaacgugcauagcaauaacaccguucgggaccgcacgcccuauagaacacugcucaugaaugaacugggggugccuuuucaccugggaaccaagcaggucugcauugccugguccucuagcuccugucaugauggcaaagccuggcuccacgugugcaucacaggcgacgauaagaacgcuaccgccagcuucauuuacaaugggcggcugguugacucuguggucuccuggagcaaagagauccuucgcacccaggaaucugagugugugugcauuaacggaacauguacgguggucaugaccgauggcuccgcuagcgggaaggccgacacaaaaauccuguuuaucgaggaaggaaagauuguucauaccuccacacucucuggcagcgcgcaacacguggaggaaugcuccugcuaucccagauacccuggggugcggugugucugccgcgauaacuggaagggaagcaauagacccaucguggacauuaacaucaaagaucacucuauuguuuccagcuacguguguucuggccuggucggcgacaccccgcggaagaaugacagcuccucuagcucccauugccuugauccuaacaaugaggaagggggacacggcgugaaagggugggccuucgacgauggaaacgacguuuggaugggccgcacgaucaaugagacaagcagacugggguaugagaccuuuaaggugaucgaaggauggucuaaccccaaauccaagcuccagauuaaucggcaggucaucguggaucgcggcgacagaagcggcuacucugggauuuucuccgucgagagcaaauccuguaucaaccggugcuuuuauguggaacugauuagaggacgcaaggaggaaaccgagguucuguggacaucuaauagcaucguggucuucuguggcaccuccgggacauacggaacgggcucuuggccugauggggcugaccucaaccugaugcccauuuga

SEQ ID NO: 216875 - RNA, 1410 nt, Artificial Sequence; identical to SEQ ID NO: 214218
  derived and/or modified CDS sequence (opt5) from neuraminidase__InfluenzaA__AHL96607

SEQ ID NO: 216876 - RNA, 1410 nt, Artificial Sequence
  derived and/or modified CDS sequence (opt5) from neuraminidase__InfluenzaA__AHL96631
augaaccccaaucagaagaucauuaccaucggcagcgugucccugacaauuucuacgaucugcuucuuuaugcaaauugccauccucaucaccacagucacccugcacuucaaacaguacgaguuuaacagccuuccuaauaaccagguuaugcugugugaaccgacaauuaucgagagaaauauuaccgaaaucguguaucucacaaacaccacgauugagaaggaaaucugccccaaaccugcugaguaccggaauugguccaagccccagugugggauuaccggauucgccccuuuuucuaaagacaacagcauccgccuguccgcgggcggggauaucugggugacaagagagcccuaugucucuugcgacccugauaaguguuaccaauucgcucuuggacagggcaccacacugaauaacaugcauagcaauaacaccgugcgggaccgcacgccguauagaacacuccugaugaaugaacuggggguucccuuucaccucggaaccaaacaggugugcauugccugguccucuagcuccugucaugauggcaaggccuggcugcacgucugcaucacaggcgacgauaagaacgcuaccgccagcuucauuuacaaugggcggcuuguggacucuguuguguccuggagcaaagagauccugcgcacccaggaaucugagugugucugcauuaacggaacauguacgguggugaugaccgauggcuccgcuagcgggaaggccgacacaaaaauccucuuuaucgaggaaggaaagauuguccauaccuccacacugucuggcagcgcgcaacacguugaggaaugcuccugcuauccuagauaccccggggugcggugugugugccgcgauaacuggaagggaagcaauagaccuaucgucgacauuaacaucaaagaucacucuauuguguccagcuacguuuguucuggccuugugggcgacacgccccggaagaaugacagcuccucuagcucccauugccuggauccgaacaaugaggaagggggacacggcgucaaagggugggccuucgacgauggaaacgacguguggaugggccgcaccaucaaugagacaagcagacucggguaugagaccuuuaagguuaucgaaggauggucuaacccuaaauccaagcugcagauuaaucgccaggugaucgucgaucggggcgacagaagcggcuacucugggauuuucuccguggagggaaaaagcuguaucaaccggugcuuuuaugucgaacugauuagaggccgcaaggaggaaaccgaggugcucuggacauccaauucuaucguuguguucugugggaccagcggaacauacggcacgggguccuggcccgauggcgcugaccugaaccuuaugccuauuuga

SEQ ID NO: 216877 - RNA, 1410 nt, Artificial Sequence; identical to SEQ ID NO: 215955
  derived and/or modified CDS sequence (opt5) from neuraminidase__InfluenzaA__AHL96643

SEQ ID NO: 216878 - RNA, 1410 nt, Artificial Sequence; identical to SEQ ID NO: 214218
  derived and/or modified CDS sequence (opt5) from neuraminidase__InfluenzaA__AHL96655

SEQ ID NO: 216879 - RNA, 1410 nt, Artificial Sequence; identical to SEQ ID NO: 214218
  derived and/or modified CDS sequence (opt5) from neuraminidase__InfluenzaA__AHL96667

SEQ ID NO: 216880 - RNA, 1410 nt, Artificial Sequence; identical to SEQ ID NO: 214218
  derived and/or modified CDS sequence (opt5) from neuraminidase__InfluenzaA__AHL96679

SEQ ID NO: 216881 - RNA, 1410 nt, Artificial Sequence; identical to SEQ ID NO: 214218
  derived and/or modified CDS sequence (opt5) from neuraminidase__InfluenzaA__AHL96691

SEQ ID NO: 216882 - RNA, 1410 nt, Artificial Sequence; identical to SEQ ID NO: 214218
  derived and/or modified CDS sequence (opt5) from neuraminidase__InfluenzaA__AHL96703

SEQ ID NO: 216883 - RNA, 1410 nt, Artificial Sequence; identical to SEQ ID NO: 215943
  derived and/or modified CDS sequence (opt5) from neuraminidase__InfluenzaA__AHL96763

SEQ ID NO: 216884 - RNA, 1410 nt, Artificial Sequence; identical to SEQ ID NO: 216796
  derived and/or modified CDS sequence (opt5) from neuraminidase__InfluenzaA__AHL96787

SEQ ID NO: 216885 - RNA, 1410 nt, Artificial Sequence
  derived and/or modified CDS sequence (opt5) from neuraminidase__InfluenzaA__AHL96799
augaaccccaaucagaagaucauuaccaucggcagcgugucccugacaauuucuacgaucugcuucuuuaugcaaauugccauccucaucaccacagucacccugcacuucaaacaguacgaguuuaacagcccuccgaauaaccagguuaugcuuugugaacccacaauuaucgagagaaauauuaccgaaaucguguaucugacaaacaccacgauugagaaggaaaucugcccuaaacccgcugaguaccggaauugguccaagccucagugugggauuaccggauucgcccccuuuucuaaagacaacagcauccgccucuccgcgggcggggauaucugggugacaagagagccuuaugucucuugcgacccggauaaguguuaccaauucgcucugggacagggcaccacacuuaauaacgugcauagcaauaacaccguucgggaccgcacgcccuauagaacacugcucaugaaugaacugggggugccuuuucaccugggaaccaagcaggucugcauugccugguccucuagcuccugucaugauggcaaagccuggcuccacgugugcaucacaggcgacgauaagaacgcuaccgccagcuucauuuacaaugggcggcugguugacucuguggucuccuggagcaaagagauccuucgcacccaggaaucugagugugugugcauuaacggaacauguacgguggucaugaccgauggcuccgcuagcgggaaggccgacacaaaaauccuguuuaucgaggaaggaaagauuguucauaccuccacacucucuggcagcgcgcaacacguggaggaaugcuccugcuaucccagauacccuggggugcggugugucugccgcgauaacuggaagggaagcaauagacccaucguggacauuaacaucaaagaucacucuauuguuuccagcuacguguguucuggccuggucggcgacaccccgcggaagaaugacagcuccucuagcucccauugccuugauccuaacaaugaggaagggggacacggcgugaaagggugggccuucgacgauggaaacgacguuuggaugggccgcacgaucaaugagacaagcagacugggguaugagaccuuuaaggugaucgaaggauggucuaaccccaaauccaagcuccagauuaaucggcaggucaucguggaucgcggcgacagaagcggcuacucugggauuuucuccgucgagggaaaaagcuguaucaaccggugcuuuuauguggaacugauuagaggccgcaaggaugagaccgaaguucuguggacauccaauucuaucguggucuucugugggaccagcggaacauacggcacgggguccuggccugacggcgcugaucucaaccugaugcccauuuga

SEQ ID NO: 216886 - RNA, 1410 nt, Artificial Sequence; identical to SEQ ID NO: 215955
  derived and/or modified CDS sequence (opt5) from neuraminidase__InfluenzaA__AHL96811

SEQ ID NO: 216887 - RNA, 1410 nt, Artificial Sequence; identical to SEQ ID NO: 215955
  derived and/or modified CDS sequence (opt5) from neuraminidase__InfluenzaA__AHL96823

SEQ ID NO: 216888 - RNA, 1410 nt, Artificial Sequence; identical to SEQ ID NO: 214218
  derived and/or modified CDS sequence (opt5) from neuraminidase__InfluenzaA__AHL96847

SEQ ID NO: 216889 - RNA, 1410 nt, Artificial Sequence
  derived and/or modified CDS sequence (opt5) from neuraminidase__InfluenzaA__AHL96859
augaaccccaaucagaagaucauuaccaucggcagcgugucccugacaauuucuacgaucugcuucuuuaugcaaauugccauccucaucaccacagucacccugcacuucaaacaguacgaguuuaacagcccuccgaauaaccagaugaugcuuugugaacccacaauuaucgagagaaauauuaccgaaaucguuuaucugacaaacaccacgauugagaaggaaaucugcccuaaacccgcugaguaccggaauugguccaagccucagugugggauuaccggauucgcccccuuuucuaaagacaacagcauccgccucuccgcgggcggggauaucugggugacaagagagccuuaugugucuugcgacccggauaaguguuaccaauucgcucugggacagggcaccacacuuaauaacguccauagcaauaacaccgugcgggaccgcacgcccuauagaacacugcucaugaaugaacuggggguuccuuuucaccugggaaccaaacaggugugcauugccugguccucuagcuccugucaugauggcaaggccuggcuccacgucugcaucacaggcgacgauaagaacgcuaccgccagcuucauuuacaaugggcggcugguggacucuguuguguccuggagcaaagagauccuucgcacccaggaaucugagugugucugcauuaacggaacauguacgguggugaugaccgauggcuccgcuagcgggaaggccgacacaaaaauccuguuuaucgaggaaggaaagauuguccauaccuccacacucucuggcagcgcgcaacacguugaggaaugcuccugcuaucccagauacccuggggugcggugugugugccgcgauaacuggaagggaagcaauagacccaucgucgacauuaacaucaaagaucacucuauuguguccagcuacguuuguucuggccuggugggcgacaccccgcggaagaaugacagcuccucuagcucccauugccuugauccuaacaaugaggaagggggacacggcgucaaagggugggccuucgacgauggaaacgacguguggaugggccgcacgaucaaugagacaagcagacugggguaugagaccuuuaagguuaucgaaggauggucuaaccccaaauccaagcuccagauuaaucgccaggugaucgucgaucggggcgacagaagcggcuacucugggauuuucuccguggagggaaaaagcuguaucaaccggugcuuuuaugucgaacugauuagaggccgcaaggaggaaaccgaggugcuguggacauccaauucuaucguuguguucugugggaccagcggaacauacggcacgggguccuggccugauggcgcugaccucaaccugaugcccauuuga

SEQ ID NO: 216890 - RNA, 1410 nt, Artificial Sequence
  derived and/or modified CDS sequence (opt5) from neuraminidase__InfluenzaA__AHL96871
augaaccccaaucagaagaucauuaccaucggcagcgugucccugacaauuucuacgaucugcuucuuuaugcaaauugccauccucaucaccacagucacccugcacuucaaacaguacgaguuuaacagcccuccgaauaaccagguuaugcuuugugaacccacaauuguggagagaaauaucaccgaaauuguguaucugacaaacaccacgaucgagaaggaaauuugcccuaaacccgcugaguaccggaauugguccaagccucagugugggaucaccggauucgcccccuuuucuaaagacaacagcauucgccucuccgcgggcggggauaucugggucacaagagagccuuaugugucuugcgacccggauaaguguuaccaauucgcucugggacagggcaccacacuuaauaacguucauagcaauaacaccgugcgggaccgcacgcccuauagaacacugcucaugaaugaacugggggucccuuuucaccugggaaccaaacaggugugcaucgccugguccucuagcuccugucaugauggcaaggccuggcuccacguuugcauuacaggcgacgauaagaacgcuaccgccagcuucaucuacaaugggcggcugguggacucugucguguccuggagcaaagaggugcuucgcacccaggaaucugagugugucugcauuaacggaacaugugcuguugugaugacggauggcuccgccagcgggaaggcggacaccaaaauccuguuuauugaggaaggaaagaucgugcauacauccacccucucuggcagcgcccaacacgucgaggaaugcuccugcuaucccagauacccuggggugcgguguguuugccgcgauaacuggaagggaagcaauagacccaucguggacauuaacaucaaagaucacucuauugucuccagcuacguguguucuggccugguuggcgacacaccgcggaagaaugaccgcagcuccucuagccauugccuugauccuaacaaugaggaagggggacacggcgugaaagggugggcuuucgacgauggaaacgacgucuggaugggcagaaccaucaaugagacgucccggcugggguaugagacauuuaaggugauugaaggauggagcaaccccaaaucuaagcuccagaucaaucgccaggucaucguggauagaggcgaccgguccggcuacagcgggauuuucucuguugagggaaaauccuguaucaacagaugcuuuuauguggaacugauucgcggccggaaggaggaaaccgagguccuguggaccagcaauuccaucgugguuuucugugggacaucuggaaccuacggcacagggagcuggccugauggcgccgaccucaaccugaugcccauuuga

SEQ ID NO: 216891 - RNA, 1410 nt, Artificial Sequence
  derived and/or modified CDS sequence (opt5) from neuraminidase__InfluenzaA__AHL96883
augaaccccaaucagaagaucauuaccaucggcagcgugucccugacaauuucuacgaucugcuucuuuaugcaaauugccauccucaucaccacagucacccugcacuucaaacaguacgaguuuaacagcccuccgaauaaccagguuaugcuuugugaacccacaauuaucgagagaaauauuaccgaaaucguguaucugacaaacaccacgauugagaaggaaaucugcccuaaauccgcugaguaccggaauuggucuaagccccagugugggauuaccggauucgccccuuuuagcaaagacaacuccauccgccucucugcgggcggggauaucugggugacaagagagcccuaugucagcugcgacccugauaaguguuaccaauucgcucugggacagggcaccacacuuaauaacaugcauuccaauaacaccgugcgggaccgcacgccguauagaacacugcucaugaaugaacuggggguucccuuucaccugggaaccaaacaggugugcauugccuggucuagcuccagcugucaugauggcaaggccuggcuccacgucugcaucacaggcgacgauaagaacgcuaccgccucuuucauuuacaaugggcggcugguggacuccguugugagcuggucuaaagagauccuucgcacccaggaauccgagugugucugcauuaacggaacauguacgguggugaugaccgauggcagcgcuuccgggaaggccgacacaaaaauccuguuuaucgaggaaggaaagauuguccauaccucuacacucagcggcuccgcgcaacacguugaggaaugcagcugcuauccuagauaccccggggugcggugugugugccgcgauaacuggaagggaucuaauagaccuaucgucgacauuaacaucaaagaucacuccauugugagcucuuacguuuguagcggccuggugggcgacacgccccggaagaaugacuccucuagcuccagccauugccuugauccgaacaaugaggaagggggacacggcgucaaagggugggccuucgacgauggaaacgacguguggaugggccgcaccaucaaugagacaucuagacugggguaugagaccuuuaagguuaucgaaggaugguccaacccuaaaagcaagcuccagauuaaucgccaggugaucgucgaucggggcgacagaucuggcuacuccgggauuuucagcguggagggaaaauccuguaucaaccggugcuuuuaugucgaacugauuagaggccgcaaggaggaaaccgaggugcuguggacaucuaauagcaucguuguguucugugggaccuccggaacauacggcacggggucuuggcccgauggcgcugaccucaaccugaugccuauuuga

SEQ ID NO: 216892 - RNA, 1410 nt, Artificial Sequence; identical to SEQ ID NO: 215943
  derived and/or modified CDS sequence (opt5) from neuraminidase__InfluenzaA__AHL96895

SEQ ID NO: 216893 - RNA, 1410 nt, Artificial Sequence
  derived and/or modified CDS sequence (opt5) from neuraminidase__InfluenzaA__AHL96907
augaaccccaaucagaagaucauuaccaucggcagcgugucccugacaauuucuacgaucugcuucuuuaugcaaauugccauccucaucaccacagucacccugcacuucaaacaguacgaguuuaacagcccuccgaauaaccagguuaugcuuugugaacccacaauuguggagagaaauaucaccgaaauuguguaucugacaaacaccacgaucgagaaggaaauuugcccuaaacccgcugaguaccggaauugguccaagccucagugugggaucaccggauucgcccccuuuucuaaagacaacagcauucgccucuccgcgggcggggauaucugggucacaagagagccuuaugugucuugcgacccggauaaguguuaccaauucgcucugggacagggcaccacacuuaauaacguucauagcaauaacaccgugcgggaccgcacgcccuauagaacacugcucaugaaugaacugggggucccuuuucaccugggaaccaaacaggugugcaucgccugguccucuagcuccugucaugauggcaaggccuggcuccacguuugcauuacaggcgacgauaagaacgcuaccgccagcuucaucuacaaugggcggcugguggacucugucguguccuggagcaaagaggugcuucgcacccaggaaucugagugugucugcauuaacggaacaugugcuguugugaugacggauggcuccgccagcgggaaggcggacaccaaaauccuguuuauugaggaaggaaagaucgugcauacauccacccucucuggcagcgcccaacacgucgaggaaugcuccugcuaucccagauacccuggggugcgguguguuugccgcgauaacuggaagggaagcaauagacccaucguggacauuaacaucaaagaucacucuauugucuccagcuacguguguucuggccugguuggcgacacaccgcggaagaaugacagcuccucuagcucccauugccuugauccuaacaaugaggaagggggacacggcgugaaagggugggcuuucgacgauggaaacgacgucuggaugggccgcaccaucaaugagacgagcagacugggguaugagacauuuaaggugauugaaggauggucuaaccccaaauccaagcuccagaucaaucggcaggucaucguggaucgcggcgacagaagcggcuacucugggauuuucuccguugagggaaaaagcuguaucaaccggugcuuuuauguggaacugauuagaggccgcaaggaggaaaccgagguccuguggaccuccaauucuaucgugguuuucugugggacaagcggaaccuacggcacaggguccuggccugauggcgccgaccucaaccugaugcccauuuga

SEQ ID NO: 216894 - RNA, 1410 nt, Artificial Sequence; identical to SEQ ID NO: 215955
  derived and/or modified CDS sequence (opt5) from neuraminidase__InfluenzaA__AHL96919

SEQ ID NO: 216895 - RNA, 1410 nt, Artificial Sequence; identical to SEQ ID NO: 215955
  derived and/or modified CDS sequence (opt5) from neuraminidase__InfluenzaA__AHL96931

SEQ ID NO: 216896 - RNA, 1410 nt, Artificial Sequence; identical to SEQ ID NO: 215955
  derived and/or modified CDS sequence (opt5) from neuraminidase__InfluenzaA__AHL96943

SEQ ID NO: 216897 - RNA, 1410 nt, Artificial Sequence
  derived and/or modified CDS sequence (opt5) from neuraminidase__InfluenzaA__AHL96955
augaaccccaaucagaagaucauuaccaucggcagcgugucccugacaauuucuacgaucugcuucuuuaugcaaauugccauccucaucaccacagucacccugcacuucaaacaguacgaguuuaacagcccuuccaauaaccagguuaugcuuugugaaccgacaauuaucgagagaaauauuaccgaaaucguguaucugacaaacaccacgauugagaaggaaaucugccccaaaccugcugaguaccggaauuggucuaagccccagugugggauuaccggauucgccccuuuuagcaaagacaacuccauccgccucucugcgggcgggaauaucugggugacaagagagcccuaugucagcugcgauccugacaaguguuaccaauucgcucugggacagggcaccacacuuaacaaugugcauuccaacaauaccguucgggaucgcacgccguauagaacacugcucaugaacgaacugggggugcccuuucaccugggaaccaagcaggucugcauugccuggucuagcuccagcugucaugacggcaaagccuggcuccacgugugcaucacaggcgaugacaagaaugcuaccgccucuuucauuuacaacgggcggcugguugauuccguggucagcuggucuaaagagauccuucgcacccaggaauccgagugugugugcauuaacggaacauguacgguggucaugaccgacggcagcgcuuccgggaaggccgauacaaaaauccuguuuaucgaggaaggaaagauuguucauaccucuacacucagcggcuccgcgcaacacguggaggaaugcagcugcuauccuagauaccccggggugcggugugucugccgcgacaauuggaagggaucuaacagaccuaucguggauauuaauaucaaagaccacuccauuguuagcucuuacguguguagcggccuggucggcgauacgccccggaagaacgacuccucuagcuccagccauugccuugacccgaauaacgaggaagggggacacggcgugaaagggugggccuucgaugacggaaaugauguuuggaugggccgcaccaucaacgagacaucuagacugggguaugagaccuuuaaggugaucgaaggaugguccaauccuaaaagcaagcuccagauuaaccggcaggucaucguggaccgcggcgauagaucuggcuacuccgggauuuucagcgucgagggaaaauccuguaucaaucggugcuuuuauguggaacugauuagaggccgcaaggaggaaaccgagguucuguggacaucuaacagcaucguggucuucugugggaccuccggaacauacggcacggggucuuggcccgacggcgcugaucucaaucugaugccuauuuga

SEQ ID NO: 216898 - RNA, 1410 nt, Artificial Sequence; identical to SEQ ID NO: 216796
  derived and/or modified CDS sequence (opt5) from neuraminidase__InfluenzaA__AHL96967

SEQ ID NO: 216899 - RNA, 1410 nt, Artificial Sequence
  derived and/or modified CDS sequence (opt5) from neuraminidase__InfluenzaA__AHL96979
augaaccccaaucagaagaucauuaccaucggcagcgugucccugacaauuucuacgaucugcuucuuuaugcaaauugccauccucaucaccacagucacccugcacuucaaacaguacgaguuuaacagcccuccgaauaaccagguuaugcuuugugaacccacaauuaucgagagaaauauuaccgaaaucguguaucugacaaacaccacgauugagaaggaaaucugcccuaaacccgcugaguaccggaauugguccaagccucagugugacauuaccggguucgcccccuuuucuaaagauaacagcauccgccucuccgcgggaggcgacaucugggugacaagagagccuuaugucucuugcgauccggacaaguguuaccaauucgcucuggggcagggaaccacacuuaauaacaugcauagcaauaacaccgugcgggaucgcacgcccuauagaacacugcucaugaaugaacugggcguuccuuuucaccuggggaccaaacaggugugcauugccugguccucuagcuccugucaugacggaaaggccuggcuccacgucugcaucacaggcgaugacaagaacgcuaccgccagcuucauuuacaauggccggcugguggauucuguuguguccuggagcaaagagauccuucgcacccaggaaucugagugugucugcauuaacgggacauguacgguggugaugaccgacggauccgcuagcggcaaggccgauacaaaaauccuguuuaucgaggaagggaagauuguccauaccuccacacucucuggaagcgcgcaacacguugaggaaugcuccugcuaucccagauacccuggcgugcggugugugugccgcgacaacuggaaggggagcaauagacccaucgucgauauuaacaucaaagaccacucuauuguguccagcuacguuuguucuggacuggugggcgacaccccgcggaagaaugauagcuccucuagcucccauugccuugacccuaacaaugaggaaggcgggcacggagucaaaggcugggccuucgaugacgggaacgauguguggaugggacgcacgaucaaugagacaagcagacugggcuaugagaccuuuaagguuaucgaaggguggucuaaccccaaauccaagcuccagauuaaucgccaggugaucgucgaccggggagauagaagcggcuacucuggcauuuucuccguggaggggaaaagcuguaucaaccggugcuuuuaugucgaacugauuagaggacgcaaggaggaaaccgaggugcuguggacauccaauucuaucguuguguucuguggcaccagcgggacauacggaacgggcuccuggccugacggggcugaucucaacauuaugcccaucuga

SEQ ID NO: 216900 - RNA, 1410 nt, Artificial Sequence; identical to SEQ ID NO: 215955
  derived and/or modified CDS sequence (opt5) from neuraminidase__InfluenzaA__AHL96991

SEQ ID NO: 216901 - RNA, 1410 nt, Artificial Sequence; identical to SEQ ID NO: 214218
  derived and/or modified CDS sequence (opt5) from neuraminidase__InfluenzaA__AHL97003

SEQ ID NO: 216902 - RNA, 1410 nt, Artificial Sequence
  derived and/or modified CDS sequence (opt5) from neuraminidase__InfluenzaA__AHL97015
augaaccccaaucagaagaucauuaccaucggcagcgugucccugacaauuucuacgaucugcuucuuuaugcaaauugccauccucaucaccacagucacccugcacuucaaacaguacgaguuuaacagcccuccgaauaaccagguuaugcuuugugaacccacaauuaucgagagaaauauuaccgaaaucguguaucugacaaacaccacgauugagaaggaaaucugcccuaaacccgcugaguaccggaauugguccaagccucagugugggauuaccggauucgcccccuuuucuaaagacaacagcauccgccucuccgcgggcggggauaucugggugacaagagagccuuaugucucuugcgacccggauaaguguuaccaauucgcucugggacagggcaccacacuuaauaacgugcauagcaauaacaccguucgggaccgcacgcccuauagaacacugcucaugaaugaacugggggugccuuuucaccugggaaccaagcaggucugcauugccugguccucuagcuccugucaugauggcaaagccuggcuccacgugugcaucacaggcgacgauaagaacgcuaccgccagcuucauuuacaaugggcggcugguugacucuguggucuccuggagcaaagagauccuucgcacccaggaaucugagugugugugcauuaacggaacauguacgguggucaugaccgauggcuccgcuagcgggaaggccgacacaaaaauccuguuuaucgaggaaggaaagauuguucauaccuccacacucucuggcagcgcgcaacacguggaggaaugcuccugcuaucccagauacccuggggugcggugugucugccgcgauaacuggaagggaagcaauagacccaucguggacauuaacaucaaagaucacucuauuguuuccagcuacguguguucuggccuggucggcgacaccccgcggaagaaugacagcuccucuagcucccauugccuugauccuaacaaugaggaagggggacacggcgugaaagggugggccuucgacgauggaaacgacguuuggaugggccgcacgaucaaugagacaagcagacugggguaugagaccuuuaaggugaucgaaggauggucuaaccccaaauccaagcuccagauuaaucggcagaucauugucgaucgcggcgacagaagcggcuacucugggaucuucuccguggagggaaaaagcuguauuaaccggugcuuuuaugucgaacugaucagaggccgcaaggaggaaaccgaggugcuguggacauccaauucuauuguuguguucugugggaccagcggaacauacggcacgggguccuggccugauggcgcugaccucaaccugaugcccaucuga

SEQ ID NO: 216903 - RNA, 1410 nt, Artificial Sequence; identical to SEQ ID NO: 214218
  derived and/or modified CDS sequence (opt5) from neuraminidase__InfluenzaA__AHL97027

SEQ ID NO: 216904 - RNA, 1410 nt, Artificial Sequence
  derived and/or modified CDS sequence (opt5) from neuraminidase__InfluenzaA__AHL97039
augaaccccaaucagaagaucauuaccaucggcagcgugucccugacaauuucuacgaucugcuucuuuaugcaaauugccauccucaucaccacagucacccugcacuucaaacaguacgaguuuaacagcccuccgaauaaccagguuaugcuuugugaacccacaauuaucgagagaaauauuaccgaaaucguguaucugacaaacaccacgauugagaaggaaaucugcccuaaacccgcugaguaccggaauugguccaagccucagugugggauuaccggauucgcccccuuuucuaaagacaacagcauccgccucuccgcgggcggggauaucugggugacaagagagccuuaugucucuugcgacccggauaaguguuaccaauucgcucugggacagggcaccacacuuaauaacgugcauagcaauaacaccguucgggaccgcacgcccuauagaacacugcucaugaaugaacugggggugccuuuucaccugggaaccaagcaggucugcauugccugguccucuagcuccugucaugauggcaaagccuggcuccacgugugcaucacaggcgacgauaagaacgcuaccgccagcuucauuuacaaugggcggcugguugacucuguggucuccuggagcaaagagauccuucgcacccaggaaucugagugugugugcauuaacggaacauguacgguggucaugaccgauggcaacgcuuccgggaaggccgacacaaaaauccuguuuaucgaggaaggaaagauuguucauaccagcacacucuccggcucugcgcaacacguggaggaaugcagcugcuaucccagauacccuggggugcggugugucugccgcgauaauuggaagggauccaacagacccaucguggacauuaauaucaaagauuacagcauuguuucuuccuauguguguagcggccuggucggcgacaccccgcggaagaacgacucuagcuccucuagccacugccuugauccuaauaacgaggaagggggacauggcgugaaagggugggccuucgacgauggaaaugacguuuggaugggccgcacgaucaacgagacauccagacugggguacgagaccuuuaaggugaucgaaggauggagcaaucccaaaucuaagcuccagauuaaccggcaggucaucguggaucgcggcgacagauccggcuauagcgggauuuucucugucgagggaaaauccuguaucaaucggugcuuuuacguggaacugauuagaggccgcaaggaggaaaccgagguucuguggacaagcaacuccaucguggucuucugugggaccucuggaacauauggcacggggagcuggccugauggcgcugaccucaaucugaugcccauuuga

SEQ ID NO: 216905 - RNA, 1410 nt, Artificial Sequence; identical to SEQ ID NO: 214218
  derived and/or modified CDS sequence (opt5) from neuraminidase__InfluenzaA__AHL97051

SEQ ID NO: 216906 - RNA, 1410 nt, Artificial Sequence
  derived and/or modified CDS sequence (opt5) from neuraminidase__InfluenzaA__AHL97063
augaaccccaaucagaagaucauuaccaucggcagcgugucccugacaauuucuacgaucugcuucuuuaugcaaauugccauccucaucaccacagucacccugcacuucaaacaguacgaguuuaacagcccuccgaauaaccagguuaugcuuugugaacccacaauuaucgagagaaauauuaccgaaaucguguaucugacaaacaccacgauugagaaggaaaucugcccuaaacccgcugaguaccggaauugguccaagccucagugugggauuaccggauucgcccccuuuucuaaagacaacagcauccgccucuccgcgggcggggauaucugggugacaagagagccuuaugucucuugcgacccggauaaguguuaccaauucgcucugggacagggcaccacacuuaauaacgugcauagcaauaacaccguucgggaccgcacgcccuauagaacacugcucaugaaugaacugggggugccuuuucaccugggaaccaagcaggucugcauugccugguccucuagcuccugucaugauggcaaagccuggcuccacgugugcaucacaggcgacgauaagaacgcuaccgccagcuucauuuacaaugggcggcugguugacucuguggucuccuggagcaaagagauccuucgcacccaggaaucugagugugugugcauuaacggaacauguacgguggucaugaccgauggcuccgcuagcgggaaggccgacacaaaaauccuguuuaucgaggaaggaaagauuguucauaccuccacacucucuggcagcgcgcaacacguggaggaaugcuccugcuaucccagauacccuggggugcggugugucugccgcgauaacuggaagggaagcaauagacccaucguggacauuaacaucaaagaucacucuauuguuuccagcuacguguguucuggccuggucggcgacaccccgcggaagaaugacagcuccucuagcucccauugccuugggccuaacaaugaggaaggaggccacggggugaaaggaugggccuucgaugacggcaacgauguuuggauggggcgcacgaucaaugagacaagcagacugggauaugagaccuuuaaggugaucgacggcuggucuaaccccaaauccaagcuccagauuaaucggcaggucaucguggaucgcggcgacagaagcggguacucuggaauuuucuccgucgaaggcaaaagcuguaucaaccggugcuuuuauguggagcugauuagagggcgcaaggaagagaccgaaguucuguggacauccaauucuaucguggucuucuguggaaccagcggcacauacgggacgggcuccuggccugauggagcugaccucaaccugaugcccauuuga

SEQ ID NO: 216907 - RNA, 1410 nt, Artificial Sequence; identical to SEQ ID NO: 214218
  derived and/or modified CDS sequence (opt5) from neuraminidase__InfluenzaA__AHL97075

SEQ ID NO: 216908 - RNA, 1410 nt, Artificial Sequence; identical to SEQ ID NO: 215943
  derived and/or modified CDS sequence (opt5) from neuraminidase__InfluenzaA__AHL97087

SEQ ID NO: 216909 - RNA, 1410 nt, Artificial Sequence; identical to SEQ ID NO: 215447
  derived and/or modified CDS sequence (opt5) from neuraminidase__InfluenzaA__AHL97099

SEQ ID NO: 216910 - RNA, 1410 nt, Artificial Sequence; identical to SEQ ID NO: 214218
  derived and/or modified CDS sequence (opt5) from neuraminidase__InfluenzaA__AHL97111

SEQ ID NO: 216911 - RNA, 1410 nt, Artificial Sequence
  derived and/or modified CDS sequence (opt5) from neuraminidase__InfluenzaA__AHL97123
augaaccccaaucagaagaucauuaccaucggcagcgugucccugacaauuucuacgaucugcuucuuuaugcaaauugccauccucaucaccacagucacccugcacuucaaacaguacgaguuugacagcccuccgaacaaucagguuaugcuuugugaacccacaauuaucgagagaaacauuaccgaaaucguguaucugacaaauaccacgauugagaaggaaaucugcccuaaacccgcugaguaccggaacugguccaagccucagugugggauuaccggauucgcccccuuuucuaaagauaauagcauccgccucuccgcgggcggggacaucugggugacaagagagccuuaugucucuugcgauccggacaaguguuaccaauucgcucugggacagggcaccacacuuaacaaugugcauagcaacaauaccguucgggaucgcacgcccuauagaacacugcucaugaacgaacugggggugccuuuucaccugggaaccaagcaggucugcauugccugguccucuagcuccugucaugacggcaaagccuggcuccacgugugcaucacaggcgaugacaagaaugcuaccgccagcuucauuuacaacgggcggcugguugauucuguggucuccuggagcaaagagauccuucgcacccaggaaucugagugugugugcauuaauggaacauguacgguggucaugaccgacggcuccgcuagcgggaaggccgauacaaaaauccuguuuaucgaggaaggaaagauuguucauaccuccacacucucuggcagcgcgcaacacguggaggaaugcuccugcuaucccagauacccuggggugcggugugucugccgcgacaacuggaagggaagcaacagacccaucguggauauuaauaucaaagaccacucuauuguuuccagcuacguguguucuggccuggucggcgacaccccgcggcgcaacgauagcuccucuagcucccauugccuugacccuaauaacgaggaagggggacacggcgugaaggggugggccuucgaugacggaaaugauguuuggaugggcagaacgaucaacgagacaagccggcugggguaugagaccuuuaaagugaucgaaggauggucuaaucccaaguccaaacuccagauuaaccgccaggucaucguggacagaggcgaucggagcggcuacucugggauuuucuccgucgagggaaagagcuguaucaauagaugcuuuuauguggaacugauucgcggccggaaagaggaaaccgagguucuguggacauccaacucuaucguggucuucugugggaccagcggaacauacggcacgggguccuggccugacggcgcugaucucaaucugaugcccauuuga

SEQ ID NO: 216912 - RNA, 1410 nt, Artificial Sequence; identical to SEQ ID NO: 215975
  derived and/or modified CDS sequence (opt5) from neuraminidase__InfluenzaA__AHL97135

SEQ ID NO: 216913 - RNA, 1410 nt, Artificial Sequence
  derived and/or modified CDS sequence (opt5) from neuraminidase__InfluenzaA__AHL97147
augaaccccaaucagaagaucauuaccaucggcagcgugucccugacaauuucuacgaucugcuucuuuaugcaaauugccauccucaucaccacagucacccugcacuucaaacaguacgaguuuaacagcccuccgaauaaccagguuaugcuuugugaacccacaauuaucgagagaaauauuaccgaaaucguguaucugacaaacaccacgauugagaaggaaaucugcccuaaacccgcugaguaccggaauugguccaagccucagugugggauuaccggauucgcccccuuuucuaaagacaacagcauccgccucuccgcgggcggggauaucugggugacaagagagccuuaugucucuugcgacccggauaaguguuaccaauucgcucugggacagggcaccacacuuaauaacgugcauagcaauaacaccguucgggaccgcacgcccuauagaacacugcucaugaaugaacugggggugccuuuucaccugggaaccaagcaggucugcauugccugguccucuagcuccugucaugauggcaaagccuggcuccacgugugcaucacaggcgacgauaagaacgcuaccgccagcuucauuuacaaugggcggcugguugacucuguggucuccuggagcaaagagauccuucgcacccaggaaucugagugugugugcauuaacggaacauguacgguggucaugaccgauggcuccgcuagcgggaaggccgacacaaaaauccuguuuaucgaggaaggaaagauuguucauaccuccacacucucuggcagcgcgcaacacguggaggaaugcuccugcuaucccagauacccuggggugcggugugucugccgcgauaacuggagaggaagcaaucggcccaucguggacauuaacaucaaggaucacucuauuguuuccagcuacguguguucuggccuggucggcgacaccccgcgcaaaaaugacagcuccucuagcucccauugccuugauccuaacaaugaggaagggggacacggcgugaaggggugggccuucgacgauggaaacgacguuuggaugggcagaacgaucaaugagacaagccggcugggguaugagaccuuuaaagugaucgaaggauggucuaaccccaaguccaaacuccagauuaaucgccaggucaucguggauagaggcgaccggagcggcuacucugggauuuucuccgucgagggaaagagcuguaucaacagaugcuuuuauguggaacugauucgcggccggaaagaggaaaccgagguucuguggacauccaauucuaucguggucuucugugggaccagcggaacauacggcacgggguccuggccugauggcgcugaccucaaccugaugcccauuuga

SEQ ID NO: 216914 - RNA, 1410 nt, Artificial Sequence; identical to SEQ ID NO: 214218
  derived and/or modified CDS sequence (opt5) from neuraminidase__InfluenzaA__AHL97159

SEQ ID NO: 216915 - RNA, 1410 nt, Artificial Sequence; identical to SEQ ID NO: 214218
  derived and/or modified CDS sequence (opt5) from neuraminidase__InfluenzaA__AHL97171

SEQ ID NO: 216916 - RNA, 1410 nt, Artificial Sequence; identical to SEQ ID NO: 214218
  derived and/or modified CDS sequence (opt5) from neuraminidase__InfluenzaA__AHL97183

SEQ ID NO: 216917 - RNA, 1410 nt, Artificial Sequence; identical to SEQ ID NO: 214218
  derived and/or modified CDS sequence (opt5) from neuraminidase__InfluenzaA__AHL97195

SEQ ID NO: 216918 - RNA, 1410 nt, Artificial Sequence; identical to SEQ ID NO: 214218
  derived and/or modified CDS sequence (opt5) from neuraminidase__InfluenzaA__AHL97207

SEQ ID NO: 216919 - RNA, 1410 nt, Artificial Sequence; identical to SEQ ID NO: 214218
  derived and/or modified CDS sequence (opt5) from neuraminidase__InfluenzaA__AHL97219

SEQ ID NO: 216920 - RNA, 1410 nt, Artificial Sequence
  derived and/or modified CDS sequence (opt5) from neuraminidase__InfluenzaA__AHL97231
augaaccccaaucagaagaucauuaccaucggcagcgugucccugacaauuucuacgaucugcuucuuuaugcaaauugccauccucaucaccacagucacccugcacuucaaacaguacgacuuuaacagcccuccgaauaaccagguuaugcuuugugagcccacaauuaucgaaagaaauauuaccgagaucguguaucugacaaacaccacgauugaaaaggagaucugcccuaaacccgcugaauaccggaauugguccaagccucagugugggauuaccggauucgcccccuuuucuaaagauaacagcauccgccucuccgcgggcggggacaucugggugacaagagagccuuaugucucuugcgauccggacaaguguuaccaauucgcucugggacagggcaccacacuuaauaacgugcauagcaauaacaccguucgggaucgcacgcccuauagaacacugcucaugaaugagcugggggugccuuuucaccugggaaccaagcaggucugcauugccugguccucuagcuccugucaugacggcaaagccuggcuccacgugugcaucacaggcgaugacaagaacgcuaccgccagcuucauuuacaaugggcggcugguugauucuguggucuccuggagcaaagaaauccuucgcacccaggagucugaaugugugugcauuaacggaacauguacgguggucaugaccgacggcuccgcuagcgggaaggccgauacaaaaauccuguuuaucgaggagggaaagauuguucauaccuccacacucucuggcagcgcgcaacacguggaagagugcuccugcuaucccagauacccuggggugcggugugucugccgcgacaacuggaagggaagcaauagacccaucguggauauuaacaucaaagaccacucuguuauuuccagcuacguguguucuggccuggucggcgacaccccgcggaagaaugauagcuccucuagcucccauugccuugacccuaacaaugaagaagggggacacggcgugaaagggugggccuucgaugacggaaacgauguuuggaugggccgcacgaucaaugagacaagcagacugggguaugagaccuuuaaggugaucggaggcuggucuaaccccaaauccaagcuccagauuaaucggcaggucaucguggaccgcggcgauagaagcggguacucuggaauuuucuccgucgagggcaaaagcuguaucaaccggugcuuuuauguggaacugauuagagggcgcaaggaggaaaccgagguucuguggacauccaauucuaucguggucuucuguggaaccagcggcacauacgggacgggcuccuggccugacggagcugaucucaaccugaugcccauuuga

SEQ ID NO: 216921 - RNA, 1410 nt, Artificial Sequence
  derived and/or modified CDS sequence (opt5) from neuraminidase__InfluenzaA__AHL97243
augaaccccaaucagaagaucauuaccaucggcagcgugucccugacaauuucuacgaucugcuucuuuaugcaaauugccauccucaucaccacagucacccugaacuucaaacaguacgaguuuaauagcccuccgaacaaucagguuaugcuuugugaacccacaauuaucgagagaaacauuaccgaaaucguguaucugacaaauaccacgauugagaaggaaaucugcccuaaacccgcugaguaccggaacugguccaagccucagugugggauuaccggauucgcccccuuuucuaaagacaauagcauccgccucuccgcgggcggggauaucugggugacaagagagccuuaugucucuugcgacccggauaaguguuaccaauucgcucugggacagggcaccacacuuaacaaugugcacagcaacaauaccguucgggaccgcacgcccuauagaacacugcucaugaacgaacugggggugccuuuucaucugggaaccaagcaggucugcauugccugguccucuagcuccugucacgauggcaaagccuggcuccaugugugcaucacaggcgacgauaagaaugcuaccgccagcuucauuuacaacgggcggcugguugacucuguggucuccuggagcaaagagauccuucgcacccaggaaucugagugugugugcauuaacggaacauguacgguggucaugaccgauggcuccgcuagcgggaaggccgacacaaaaauccuguuuaucgaggaaggaaagauuguucacaccuccacacucucuggcagcgcgcaacauguggaggaaugcuccugcuaucccagauacccuggggugcggugugucugccgcgauaauuggaagggaagcaacagacccaucguggacauuaauaucaaagaucacucuauuguuuccagcuacguguguucuggccuggucggcgacaccccgcggaagaacgacagcuccucuagcucccacugccuugauccuaauaacgaggaagggggacauggcgugaaagggugggccuucgacgauggaaaugacguuuggaugggccgcacgaucaacgagacaagcagacugggguaugagaccuuuaaggugaucgaaggauggucuaaucccaaauccaagcuccagauuaaccggcaggucaucguggaucgcggcgacagaagcggcuacucugggauuuucuccgucgagggaaaaagcuguaucaaucggugcuuuuauguggaacugauuagaggccgcaaggaggaaaccgagguucuguggacauccaacucuaucguggucuucugugggaccagcggaacauacggcacgggguccuggccugauggcgcugaccucaaucugaugcccauuuga

SEQ ID NO: 216922 - RNA, 1410 nt, Artificial Sequence; identical to SEQ ID NO: 215447
  derived and/or modified CDS sequence (opt5) from neuraminidase__InfluenzaA__AHL97255

SEQ ID NO: 216923 - RNA, 1410 nt, Artificial Sequence
  derived and/or modified CDS sequence (opt5) from neuraminidase__InfluenzaA__AHL97267
augaaccccaaucagaagaucauuaccaucggcagcgugucccugacaauuucuacgaucugcuucuuuaugcaaauugccauccucaucaccacagucacccugcacuucaaacaguacgaguuuaacagcccuccgaauaaccagguuaugcuuugugaacccacaauuaucgagagaaauauuaccgaaaucguguaucugacaaacaccacgauugagaaggaaaucugcccuaaacccgcugaguaccggaauugguccaagccucagugugggauuaccggauucgcccccuuuucuaaagacaacagcauccgccucuccgcgggcggggauaucugggugacaagagagccuuaugucucuugcgacccggauaaguguuaccaauucgcucugggacagggcaccacacuuaauaacgugcauagcaauaacaccgcccgggaccgcacgcccuauagaacacugcucaugaaugaacuggggguuccuuuucaccugggaaccaaacaggugugcauugccugguccucuucuuccugucaugauggcaaggcuuggcuccacgucugcaucacaggcgacgauaagaacgccaccgcuagcuucauuuacaaugggcggcugguggacucuguuguguccuggagcaaagagauccuucgcacccaggaaucugagugugucugcauuaacggaacauguacgguggugaugaccgauggcuccgccagcgggaaggcggacacaaaaauccuguuuaucgaggaaggaaagauuguccauaccuccacacucucuggcagcgcccaacacguugaggaaugcuccugcuaucccagauacccuggggugcggugugugugccgcgauaacuggaagggaagcaauagacccaucgucgacauuaacaucaaagaucacucuauuguguccagcuacguuuguucuggccuggugggcgacaccccgcggaagaaugacagcuucuccucuagccauugccuugauccuaacaaugaggaagggggacacggcgucaaagggugggcuuuugacgauggaaacgacguguggaugggccgcacgaucaaugagacauccagacugggguaugagaccuucaagguuaucgaaggauggagcaaccccaaaucuaagcuccagauuaaucgccaggugaucgucgaucggggcgacagauccggcuacagcgggauuuuuagcguggagggaaaauccuguaucaaccggugcuucuaugucgaacugauuagaggccgcaaggaggaaaccgaggugcuguggacaagcaauuccaucguuguguucugugggaccucuggaacauacggcacggggagcuggccugauggcgccgaccucaaccugaugcccauuuga

SEQ ID NO: 216924 - RNA, 1410 nt, Artificial Sequence; identical to SEQ ID NO: 214218
  derived and/or modified CDS sequence (opt5) from neuraminidase__InfluenzaA__AHL97279

SEQ ID NO: 216925 - RNA, 1410 nt, Artificial Sequence; identical to SEQ ID NO: 216808
  derived and/or modified CDS sequence (opt5) from neuraminidase__InfluenzaA__AHL97291

SEQ ID NO: 216926 - RNA, 1410 nt, Artificial Sequence; identical to SEQ ID NO: 216796
  derived and/or modified CDS sequence (opt5) from neuraminidase__InfluenzaA__AHL97303

SEQ ID NO: 216927 - RNA, 1410 nt, Artificial Sequence
  derived and/or modified CDS sequence (opt5) from neuraminidase__InfluenzaA__AHL97339
augaaccccaaucagaagaucauuaccaucggcagcgugucccugacaauuucuacgaucugcuucuuuaugcaaauugccauccucaucaccacagucacccugcacuucaaacaguacgaguuugacagcccuccgaacaaucagguuaugcuuugugaacccacaauuaucgagagaaacauuaccgaaaucguguaucugacaaauaccacgauugagaaggaaaucugcccuaaacccgcugaguaccggaacugguccaagccucagugugggauuaccggauucgcccccuuuucuaaagauaauagcauccgccucuccgcgggcggggacaucugggugacaagagagccuuaugucucuugcgauccggacaaguguuaccaauucgcucugggacagggcaccacacuuaacaaugugcauagcaacaauaccguucgggaucgcacguccuauagaacacugcucaugaacgaacugggggugcccuuucaccugggaaccaagcaggucugcauugccuggucuagcuccagcugucaugacggcaaagccuggcuccacgugugcaucacaggcgaugacaagaaugcuaccgccucuuucauuuacaacgggcggcugguugauuccguggucagcuggucuaaagagauccuucgcacccaggaauccgagugugugugcauuaauggaacauguacgguggucaugaccgacggcagcgcuuccgggagagccgauacaaagauccuguuuaucgaggaaggaaaaauuguucauaccucuacacucagcggcuccgcgcaacacguggaggaaugcagcugcuauccucgguaccccggggugcgcugugucugcagagacaacuggaagggaucuaaccggccuaucguggauauuaauaucaaggaccacuccauuguuagcucuuacguguguagcggccuggucggcgacacgccccgcaaaaacgauuccucuagcuccagccauugccuugacccgaauaacgaggaagggggacacggcgugaaggggugggccuucgaugacggaaaugauguuuggaugggcagaaccaucaacgagacaucucggcugggguaugagaccuuuaaagugaucgaaggaugguccaauccuaagagcaaacuccagauuaaccgccaggucaucguggacagaggcgaucggucuggcuacuccgggauuuucagcgucgagggaaaguccuguaucaauagaugcuuuuauguggaacugauucgcggccggaaagaggaaaccgagguucuguggacaucuaacagcaucguggucuucugugggaccuccggaacauacggcacggggucuuggcccgacggcgcugaucucaaucugaugccuauuuga

SEQ ID NO: 216928 - RNA, 1410 nt, Artificial Sequence; identical to SEQ ID NO: 215943
  derived and/or modified CDS sequence (opt5) from neuraminidase__InfluenzaA__AHL97351

SEQ ID NO: 216929 - RNA, 1410 nt, Artificial Sequence; identical to SEQ ID NO: 216808
  derived and/or modified CDS sequence (opt5) from neuraminidase__InfluenzaA__AHL97363

SEQ ID NO: 216930 - RNA, 1410 nt, Artificial Sequence; identical to SEQ ID NO: 214218
  derived and/or modified CDS sequence (opt5) from neuraminidase__InfluenzaA__AHL97387

SEQ ID NO: 216931 - RNA, 1410 nt, Artificial Sequence
  derived and/or modified CDS sequence (opt5) from neuraminidase__InfluenzaA__AHL97399
augaaccccaaucagaagaucauuaccaucggcagcgugucccugacaauuucuacgaucugcuucuuuaugcaaauugccauccucaucaccacagucacccugcacuucaaacaguacgaguuuaacagcccuccgaauaaccagguuaugcuuugugaacccacaauuaucgagagaaauauuaccgaaaucauguaucugacaaacaccacgauugagaaggaaaucugcccuaaacccgcugaguaccggaauugguccaagccucagugugggauuaccggauucgcccccuuuucuaaagacaacagcauccgccucuccgcgggcggggauaucugggugacaagagagccuuaugugucuugcgacccggauaaguguuaccaauucgcucugggacagggcaccacacuuaauaacaugcauagcaauaacaccguccgggaccgcacgcccuauagaacacugcucaugaaugaacugggggugccuuuucaccugggaaccaagcagguuugcauugccugguccucuagcuccugucaugauggcaaagccuggcuccacgugugcaucacaggcgacgauaagaacgcuaccgccagcuucauuuacaaugggcggcuggucgacucugugguuuccuggagcaaagagauccuucgcacccaggaaucugagugugugugcauuaacggaacauguacggucgugaugaccgauggcuccgcuagcgggaaggccgacacaaaaauccuguuuaucgaggaaggaaagauugugcauaccuccacacucucuggcagcgcgcaacacgucgaggaaugcuccugcuaucccagauacccugggguucggugugugugccgcgauaacuggaagggaagcaauagacccaucguggacauuaacaucaaagaucacucuauugucuccagcuacguguguucuggccugguuggcgacaccccgcggaagaaugacagcuccucuagcucccauugccuugauccuaacaaugaggaagggggacacggcgugaaagggugggccuucgacgauggaaacgacgucuggaugggccgcacgaucaaugagacaagcagacugggguaugagaccuuuaaggugaucgaaggauggucuaaccccaaauccaagcuccagauuaaucggcagguuaucguggaucgcggcgacagaagcggcuacucugggauuuucuccgucgagggacggagcuguaucaacagaugcuuuuauguggaacugauucgcggccggaaagaggaaaccgagguccuguggacauccaauucuaucgugguuuucugugggaccagcggaacauacggcacgggguccuggccugauggcgcugaccucaaccugaugcccauuuga

SEQ ID NO: 216932 - RNA, 1410 nt, Artificial Sequence; identical to SEQ ID NO: 215447
  derived and/or modified CDS sequence (opt5) from neuraminidase__InfluenzaA__AHL97411

SEQ ID NO: 216933 - RNA, 1410 nt, Artificial Sequence
  derived and/or modified CDS sequence (opt5) from neuraminidase__InfluenzaA__AHL97423
augaaccccaaucagaagaucauuaccaucggcagcgugucccugacaauuucuacgaucugcuucuuuaugcaaauugccauccucaucaccacagucacccugcacuucaaacaguacgaguuuaacagcccuccgaauaaccagguuaugcuuugugaacccacaauuaucgagagaaauauuaccgaaaucguguaucugacaaacaccacgauugagaaggaaaucugcccuaaacccgcugaguaccggaauugguccaagccucagugugggauuaccggauucgcccccuuuucuaaagacaacagcauccgccucuccgcgggcggggauaucugggugacaagagagccuuaugucucuugcgacccggauaaguguuaccaauucgcucugggacagggcaccacacuuaauaacgugcauagcaauaacaccguucgggaccgcacgcccuauagaacacugcucaugaaugaacugggggugccuuuucaccugggaaccaagcaggucugcauugccugguccucuagcuccugucaugauggcaaagccuggcuccacgugugcaucacaggcgacgauaagaacgcuaccgccagcuucauuuacaaugggcggcugguugacucuguggucuccuggagcaaagagauccuucgcacccaggaaucugagugugugugcauuaacggaacauguacgguggucaugaccgauggcuccgcuagcgggaaggccgacacaaaaauccuguuuaucgaggaaggaaagauuguucauaccuccacacucucuggcagcgcgcaacacguggaggaaugcuccugcuaucccagauacccuggggugcggugugucugccgcgauaacuggaagggaagcaauagacccaucguggacauuaacaucaaagaucacucuauuguuuccagcuacguguguucuggccuggucggcgacaccccgcggaagaaugacagcuccucuagcucccauugccuugauccuaacaaugaggaagggggacacggcgugaaagggugggccuucgacgauggaaacgacauguggaugggccgcacgaucaaugagacaagcagacugggguaugagaccuuuaagguuaucgaaggauggucuaaccccaaauccaagcuccagauuaaucgccaggugaucgucgaucggggcgacagaagcggcuacucugggauuuucuccguggagggaaaaagcuguaucaaccggugcuuuuaugucgaacugauuagaggccgcaaggaggaaaccgaggugcuguggacauccaauucuaucguuguguucugugggaccagcggaacauacggcacgggguccuggccugauggcgcugaccucaaccugaugcccauuuga

SEQ ID NO: 216934 - RNA, 1410 nt, Artificial Sequence
  derived and/or modified CDS sequence (opt5) from neuraminidase__InfluenzaA__AHL97447
augaaccccaaucagaagaucauuaccaucggcagcgugucccugacaauuucuacgaucugcuucuuuaugcaaauugccauccucaucaccacagucacccugcacuucaaacaguacgaguuuaacagcccuccgaauaaccagguuaugcuuugugaacccacaauuaucgagagaaauauuaccgaaaucguguaucugacaaacaccacgauugagaaggaaaucugcccuaaacccgcugaguaccggaauugguccaagccucagugugggauuaccggauucgcccccuuuucuaaagacaacagcauccgccucuccgcgggcggggauaucugggugacaagagagccuuaugucucuugcgacccggauaaguguuaccaauucgcucugggacagggcaccacacuuaauaacgugcauagcaauaacaccguucgggaccgcacgcccuauagaacacugcucaugaaugaacugggggugccuuuucaccugggaaccaagcaggucugcauugccugguccucuucuuccugucaugauggcaaagccuggcuccacgugugcaucacaggcgacgauaagaacgcuaccgccagcuucauuuacaaugggcggcugguugacucuguggucuccuggagcaaagagauccuucgcacccaggaaucugagugugugugcauuaacggaacauguacgguggucaugaccgauggcuccgcuagcgggaaggccgacacaaaaauccuguuuaucgaggaaggaaagauuguucauaccuccacacucucuggcagcgcgcaacacguggaggaaugcuccugcuaucccagauacccuggggugcggugugucugccgcgauaacuggaagggaagcaauagacccaucguggacauuaacaucaaagaucacucuauuguuuccagcuacguguguucuggccuggucggcgacaccccgcggaagaaugacagcuucuccucuagccauugccuugauccuaacaaugaggaagggggacacggcgugaaagggugggccuuugacgauggaaacgacguuuggaugggccgcacgaucaaugagacauccagacugggguaugagaccuucaaggugaucgaaggauggagcaaccccaaaucuaagcuccagauuaaucggcaggucaucguggaucgcggcgacagauccggcuacagcgggauuuuuagcgucgagggaaaauccuguaucaaccggugcuucuauguggaacugauuagaggccgcaaggaggaaaccgagguucuguggacaagcaauuccaucguggucuucugugggaccucuggaacauacggcacggggagcuggccugauggcgcugaccucaaccugaugcccauuuga

SEQ ID NO: 216935 - RNA, 1410 nt, Artificial Sequence; identical to SEQ ID NO: 214218
  derived and/or modified CDS sequence (opt5) from neuraminidase__InfluenzaA__AHL97459

SEQ ID NO: 216936 - RNA, 1410 nt, Artificial Sequence; identical to SEQ ID NO: 216808
  derived and/or modified CDS sequence (opt5) from neuraminidase__InfluenzaA__AHL97471

SEQ ID NO: 216937 - RNA, 1410 nt, Artificial Sequence; identical to SEQ ID NO: 215943
  derived and/or modified CDS sequence (opt5) from neuraminidase__InfluenzaA__AHL97483

SEQ ID NO: 216938 - RNA, 1410 nt, Artificial Sequence; identical to SEQ ID NO: 214218
  derived and/or modified CDS sequence (opt5) from neuraminidase__InfluenzaA__AHL97496

SEQ ID NO: 216939 - RNA, 1410 nt, Artificial Sequence; identical to SEQ ID NO: 214218
  derived and/or modified CDS sequence (opt5) from neuraminidase__InfluenzaA__AHL97508

SEQ ID NO: 216940 - RNA, 1410 nt, Artificial Sequence
  derived and/or modified CDS sequence (opt5) from neuraminidase__InfluenzaA__AHL97520
augaaccccaaucagaagaucauuaccaucggcagcgugucccugacaauuucuacgaucugcuucuuuaugcaaauugccauccucaucaccacagucacccugcacuucaaacaguacgaguuuaacagcccuccgaauaaccagguuaugcuuugugaacccacaauuaucgagagaaauauuaccgaaaucguguaucugacaaacaccacgauugagaaggaaaccugcccuaaacccgcugaguaccggaauugguccaagccucagugugggaucacaggauucgcccccuuuucuaaagacaacagcauucgccucuccgcgggcggggauaucugggugaccagagagccuuaugucucuugcggaccggacaaguguuaccaauucgcucugggccaggggacaacccuuaauaacaugcauagcaauaacacggugcgggaucgcacacccuauagaacccugcucaugaaugaacugggaguuccuuuucaccugggcacaaaacaggugugcaucgccugguccucuagcuccugucaugacggcaaggccuggcuccacgucugcauuaccggggaugacaagaacgcuaccgccagcuucaucuacaauggacggcugguggauucuguuguguccuggagcaaagagauucuucgcacacaggaaucugagugugucugcaucaacggcacguguaccguggugaugacagacggguccgcuagcggaaaggccgauaccaaaauucuguuuaucgaggaaggcaagaucguccauacauccacccucucugggagcgcgcaacacguugaggaaugcuccugcuaucccagauacccuggagugcggugugugugccgcgacaacuggaagggcagcaauagacccauugucgauaucaacauuaaagaccacucuaucguguccagcuacguuuguucuggccuggugggggauacgccgcggaagaaugacagcuccucuagcucccauugccuugacccuaacaaugaggaaggaggccacggggucaaaggaugggccuucgaugacggcaacgauguguggauggggcgcacaauuaaugagaccagcagacugggauaugagaccuuuaagguuaucgaaggcuggucuaaccccaaauccaagcuccagaucaaucgccaggugauugucgaccggggcgauagaagcggguacucuggaaucuucuccguggagggcaaaagcuguauuaaccggugcuuuuaugucgaacugaucagagggcgcaaggaggaaacagaggugcuguggaccuccaauucuauuguuguguucuguggaacaagcggcacguacgggaccggcuccuggccugacggagcugaucucaaccugaugcccaucuga

SEQ ID NO: 216941 - RNA, 1410 nt, Artificial Sequence; identical to SEQ ID NO: 214218
  derived and/or modified CDS sequence (opt5) from neuraminidase__InfluenzaA__AHL97532

SEQ ID NO: 216942 - RNA, 1410 nt, Artificial Sequence; identical to SEQ ID NO: 214218
  derived and/or modified CDS sequence (opt5) from neuraminidase__InfluenzaA__AHL97544

SEQ ID NO: 216943 - RNA, 1410 nt, Artificial Sequence; identical to SEQ ID NO: 215943
  derived and/or modified CDS sequence (opt5) from neuraminidase__InfluenzaA__AHL97556

SEQ ID NO: 216944 - RNA, 1410 nt, Artificial Sequence
  derived and/or modified CDS sequence (opt5) from neuraminidase__InfluenzaA__AHL97568
augaaccccaaucagaagaucauuaccaucggcagcgugucccugacaauuucugccaucugcuucuuuaugcaaauugcuauccucaucacgaccgucacacugagauucaaacaguacgaguuuaacagcccuccgaauaaccagguuaugcuuugugaacccaccauuaucgagcggaauauuacagaaaucguguaucugaccaacacaaccauugagaaggaaaucugcccuaaacccgccgaguaccgcaauugguccaagccucagugugacauuacgggguucgcgcccuuuucuaaagauaacagcaucagacucuccgcuggaggcgacaucugggugacccgggagccuuaugucucuugcgauccggacaaguguuaccaauucgcccuggggcagggaacaacccuuacaaaugugcacagcaacaauaccguucgcgauagaacgcccuaucggacacugcucaugaacgaacugggcgugccuuuucaucuggggaccaagcaggucugcauugccugguccucuagcuccugucacgacggaaaggcuuggcuccaugugugcaucacaggcgaugacaaaaaugccaccgcuagcuucauuuacaacggccgccugguugauucuguggucuccuggagcaaagagauccuuagaacccaggaaucugagugugugugcauuaaugggacauguacgguggucaugaccgacggauccgccagcggcaaggcggauacaaaaauccuguuuaucgaggaagggaagauuguucacaccuccacacucucuggaagcgcccaacauguggaggaaugcuccugcuauccccgguacccuggcgugcgcugugucugcagagacaacuggaaggggagcaaccggcccaucguggauauuaauaucaaagaccacucuauuguuucccgcuacguguguagcggacuggucggcgacaccccgagaaagaacgauucuagcuccucuagccacugccuugacccuaauaacgaggaaggcgggcauggagugaaaggcugggcuuucgaugacgggaaugauguuuggaugggacggacgaucaacgagacaucccgccugggcuaugagaccuuuaaggugaucgaaggguggagcaaucccaaaucuaagcuccagauuaacagacaggucaucguggaccggggagauagauccggcuacagcggcauuuucucugucgaggggaaauccuguaucaaucgcugcuuuuauguggaacugauucggggaagaaaggaggaaaccgagguucuguggacaagcaacuccaucguggucuucuguggcaccucugggacauacggaacgggcagcuggccugacggggccgaucucaaucugaugcccauuuga

SEQ ID NO: 216945 - RNA, 1410 nt, Artificial Sequence; identical to SEQ ID NO: 216858
  derived and/or modified CDS sequence (opt5) from neuraminidase__InfluenzaA__AHL97580

SEQ ID NO: 216946 - RNA, 1410 nt, Artificial Sequence
  derived and/or modified CDS sequence (opt5) from neuraminidase__InfluenzaA__AHL97592
augaaccccaaucagaagaucauuaccaucggcagcgugucccugacaauuucuacgaucugcuucuuuaugcaaauugccauccucaucaccacagucacccugcacuucaaacaguacgaguuuaacagcccuccgaauaaccagguuaugcuuugugaacccacaauuaucgagagaaauauuaccgaaaucguguaucugacaaacaccacgauugagaaggaaaucugcccuaaacccgcugaguaccggaauugguccaagccucagugugggauuaccggauucgcccccuuuucuaaagacaacagcgugcgccucuccgcgggcggggauaucugggucacaagagagccuuaugugucuugcgacccggauaaguguuaccaauucgcucugggacagggcaccacacuuaauaacguucauagcaauaacaccgugcgggaccgcacgcccuauagaacacugcucaugaaugaacugggggucccuuuucaccugggaaccaaacaggugugcaucgccugguccucuagcuccugucaugauggcaaggccuggcuccacguuugcauuacaggcgacgauaagaacgcuaccgccagcuucaucuacaaugggcggcugguggacucugucguguccuggagcaaagagauucuucgcacccaggaaucugagugugugugcaucaacggaacauguacggucguuaugaccgauggcuccgcuagcgggaaggccgacacaaaaauucuguuuaucgaggaaggaaagaucgugcauaccuccacacucucuggcagcgcgcaacacguggaggaaugcuccugcuaucccagauacccugggguccggugugugugccgcgauaacuggaagggaagcaauagacccauuguugacaucaacauuaaagaucacucuaucguguccagcuacgucuguucuggccuggugggcgacaccccgcggaagaaugacagcuccucuagcucccauugccuugggccuaacaaugaggaaggaggccacgggguuaaaggaugggccuucgaugacggcaacgauguguggauggggcgcacgauuaaugagacaagcagaucuggauaugagaccuuuaaggucaucgaaggcugguccaaccccaaaagcaagcugcagaucaaucgccaggugauugucgaccggggcgauagaucuggguacuccggaaucuucagcguggagggcaaauccuguauuaaccggugcuuuuauguugaacucaucagagggcgcaaggaggaaaccgaggugcuguggacaucuaauagcauugucguguucuguggaaccuccggcacauacgggacgggcucuuggccugacggagcugaucugaaccucaugcccaucuga

SEQ ID NO: 216947 - RNA, 1410 nt, Artificial Sequence; identical to SEQ ID NO: 214218
  derived and/or modified CDS sequence (opt5) from neuraminidase__InfluenzaA__AHL97604

SEQ ID NO: 216948 - RNA, 1410 nt, Artificial Sequence
  derived and/or modified CDS sequence (opt5) from neuraminidase__InfluenzaA__AHL97616
augaaccccaaucagaagaucauuaccaucggcagcgugucccugacaauuucuacgaucugcuucuuuaugcaaauugccauccucaucaccacagucacccugcacuucaaacaguacgaguuuaacagcccuccgaauaaccagguuaugcuuugugaacccacaauuaucgagagaaauauuaccgaaaucguguaucugacaaacaccacgauugagaaggaaaucugcccuaaacccgcugaguaccggaauugguccaagccucagugugggauuaccggauucgcccccuuuucuaaagacaacagcauccgccucuccgcgggcggggauaucugggugacaagagagccuuaugucucuugcgacccggauaaguguuaccaauucgcucugggacagggcaccacacuuaauaacaugcauagcaauaacaccgugcgggaccgcacgcccuauagaacacugcucaugaaugaacuggggguuccuuuucaccugggaaccaaacaggugugcauugccugguccucuagcuccugucaugauggcaaggccuggcuccacgucugcaucacaggcgacgauaagaacgcuaccgccagcuucauuuacaaugggcggcugguggacucuguuguguccuggagcaaagagguccuucgcacccaggaaucugagugugugugcaucaacggaacauguacgguggucaugaccgauggcuccgcuagcgggaaggccgacacaaaaauucuguuuaucgaggaaggaaagaucguucauaccuccacacucucuggcagcgcgcaacacguggaggaaugcuccugcuaucccagauacccuggggugcggugugucugccgcgauaacuggaagggaagcaauagacccauuguggacaucaacauuaaagaucacucuaucguuuccagcuacguguguucuggccuggucggcgacaccccgcggaagaaugacagcuccucuagcucccauugccuugauccuaacaaugaggaagggggacacggcgugaaagggugggccuucgacgauggaaacgacguuuggaugggccgcacgauuaaugagacaagcagacugggguaugagaccuuuaaggugaucgaaggauggucuaaccccaaauccaagcuccagaucaaucggcaggucauuguggaucgcggcgacagaagcggcuacucugggaucuucuccgucgagggaaaaagcuguauuaaccggugcuuuuauguggaacugaucagaggccgcaaggaggaaaccgagguucuguggacauccaauucuauuguggucuucugugggaccagcggaacauacggcacgggguccuggccugauggcgcugaccucaaccugaugcccaucuga

SEQ ID NO: 216949 - RNA, 1410 nt, Artificial Sequence; identical to SEQ ID NO: 216808
  derived and/or modified CDS sequence (opt5) from neuraminidase__InfluenzaA__AHL97628

SEQ ID NO: 216950 - RNA, 1410 nt, Artificial Sequence; identical to SEQ ID NO: 214218
  derived and/or modified CDS sequence (opt5) from neuraminidase__InfluenzaA__AHL97640

SEQ ID NO: 216951 - RNA, 1410 nt, Artificial Sequence; identical to SEQ ID NO: 215966
  derived and/or modified CDS sequence (opt5) from neuraminidase__InfluenzaA__AHL97652

SEQ ID NO: 216952 - RNA, 1410 nt, Artificial Sequence; identical to SEQ ID NO: 215966
  derived and/or modified CDS sequence (opt5) from neuraminidase__InfluenzaA__AHL97664

SEQ ID NO: 216953 - RNA, 1410 nt, Artificial Sequence; identical to SEQ ID NO: 215447
  derived and/or modified CDS sequence (opt5) from neuraminidase__InfluenzaA__AHL97676

SEQ ID NO: 216954 - RNA, 1410 nt, Artificial Sequence; identical to SEQ ID NO: 214218
  derived and/or modified CDS sequence (opt5) from neuraminidase__InfluenzaA__AHL97688

SEQ ID NO: 216955 - RNA, 1410 nt, Artificial Sequence; identical to SEQ ID NO: 215943
  derived and/or modified CDS sequence (opt5) from neuraminidase__InfluenzaA__AHL97700

SEQ ID NO: 216956 - RNA, 1410 nt, Artificial Sequence
  derived and/or modified CDS sequence (opt5) from neuraminidase__InfluenzaA__AHL97712
augaaccccaaucagaagaucauuaccaucggcagcgugucccugacaauuucuacgaucugcuucuuuaugcaaauugccauccucaucaccacagucacccugcacuucaaacaguacgaguuuaacagcccuccgaauaaccagguuaugcuuugugaacccacaauuaucgagagaaauauuaccgaaaucguguaucugacaaacaccacgauugagaaggaaaucugcccuaaacccgcugaguaccggaauugguccaagccucagugugggauuaccggauucgcccccuuuucuaaagacaacagcauccgccucuccgcgggcggggauaucugggugacaagagagccuuaugucucuugcgacccggauaaguguuaccaauucgcucugggacagggcaccacacuuaauaacgugcauagcaauaacaccguucgggaccgcacgcccuauagaacacugcucaugaaugaacugggggugccuuuucaccugggaaccaagcaggucugcauugccugguccucuagcuccugucaugauggcaaagccuggcuccacgugugcaucacaggcgacgauaagaacgcuaccgccagcuucauuuacaaugggcggcugguugacucuguggucuccuggagcaaagagauccuucgcacccaggaaucugagugugugugcauuaacggaacauguacgguggucaugaccgauggcuccgcuagcgggaaggccgacacaaaaauccuguuuaucgaggaaggaaagauuguucauaccuccacacucucuggcagcgcgcaacacguggaggaaugcuccugcuaucccagauacccuggggugcggugugucugccgcgauaacuggaagggaagcaauagacccaucguggacauuaacaucaaagaucacucuauuguuuccagcuacguguguucuggccuggucggcgacaccccgcggaagaaugacagcacguccucuagccauugccuugauccuaacaaugaggaagggggacacggcgugaaagggugggccuucgacgauggaaacgacguuuggaugggccgcacaaucaaugagaccuccagacugggguaugagaccuuuaaggugaucgaaggauggagcaaccccaaaucuaagcuccagauuaaucggcaggucaucguggaucgcggcgacagauccggcuacagcgggauuuucucugucgagggaaaauccuguaucaaccggugcuuuuauguggaacugauuagaggccgcaaggaggaaacagagguucuguggaccagcaauuccaucguggucuucugugggacaucuggaacguacggcaccgggagcuggccugauggcgcugaccucaaccugaugcccauuuga

SEQ ID NO: 216957 - RNA, 1410 nt, Artificial Sequence; identical to SEQ ID NO: 215943
  derived and/or modified CDS sequence (opt5) from neuraminidase__InfluenzaA__AHL97724

SEQ ID NO: 216958 - RNA, 1410 nt, Artificial Sequence; identical to SEQ ID NO: 214218
  derived and/or modified CDS sequence (opt5) from neuraminidase__InfluenzaA__AHL97736

SEQ ID NO: 216959 - RNA, 1410 nt, Artificial Sequence
  derived and/or modified CDS sequence (opt5) from neuraminidase__InfluenzaA__AHL97760
augaaccccaaucagaagaucauuaccaucggcagcgugucccugacaauuucuacgaucugcuucuuuaugcaaauugccauccucaucaccacagucacccugcacuucaaacaguacgaguuuaacagcccuccgaauaaccagguuaugcuuugugaacccacaauuaucgagagaaauauuaccgaaaucguguaucugacaaacaccacgauugagaaggaaaucugcccuaaacccgcugaguaccggaauugguccaagccucagugugggauuaccggauucgcccccuuuucuaaagacaacagcauccgccucuccgcgggcggggauaucugggugacaagagagccuuaugucucuugcgacccggauaaguguuaccaauucgcucugggacagggcaccacacuuaauaacgugcauagcaauaacaccguucgggaccgcacgcccuauagaacacugcucaugaaugaacugggggugccuuuucaccugggaaccaagcaggucugcauugccugguccucuagcuccugucaugauggcaaagccuggcuccacgugugcaucacaggcgacgaugagaacgcuaccgccagcuucauuuacaaugggcggcugguugacucuguggucuccuggagcaaggaaauccuucgcacccaggagucugagugugugugcauuaacggaacauguacgguggucaugaccgauggcuccgcuagcgggaaagccgacacaaagauccuguuuaucgaagagggaaaaauuguucauaccuccacacucucuggcagcgcgcaacacguggaagagugcuccugcuaucccagauacccuggggugcggugugucugccgcgauaacuggaagggaagcaauagacccaucguggacauuaacaucaaggaucacucuauuguuuccagcuacguguguucuggccuggucggcgacaccccgcggaaaaaugacagcuccucuagcucccauugccuugauccuaacaaugaagaagggggacacggcgugaaggggugggccuucgacgauggaaacgacguuuggaugggccgcacgaucaaugagacaagcagacugggguaugagaccuuuaaagugaucgagggauggucuaaccccaaguccaaacuccagauuaaucggcaggucaucguggaucgcggcgacagaagcggcuacucugggauuuucuccgucgaaggaaagagcuguaucaaccggugcuuuuauguggagcugauuagaggccgcaaagaagagaccgagguucuguggacauccaauucuaucguggucuucugugggaccagcggaacauacggcacgggguccuggccugauggcgcugaccucaaccugaugcccauuuga

SEQ ID NO: 216960 - RNA, 1410 nt, Artificial Sequence
  derived and/or modified CDS sequence (opt5) from neuraminidase__InfluenzaA__AHL97772
augaaccccaaucagaagaucauuaccaucggcagcgugucccugacaauuucuacgaucugcuucuuuaugcaaauugccauccucaucaccacagucacccugcacuucaaacaguacgaguuuaacagcccuccgaauaaccagguuaugcuuugugaacccacaauuaucgagagaaauauuaccgaaaucguguaucugacaaacaccacgauugagaaggaaaucugcccuaaacccgcugaguaccggaauugguccaagccucagugugggauuaccggauucgcccccuuuucuaaagacaacagcauccgccucuccgcgggcggggauaucugggugacaagagagccuuaugucucuugcgacccggauaaguguuaccaauucgcucugggacagggcaccacacuuaauaacgugcauagcaauaacaccguucgggaccgcacgcccuauagaacacugcucaugaaugaacugggggugccuuuucaccugggaaccaagcaggucugcauugccugguccucuagcuccugucaugauggcaaagccuggcuccacgugugcaucacaggcgacgauaagaacgcuaccgccagcuucauuuacaaugggcggcugguugacucuguggucuccuggagcaaagagauccuucgcacccaggaaucugagugugugugcauuaacggaacauguacgguggucaugaccgauggcuccgcuagcgggaaggccgacacaaaaauccuguuuaucgaggaaggaaagauuguucauaccuccacacucucuggcagcgcgcaacacguggaggaaugcuccugcuaucccagauacccuggggugcggugugucugccgcgauaacuggaagggaagcaauagacccaucguggacauuaacaucaaagaucacucuauuguuuccagcuacguguguucuggccuggucggcgacaccccgcggaagaaugacagcuccucuagcucccauugccuugauccuaacaaugaggaagggggacacggcgugaaagggugggccuucgacgauggaaacgacguuuggaugggccgcacgaucaaugagacaagcagacugggguaugagaccuuuaaggugaucgaaggauggucuaaccccaaauccaagcuccagauuaaucggcaggucaucguggaucgcggcgacagaagcggcuacucugggauuuucuccgucgagggaaaaagcuguaucaaccggugcuuuuauguggaacugauuagaggccgcaaggaggaaaccgagguucuguggacauccaauucuguggucguguucugugggaccagcggaacauacggcacgggguccuggccugauggcgcugaccucaaccugaugcccaucuga

SEQ ID NO: 216961 - RNA, 1410 nt, Artificial Sequence; identical to SEQ ID NO: 215447
  derived and/or modified CDS sequence (opt5) from neuraminidase__InfluenzaA__AHL97784

SEQ ID NO: 216962 - RNA, 1410 nt, Artificial Sequence; identical to SEQ ID NO: 214218
  derived and/or modified CDS sequence (opt5) from neuraminidase__InfluenzaA__AHL97796

SEQ ID NO: 216963 - RNA, 1410 nt, Artificial Sequence; identical to SEQ ID NO: 214218
  derived and/or modified CDS sequence (opt5) from neuraminidase__InfluenzaA__AHL97808

SEQ ID NO: 216964 - RNA, 1410 nt, Artificial Sequence; identical to SEQ ID NO: 214218
  derived and/or modified CDS sequence (opt5) from neuraminidase__InfluenzaA__AHL97820

SEQ ID NO: 216965 - RNA, 1410 nt, Artificial Sequence
  derived and/or modified CDS sequence (opt5) from neuraminidase__InfluenzaA__AHL97832
augaaccccaaucagaagaucauuaccaucggcagcgugucccugacaauuucuacgaucugcuucuuuaugcaaauugccauccucaucaccacagucacccugcacuucaaacaguacgaguuugacagcccuccgaacaaucagguuaugcuuugugaacccacaauuaucgagagaaacauuaccgaaaucguguaucugacaaauaccacgauugagaaggaaaucugcccuaaacccgcugaguaccgguccuggucuaagccucagugugggauuaccggauucgcccccuuuagcaaagauaacuccauccgccucucugcgggcggggacaucugggugacaagagagccuuaugucagcugcgauccggacaaguguuaccaauucgcucugggacagggcaccacacuuaauaacgugcauuccaauaacaccguucgggaucgcacgcccuauagaacacugcucaugaaugaacugggggugccuuuucaccugggaaccaagcaggucugcauugccuggucuagcuccagcugucaugacggcaaagccuggcuccacgugugcaucacaggcgaugacaagaacgcuaccgccucuuucauuuacaaugggcggcugguugauuccguggucagcuggucuaaagagauccuucgcacccaggaauccgagugugugugcauuaacggaacauguacgguggucaugaccgacggcagcgcuuccgggaaggccgauacaaaaauccuguuuaucgaggaaggaaagauuguucauaccucuacacucagcggcuccgcgcaacacguggaggaaugcagcugcuaucccagauacccuggggugcggugugucugccgcgacaauuggaagggaucuaacagacccaucguggauauuaacaucaaagaccacuccauuguuagcucuuacguguguagcggccuggucggcgacaccccgcggaagaaugauuccucuagcuccagccauugccuugacccuaacaaugaggaagggggacacggcgugaaagggugggccuucgaugacggaaacgauguuuggaugggccgcacgaucaaugagacaucuagacugggguaugagaccuuuaaggugaucgaaggaugguccaaccccaaaagcaagcuccagauuaaucggcaggucaucguggaccgcggcgauagaucuggcuacuccgggauuuucagcgucgagggaaaauccuguaucaaccggugcuuuuauguggaacugauuagaggccgcaaggaggaaaccgagguucuguggacaucuaauagcaucguggucuucugugggaccuccggaacauacggcacggggucuuggccugacggcgcugaucucaaccugaugcccauuuga

SEQ ID NO: 216966 - RNA, 1410 nt, Artificial Sequence; identical to SEQ ID NO: 214218
  derived and/or modified CDS sequence (opt5) from neuraminidase__InfluenzaA__AHL97844

SEQ ID NO: 216967 - RNA, 1410 nt, Artificial Sequence; identical to SEQ ID NO: 216959
  derived and/or modified CDS sequence (opt5) from neuraminidase__InfluenzaA__AHL97856

SEQ ID NO: 216968 - RNA, 1410 nt, Artificial Sequence; identical to SEQ ID NO: 214218
  derived and/or modified CDS sequence (opt5) from neuraminidase__InfluenzaA__AHL97868

SEQ ID NO: 216969 - RNA, 1410 nt, Artificial Sequence; identical to SEQ ID NO: 215943
  derived and/or modified CDS sequence (opt5) from neuraminidase__InfluenzaA__AHL97880

SEQ ID NO: 216970 - RNA, 1410 nt, Artificial Sequence; identical to SEQ ID NO: 214218
  derived and/or modified CDS sequence (opt5) from neuraminidase__InfluenzaA__AHL97892

SEQ ID NO: 216971 - RNA, 1410 nt, Artificial Sequence; identical to SEQ ID NO: 214218
  derived and/or modified CDS sequence (opt5) from neuraminidase__InfluenzaA__AHL97904

SEQ ID NO: 216972 - RNA, 1410 nt, Artificial Sequence; identical to SEQ ID NO: 215955
  derived and/or modified CDS sequence (opt5) from neuraminidase__InfluenzaA__AHL97916

SEQ ID NO: 216973 - RNA, 1410 nt, Artificial Sequence; identical to SEQ ID NO: 214218
  derived and/or modified CDS sequence (opt5) from neuraminidase__InfluenzaA__AHL97928

SEQ ID NO: 216974 - RNA, 1410 nt, Artificial Sequence; identical to SEQ ID NO: 216934
  derived and/or modified CDS sequence (opt5) from neuraminidase__InfluenzaA__AHL97952

SEQ ID NO: 216975 - RNA, 1410 nt, Artificial Sequence; identical to SEQ ID NO: 214218
  derived and/or modified CDS sequence (opt5) from neuraminidase__InfluenzaA__AHL97964

SEQ ID NO: 216976 - RNA, 1410 nt, Artificial Sequence; identical to SEQ ID NO: 214218
  derived and/or modified CDS sequence (opt5) from neuraminidase__InfluenzaA__AHL97976

SEQ ID NO: 216977 - RNA, 1410 nt, Artificial Sequence; identical to SEQ ID NO: 214218
  derived and/or modified CDS sequence (opt5) from neuraminidase__InfluenzaA__AHL97988

SEQ ID NO: 216978 - RNA, 1410 nt, Artificial Sequence
  derived and/or modified CDS sequence (opt5) from neuraminidase__InfluenzaA__AHL98000
augaaccccaaucagaagaucauuaccaucggcagcgugucccugacaauuucuacgaucugcuucuuuaugcaaauugccauccucaucaccacagucacccugcacuucaaacaguacgaguuuaacagcccuccgaauaaccagguuaugcuuugugaacccacaauuaucgagagaaauauuaccgaaaucguguaucugacaaacaccacgauugagaaggaaaucugcccuaaacccgcugaguaccggaauugguccaagccucagugugggauuaccggauucgcccccuuuucuaaagacaacagcauccgccucuccgcgggcggggauaucugggugacaagagagccuuaugucucuugcgacccggauaaguguuaccaauucgcucugggacagggcaccacacuuaauaacgugcauagcaauaacaccguucgggaccgcacgcccuauagaacacugcucaugaaugaacugggggugccuuuucaccugggaaccaagcaggucugcauugccugguccucuagcuccugucaugauggcaaagccuggcuccacgugugcaucacaggcgacgauaagaacgcuaccgccagcuucauuuacaaugggcggcugguugacucuguggucuccuggagcaaagagauccuucgcacccaugaaucugagugugugugcauuaacggaacauguacgguggucaugaccgauggcuccgcuagcgggaaggccgacacaaaaauccuguuuaucgaggaaggaaagauuguucacaccuccacacucucuggcagcgcgcagcacguggaggaaugcuccugcuaucccagauacccuggggugcggugugucugccgcgauaacuggaagggaagcaauagacccaucguggacauuaacaucaaagaucauucuauuguuuccagcuacguguguucuggccuggucggcgacaccccgcggaagaaagacagcuccucuagcucccacugccuugauccuaauaacgaggaagggggacauggcgugaaggggugggccuucgacgauggaaaugacguuuggaugggccgcacgaucaacgagacaagcagacugggguaugagaccuuuaaagugaucgaaggauggucuaaucccaaguccaaacuccaaauuaaccggcaggucaucguggaucgcggcgacagaagcggcuacucugggauuuucuccgucgagggaaagagcuguaucaaucggugcuuuuauguggaacugauuagaggccgcaaggaggaaaccgagguucuguggacauccaacucuaucguggucuucugugggaccagcggaacauacggcacgggguccuggccugauggcgcugaccucaaucugaugcccauuuga

SEQ ID NO: 216979 - RNA, 1410 nt, Artificial Sequence
  derived and/or modified CDS sequence (opt5) from neuraminidase__InfluenzaA__AHL98012
augaaccccaaucagaagaucauuaccaucggcagcgugucccugacaauuucuacgaucugcuucuuuaugcaaauugccauccucaucaccacagucacccugcacuucaaacaguacgaguuuaacagcccuccgaauaaccagguuaugcuuugugaacccacaauuaucgagagaaauauuaccgaaaucguguaucugacaaacaccacgauugagaaggaaaucugcccuaaacccgcugaguaccggaauugguccaagccucagugugggauuaccggauucgcccccuuuucuaaagacaacagcauccgccucuccgcgggcggggauaucugggugacaagagagccuuaugucucuugcgacccggauaaguguuaccaauucgcucugggacagggcaccacacuuaauaacgugcauagcaauaacaccguucgggaccgcacgcccuauagaacacugcucaugaaugaacugggggugccuuuucaccugggaaccaagcaggucugcauugccugguccucuagcuccugucaugauggcaaagccuggcuccacgugugcaucacaggcgacgauaagaacgcuaccgccagcuucauuuacaaugggcggcugguugacucuguggucuccuggagcaaagaggugcuucgcacccaggaaucugagugugugugcaucaacggaacauguacggucguuaugaccgauggcuccgcuagcgggaaggccgacacaaaaauucuguuuaucgaggaaggaaagaucgugcauaccuccacacucucuggcagcgcgcaacacguggaggaaugcuccugcuaucccagauacccugggguccggugugugugccgcgauaacuggaagggaagcaauagacccauuguugacaucaacauuaaagaucacucuaucguguccagcuacgucuguucuggccuggugggcgacaccccgcggaagaaugacagcuccucuagcucccauugccuugauccuaacaaugaggaaggggaccacggaguuaaaggcugggccuucgaugacgggaacgauguguggaugggacgcacgauuaaugagacaagcagacugggcuaugagaccuuuaaggucaucgaaggguggucuaaccccaaauccaagcuccagaucaaucgccaggugauugucgaccggggagauagaagcggcuacucuggcaucuucuccguggaggggaaaagcuguauuaaccggugcuuuuauguugaacugaucagaggacgcaaggaggaaaccgaggugcuguggacauccaauucuauugucguguucuguggcaccagcgggacauacggaacgggcuccuggccugacggggcugaucucaaccugaugcccaucuga

SEQ ID NO: 216980 - RNA, 1410 nt, Artificial Sequence; identical to SEQ ID NO: 215955
  derived and/or modified CDS sequence (opt5) from neuraminidase__InfluenzaA__AHL98048

SEQ ID NO: 216981 - RNA, 1410 nt, Artificial Sequence; identical to SEQ ID NO: 215955
  derived and/or modified CDS sequence (opt5) from neuraminidase__InfluenzaA__AHL98060

SEQ ID NO: 216982 - RNA, 1410 nt, Artificial Sequence; identical to SEQ ID NO: 215955
  derived and/or modified CDS sequence (opt5) from neuraminidase__InfluenzaA__AHL98072

SEQ ID NO: 216983 - RNA, 1410 nt, Artificial Sequence; identical to SEQ ID NO: 214218
  derived and/or modified CDS sequence (opt5) from neuraminidase__InfluenzaA__AHL98084

SEQ ID NO: 216984 - RNA, 1410 nt, Artificial Sequence; identical to SEQ ID NO: 215955
  derived and/or modified CDS sequence (opt5) from neuraminidase__InfluenzaA__AHL98096

SEQ ID NO: 216985 - RNA, 1410 nt, Artificial Sequence; identical to SEQ ID NO: 214218
  derived and/or modified CDS sequence (opt5) from neuraminidase__InfluenzaA__AHL98119

SEQ ID NO: 216986 - RNA, 1410 nt, Artificial Sequence; identical to SEQ ID NO: 214218
  derived and/or modified CDS sequence (opt5) from neuraminidase__InfluenzaA__AHL98131

SEQ ID NO: 216987 - RNA, 1410 nt, Artificial Sequence; identical to SEQ ID NO: 214218
  derived and/or modified CDS sequence (opt5) from neuraminidase__InfluenzaA__AHL98143

SEQ ID NO: 216988 - RNA, 1410 nt, Artificial Sequence
  derived and/or modified CDS sequence (opt5) from neuraminidase__InfluenzaA__AHL98155
augaaccccaaucagaagaucauuaccaucggcagcgugucccugacaauuucuacgaucugcuucuuuaugcaaauugccauccucaucaccacagucacccugcacuucaaacaguacgaguuuaacagcccuccgaauaaccagguuaugcuuugugaacccacaauuaucgagagaaauauuaccgaaaucguguaucugacaaacaccacgauugagaaggaaaucugcccuaaacccgcugaguaccggaauugguccaagccucagugugggauuaccggauucgcccccuuuucuaaagacaacagcauccgccucuccgcgggcggggauaucugggugacaagagagccuuaugucucuugcgacccggauaaguguuaccaauucgcucugggacagggcaccacacuuaauaacgugcauagcaauaacaccguucgggaccgcacgcccuauagaacacugcucaugaaugaacugggggugccuuuucaccugggaaccaagcaggucugcauugccugguccucuagcuccugucaugauggcaaagccuggcuccacgugugcaucacaggcgacgauaagaacgcuaccgccagcuucauuuacaaugggcggcugguugacucuguggucuccuggagcaaagagauccuucgcacccaggaaucugagugugugugcauuaacggaacauguacgguggucaugaccgauggcuccgcuagcgggaaggccgacacaaaaauccuguuuaucgaggaaggaaagauuguucauaccuccacacucucuggcagcgcgcaacacguggaggaaugcuccugcuaucccagauacccuggggugcggugugucugccgcgauaacuggaagggaagcaauagacccaucguggacauuaacaucaaagaucacucuauuguuuccagcuacguguguucuggccuggucggcgacaccccgcggaagaaugacagcuccucuagcucccauugccuugauccuaacaaugaggaagggggacacggcgugaaagggugggccuucgacgauggaaacgacguuuggaugggccgcacgaucaaugagacaagcagacugggguaugagaccuuuaaggugaucgaaggauggucuaacuccaaaagcaagcuccagauuaaucggcaggucaucguggaucgcggcgacagaucuggcuacuccgggauuuucagcgucgagggaaaauccuguaucaaccggugcuuuuauguggaacugauuagaggccgcaaggaggaaaccgagguucuguggacaucuaauagcaucguggucuucugugggaccuccggaacauacggcacggggucuuggcccgauggcgcugaccucaaccugaugccuauuuga

SEQ ID NO: 216989 - RNA, 1410 nt, Artificial Sequence; identical to SEQ ID NO: 214218
  derived and/or modified CDS sequence (opt5) from neuraminidase__InfluenzaA__AHL98167

SEQ ID NO: 216990 - RNA, 1410 nt, Artificial Sequence; identical to SEQ ID NO: 214218
  derived and/or modified CDS sequence (opt5) from neuraminidase__InfluenzaA__AHL98179

SEQ ID NO: 216991 - RNA, 1410 nt, Artificial Sequence; identical to SEQ ID NO: 214218
  derived and/or modified CDS sequence (opt5) from neuraminidase__InfluenzaA__AHL98191

SEQ ID NO: 216992 - RNA, 1410 nt, Artificial Sequence; identical to SEQ ID NO: 215955
  derived and/or modified CDS sequence (opt5) from neuraminidase__InfluenzaA__AHL98215

SEQ ID NO: 216993 - RNA, 1410 nt, Artificial Sequence
  derived and/or modified CDS sequence (opt5) from neuraminidase__InfluenzaA__AHL98227
augaaccccaaucagaagaucauuaccaucggcagcgugucccugacaauuucuacgaucugcuucuuuaugcaaauugccauccucaucaccacagucacccugcacuucaaacaguacgaguuuaacagcccuccgaauaaccagguuaugcuuugugaacccacaauuaucgagagaaauauuaccgacaucguguaucugacaaacaccacgauugaaaaggagaucugcccuaaacccgcugaauaccggaauugguccaagccucagugugggauuaccggauucgcccccuuuucuaaagauaacagcauccgccucuccgcgggcggggacaucugggugacaagagagccuuaugucucuugcgauccggacaaguguuaccaauucgcucugggacagggcaccacacuuaauaacaugcauagcaauaacaccgugcgggaucgcacgcccuauagaacacugcucaugaaugagcuggggguuccuuuucaccugggaaccaaacaggugugcauugccugguccucuagcuccugucaugacggcaaggccuggcuccacgucugcaucacaggcgaugacaagaacgcuaccgccagcuucauuuacaaugggcggcugguggauucuguuguguccuggagcaaagaaauccuucgcacccaggagucugaaugugucugcauuaacggaacauguacgguggugaugaccgacggcuccgcuagcgggaaggccgauacaaaaauccuguuuaucgaggagggaaagauuguccauaccuccacacucucuggcagcgcgcaacacguugaagagugcuccugcuaucccagauacccuggggugcggugugugugccgcgacaacuggaagggaagcaauagacccaucgucgauauuaacaucaaagaccacucuauuguguccagcuacguuuguucuggccuggugggcgacaccccgcggaagaaugauagcuccucuagcucccauugccuugacccuaacaaugaagaagggggacacggcgucaaagggugggccuucgaugacggaaacgauguguggaugggccgcacgaucaaugagacaagcagacugggguaugagaccuuuaagguuaucgagggauggucuaaccccaaauccaagcuccagauuaaucgccaggugaucgucgaccggggcgauagaagcggcuacucugggauuuucuccguggaaggaaaaagcuguaucaaccggugcuuuuaugucgagcugauuagaggccgcaaggaagagaccgaagugcuguggacauccaauucuaucguuguguucugugggaccagcggaacauacggcacgggguccuggccugacggcgcugaucucaaccugaugcccauuuga

SEQ ID NO: 216994 - RNA, 1410 nt, Artificial Sequence; identical to SEQ ID NO: 214218
  derived and/or modified CDS sequence (opt5) from neuraminidase__InfluenzaA__AHL98239

SEQ ID NO: 216995 - RNA, 1410 nt, Artificial Sequence; identical to SEQ ID NO: 214218
  derived and/or modified CDS sequence (opt5) from neuraminidase__InfluenzaA__AHL98251

SEQ ID NO: 216996 - RNA, 1410 nt, Artificial Sequence; identical to SEQ ID NO: 215966
  derived and/or modified CDS sequence (opt5) from neuraminidase__InfluenzaA__AHL98263

SEQ ID NO: 216997 - RNA, 1410 nt, Artificial Sequence; identical to SEQ ID NO: 214218
  derived and/or modified CDS sequence (opt5) from neuraminidase__InfluenzaA__AHL98275

SEQ ID NO: 216998 - RNA, 1410 nt, Artificial Sequence; identical to SEQ ID NO: 216864
  derived and/or modified CDS sequence (opt5) from neuraminidase__InfluenzaA__AHL98287

SEQ ID NO: 216999 - RNA, 1410 nt, Artificial Sequence
  derived and/or modified CDS sequence (opt5) from neuraminidase__InfluenzaA__AHL98298
augaaccccaaucagaagaucauuaccaucggcagcgugucccugacaauuucuacgaucugcuucuuuaugcaaauugccauccucaucaccacagucacccugcacuucaaacaguacgaguuuaacagcccuccgaauaaccagguuaugcuuugugaacccacaauuaucgggagaaauauuaccgagaucguguaucugacaaacaccacgauugaaaaggagaucugcccuaaacccgcugaauaccggaauugguccaagccucaguguggaauuaccggcuucgcccccuuuucuaaagacaacagcauccgccucuccgcugggggagauaucugggugacaagagagccuuaugucucuugcgacccggauaaguguuaccaauucgcgcugggccaggggaccacacuuaauaacgugcauagcaauaacaccguucgggaccgcacgcccuauagaacacugcucaugaaugagcugggagugccuuuucaccugggcaccaagcaggucugcauugccugguccucuagcuccugucaugauggcaaagccuggcuccacgugugcaucacaggggacgauaagaacgcuaccgccagcuucauuuacaauggacggcugguugacucuguggucuccuggagcaaagaaauccuucgcacccaggagucugaaugugugugcauuaacggcacauguacgguggucaugaccgauggguccgcuagcggaaaggccgacacaaaaauccuguuuaucgaggagggcaagauuguucauaccuccacacucucugggagcgcgcaacacguggaagagugcuccugcuaucccagauacccuggagugcggugugucugccgcgauaacuggaagggcagcaauagacccaucguggacauuaacaucaaagaucacucuauuguuuccagcuacguguguucuggccuggucggggacaccccgcggaagaaugacagcuccucuagcucccauugccuugauccuaacaaugaagagggaggccacggggugaaaggaugggccuucgacgauggcaacgacguuuggauggggcgcacgaucaaugaaacaagcagacugggauaugagaccuuuaaggugaucgagggcuggucuaaccccaaauccaagcuccagauuaaucggcaggucaucguggaucgcggcgacagaagcggguacucuggaauuuucuccgucgaaggcaaaagcuguaucaaccggugcuuuuauguggagcugauuagagggcgcaaggaagagaccgaaguucuguggacauccaauucuaucguggucuucuguggaaccagcggcacauacgggacgggcuccuggccugauggagcugaccucaaccugaugcccauuuga

SEQ ID NO: 217000 - RNA, 1410 nt, Artificial Sequence; identical to SEQ ID NO: 214218
  derived and/or modified CDS sequence (opt5) from neuraminidase__InfluenzaA__AHL98310

SEQ ID NO: 217001 - RNA, 1410 nt, Artificial Sequence; identical to SEQ ID NO: 214218
  derived and/or modified CDS sequence (opt5) from neuraminidase__InfluenzaA__AHL98322

SEQ ID NO: 217002 - RNA, 1410 nt, Artificial Sequence
  derived and/or modified CDS sequence (opt5) from neuraminidase__InfluenzaA__AHL98334
augaaccccaaucagaagaucauuaccaucggcagcgugucccugacaauuucuacgaucugcuucuuuaugcaaauugccauccucaucaccacagucacccugcacuucaaacaguacgaguuuaacagcccuccgaauaaccagguuaugcuuugugaacccacaauuaucgagagaaauauuaccgaagugguguaucugacaaacaccacgaucgagaaggaaauuugcccuaaacccgcugaguaccggaauugguccaagccucagugugggaucaccggauucgcccccuuuucuaaagacaacagcauucgccucuccgcgggcggggauaucugggucacaagagagccuuaugugucuugcgacccggauaaguguuaccaauucgcucugggacagggcaccacacuuaauaacguucauagcaauaacaccgugcgggaccgcacgcccuauagaacacugcucaugaaugaacugggggucccuuuucaccugggaaccaaacaggugugcaucgccugguccucuagcuccugucaugauggcaaggccuggcuccacguuugcauuacaggcgacgauaagaacgcuaccgccagcuucaucuacaaugggcggcugguggacucugucguguccuggagcaaagagauucuucgcacccaggaaucugagugugugugcaucaacggaacauguacggucguuaugaccgauggcuccgcuagcgggaaggccgacacaaaaauucuguuuaucgaggaaggaaagaucgugcauaccuccacacucucuggcagcgcgcaacacguggaggaaugcuccugcuaucccagauacccugggguccggugugugugccgcgauaacuggaagggaagcaauagacccauuguugacaucaacauuaaagaucacucuaucguguccagcuacgucuguucuggccuggugggcgacaccccgcggaagaaugacagcuccucuagcucccauugccuugauccuaacaaugaggaagggggacacggcguuaaagggugggccuucgacgauggaaacgacguguggaugggccgcacgauuaaugagacaagcagacugggguaugagaccuuuaaggucaucgaaggauggucuaaccccaaauccaagcuccagaucaaucgccaggugauugucgaucggggcgacagaagcggcuacucugggaucuucuccguggagggaaaaagcuguauuaaccggugcuuuuauguugaacugaucagaggccgcaaggaggaaaccgaggugcuguggacauccaauucuauugucguguucugugggaccagcggaacauacggcacgggguccuggccugauggcgcugaccucaaccugaugcccaucuga

SEQ ID NO: 217003 - RNA, 1410 nt, Artificial Sequence
  derived and/or modified CDS sequence (opt5) from neuraminidase__InfluenzaA__AHL98346
augaaccccaaucagaagaucauuaccaucggcagcgugucccugacaauuucuacgaucugcuucuuuaugcaaauugccauccucaucaccacagucacccugcacuucaaacaguacgaguuugacagcccuccgaacaaucagguuaugcuuugugaacccacaauuaucgagagaaacauuaccgaaaucguguaucugacaaauaccacgauugagaaggaaaucugcccuaaacccgcugaguaccggaacugguccaagccucagugugggauuaccggauucgcccccuuuucuaaagauaauagcauccgccucuccgcgggcggggacaucugggugacaagagagccuuaugucucuugcgauccggacaaguguuaccaauucgcucugggacagggcaccacacuuaacaaugugcauagcaacaauaccguucgggaucgcacgcccuauagaacacugcucaugaacgaacugggggugccuuuucaccugggaaccaagcaggucugcauugccugguccucuagcuccugucaugacggcaaagccuggcuccacgugugcaucacaggcgaugacaagaaugcuaccgccagcuucauuuacaacgggcggcugguugauucuguggucuccuggagcaaagagauccuucgcacccaggaaucugagugugugugcauuaauggaacauguacgguggucaugaccgacggcuccgcuagcgggaaggccgauacaaaaauccuguuuaucgaggaaggaaagauuguucauaccuccacacucucuggcagcgcgcaacacguggaggaaugcuccugcuaucccagauacccuggggugcggugugucugccgcgacaacuggaagggaagcaacagacccaucguggauauuaauaucaaagaccacucuauuguuuccagcuacguguguucuggccuggucggcgacaccccgcggaagaacgauagcuccucuagcucccauugccuugacccuaauaacgaggaagggggacacggcgugaaagggugggccuucgaugacggaaaugauguuuggaugggccgcacgaucaacgagacaagcagacugggguaugagaccuuuaaggugaucgaaggauggucuaaucccaaauccaagcuccagauuaaccggcaggucaucguggaccgcggcgauagaagcggcuacucugggauuuucuccgucgagggaaaaagcuguaucaaucggugcuuuuauguggaacugauuagaggccgcaaggaggaaaacgagguucuguggaccuccaauucuaucguggucuucugugggacaagcggaaccuacggcacaggguccuggccugacggcgcugaucucaaccugaugcccauuuga

SEQ ID NO: 217004 - RNA, 1410 nt, Artificial Sequence; identical to SEQ ID NO: 214218
  derived and/or modified CDS sequence (opt5) from neuraminidase__InfluenzaA__AHL98357

SEQ ID NO: 217005 - RNA, 1410 nt, Artificial Sequence; identical to SEQ ID NO: 215966
  derived and/or modified CDS sequence (opt5) from neuraminidase__InfluenzaA__AHL98369

SEQ ID NO: 217006 - RNA, 1410 nt, Artificial Sequence
  derived and/or modified CDS sequence (opt5) from neuraminidase__InfluenzaA__AHL98381
augaaccccaaucagaagaucauuaccaucggcagcgugucccugacaauuucuacgaucugcuucuuuaugcaaauugccauccucaucaccacagucacccugcacuucaaacaguacgaguuuaacagcccuccgaauaaccagguuaugcuuugugaacccacaauuaucgagagaaauauuaccgaaaucguguaucugacaaacaccacgauugagaaggaaaucugcccuaaacccgcugaguaccggaauugguccaagccucagugugggauuaccggauucgcccccuuuucuaaagacaacagcauccgccucuccgcgggcggggauaucugggugacaagagagccuuaugucucuugcggaccggacaaguguuaccaauucgcucugggccaggggaccacacuuaauaacaugcauagcaauaacaccgugcgggaucgcacgcccuauagaacacugcucauguccgaacugggaguuccuuuucaccugggcaccaaacaggugugcauugccuggucuagcuccagcugucaugacggcaaggccuggcuccacgucugcaucacaggggaugacaagaaugcuaccgccucuuucauuuacaacggacggcugguggauuccguugugagcuggucuaaagagauccuucgcacccaggaauccgagugugucugcauuaauggcacauguacgguggugaugaccgacgggagcgcuuccggaaaggccgauacaaaaauccuguuuaucgaggaaggcaagauuguccauaccucuacacucagcggguccgcgcaacacguugaggaaugcagcugcuaucccagauacccuggagugcggugugugugccgcgacaacuggaagggcucuaacagacccaucgucgauauuaauaucaaagaccacuccaccgugagcucuuacguuuguagcggccuggugggggauacgccgcggaagaacgacuccucuagcuccagccauugccuugacccuaauaacgaggaaggaggccacggggucaaaggaugggccuucgaugacggcaaugauguguggauggggcgcacaauuaacgagaccucuagacugggauaugagaccuuuaagguuaucgaaggcugguccaaucccaaaagcaagcuccagaucaaccgccaggugauugucgaccggggcgauagaucuggguacuccggaaucuucagcguggagggcaaauccuguauuaaucggugcuuuuaugucgaacugaucagagggcgcaaggaggaaacagaggugcuguggaccucuaacagcauuguuguguucuguggaacauccggcacguacgggaccggcucuuggccugacggagcugaucucaaucugaugcccaucuga

SEQ ID NO: 217007 - RNA, 1410 nt, Artificial Sequence
  derived and/or modified CDS sequence (opt5) from neuraminidase__InfluenzaA__AHL98393
augaaccccaaucagaagaucauuaccaucggcagcgugucccugacaauuucuacgaucugcuucuuuaugcaaauugccauccucaucaccacagucacccugcacuucaaacaguacgaguuuaacagcccuccgaauaaccagaugaugcuuugugaacccacaauuaucgagagaaauauuaccgaaaucguuuaucugacaaacaccacgauugagaaggaaaucugcccuaaacccgcugaguaccggaauugguccaagccucagugugggauuaccggauucgcccccuuuucuaaagacaacagcauccgccucuccgcgggcggggauaucugggugacaagagagccuuaugugucuugcggaccggacaaguguuaccaauucgcucugggccaggggaccacacuuaauaacaugcauagcaauaacaccguccgggaucgcacgcccuauagaacacugcucaugaaugaacugggagugccuuuucaccugggcaccaagcagguuugcauugccugguccucuagcuccugucaugacggcaaagccuggcuccacgugugcaucacaggggaugacaagaacgcuaccgccagcuucauuuacaauggacggcuggucgauucugugguuuccuggagcaaagagauccuucgcacccaggaaucugagugugugugcauuaacggcacauguacggucgugaugaccgacggguccgcuagcggaaaggccgauacaaaaauccuguuuaucgaggaaggcaagauugugcauaccuccacacucucugggagcgaccaacacaucgaggaaugcuccugcuaucccagauacccuggaguccgguguguuugccgcgauaacuggaagggcagcaauagacccauuguggacaucaacauuaaagaucacucuaucguguccagcuacgucuguucuggccuggugggggacaccccgcggaagaaugacagcuccucuagcucccauugccuugauccuaacaaugaggaaggaggccacgggguuaaaggaugggcguucgacgauggcaacgacguguggauggggcgcacgaucaaugagacaagcagacugggauaugagaccuuuaaggucauugaaggcuggucuaaccccaaauccaagcuccagaucaaucgccaggugauuguugaucggggcgacagaagcggguacucuggaaucuucuccguggagggcaaaagcuguauuaaccggugcuuuuaugucgaacugaucagagggcgcaaggaggaaaccgaggugcuguggacauccaauucuauugucguguucuguggaaccagcggcacauacgggacgggcuccuggccugauggagccgaccucaaccugaugcccaucuga

SEQ ID NO: 217008 - RNA, 1410 nt, Artificial Sequence; identical to SEQ ID NO: 214218
  derived and/or modified CDS sequence (opt5) from neuraminidase__InfluenzaA__AHL98405

SEQ ID NO: 217009 - RNA, 1410 nt, Artificial Sequence; identical to SEQ ID NO: 214218
  derived and/or modified CDS sequence (opt5) from neuraminidase__InfluenzaA__AHL98417

SEQ ID NO: 217010 - RNA, 1410 nt, Artificial Sequence; identical to SEQ ID NO: 214218
  derived and/or modified CDS sequence (opt5) from neuraminidase__InfluenzaA__AHL98429

SEQ ID NO: 217011 - RNA, 1410 nt, Artificial Sequence
  derived and/or modified CDS sequence (opt5) from neuraminidase__InfluenzaA__AHL98452
augaaccccacccagaagaucauuacaaucggcagcgugugcaugacgauugggauggccaaucugauccuccaaauuggaaacaucaucuccauuuggaucucucacagcauucagcugggcaaucagucccagaucgagaccuguaaccaaucugucauuacauacgaaaauaacaccuggguuaaucagacauaugugaacaucagcaauaccaacuucgcugccgggcaguccguggucucugugaaacuugcgggaaauagcucccugugcccuguuagcggcugggcuauuuacucuaaggacaacuccgugagaaucgggagcaaaggagaugucuuugugauccgggagccguucauuucuuguagcccccucgaaugccgcacauuuuuccugacccagggcgcccuucugaaugacaagcauuccaacggcacgaucaaagauagaucuccuuaucggacccucauguccugucccauuggggagguuccuagccccuacaauucccgcuuugaaucuguggccuggagcgcuuccgccugccacgacggaaucaacuggcugacaauuggcaucagcgggccugauucuggagcugucgccgugcugaaguauaacggcaucauuaccgacacaaucaaguccuggaaaaauaacauucucagaacccaagagagcgagugugcgugcgugaaugggucuuguuucacgaucaugacagauggaccgagcgacggccaggccuccuacaagauuuuucggaucgaaaaaggcaagaucgucaaaucuguugagaugaacgcucccaauuaucauuacgaagagugcagcuguuacccugauuccagcgagauuaccugcgugugccgcgacaacuggcacgggucuaauagacccuggguguccuucaaccagaaucuggaauaucagaucggauacauuuguagcggcgucuuuggggauaacccucggcccaaugacaagacaggaucuugcggcccgguguccagcaacggggccaauggaguuaagggcuucuccuuuaaauauggcaacgggguguggaucggacgcaccaagucuauuagcuccagaaaaggcuucgagaugaucugggauccuaauggguggaccggaacagacaacaacuuuucuauuaagcaagacaucgucggcaucaaugaauggagcggguacuccggcagcuucgugcagcaucccgagcuuacgggacuggauuguauucggccuugcuucuggguugaacucauccgcggcagacccaaagagaacaccauuuggacaucuggguccagcaucucuuuuuguggagucaauuccgacaccgugggcuggagcuggcccgauggggcugagcugccuuucacaauugacaaguga

SEQ ID NO: 217012 - RNA, 1410 nt, Artificial Sequence
  derived and/or modified CDS sequence (opt5) from neuraminidase__InfluenzaA__AHL98474
augaaccccaaucagaagaucauuaccaucggcagcgugugcaugacaauugggauggccaaccugauccuccaaauuggaaauaucaucuccauuuggaucucucacagcauucagcugggcaaccagucccagaucgagacguguaaucaaucugucauuaccuacgaaaacaauacauggguuaaccagaccuaugugaauaucagcaacacaaauuucgcugccgggcaguccguggucucugugaaacuugcgggaaacagcucccugugcccuguuagcggcugggcuauuuacucuaaggacaauuccgugagaaucgggagcaaaggagaugucuuugugauccgggagccguucauuucuuguagcccccucgaaugccgcaccuuuuuccugacacagggcgcccuucugaacgacaagcauuccaauggcaccaucaaagauagaucuccuuaucggacgcucauguccugucccauuggggagguuccuagccccuacaacucccgcuuugaaucuguggccuggagcgcuuccgccugccacgacggaaucaacuggcugaccauuggcaucagcgggccuaauucuggagcugucgccgugcugaaguauaacggcaucauuacagauaccaucaaguccuggagaaauaacauucuccggacacaagagagcgagugugcgugcgugaaugggucuuguuucaccaucaugacggacggaccgagcgauggccaggccuccuacaaaauuuuucgcaucgaaaagggcaaaaucgucaagucuguugagaugaacgcucccaauuaucauuacgaagagugcagcuguuacccugacuccagcgagauuacaugcgugugcagagauaacuggcacgggucuaaucggcccuggguguccuucaaccagaaucuggaauaucagaucggauacauuuguagcggcgucuuuggggacaacccucgccccaaugauaaaaccggaucuugcggcccgguguccagcaacggggccaauggaguuaagggcuucuccuuuaaguauggcaacgggguguggaucggaagaacaaaaucuauuagcucccggaagggcuucgagaugaucugggacccuaacggguggaccggaaccgauaauaacuuuucuauuaaacaagacaucgucggcaucaaugaauggagcggguacuccggcagcuucgugcagcaucccgagcuuacaggacuggacuguauucgcccuugcuucuggguugaacucaucagaggccggcccaaggagaacacgauuuggaccucuggguccagcaucucuuuuuguggagucaauuccgauacagugggcuggagcuggcccgacggggcugagcugccuuucaccauugauaaauga

SEQ ID NO: 217013 - RNA, 1410 nt, Artificial Sequence
  derived and/or modified CDS sequence (opt5) from neuraminidase__InfluenzaA__AHL98485
augaaccccaaucagaagaucauuaccaucggcagcgugucccugacaauuucuacgaucugcuucuuuaugcaaauugccauccucaucaccacagucacccugcacuucaaacaguacgaguuuaacagcccuccgaauaaccagguuaugcuuugugaacccacaauuaucgagagaaauauuaccgaaaucguguaucugacaaacaccacgauugagaaggaaaucugcccuaaacccgcugaguaccggaauugguccaagccucagugugggauuaccggauucgcccccuuuucuaaagacaacagcauccgccucuccgcgggcggggauaucugggugacaagagagccuuaugucucuugcgacccggauaaguguuaccaauucgcucugggacagggcaccacacuuaauaacgugcauagcaauaacaccguucgggaccgcacgcccuauagaacacugcucaugaaugaacugggggugccuuuucaccugggaaccaagcaggucugcauugccugguccucuagcuccugucaugauggcaaagccuggcuccacgugugcaucacaggcgacgauaagaacgcuaccgccagcuucauuuacaaugggcggcugguugacucuguggucuccuggagcaaagagauccuucgcacccaggaaucugagugugugugcauuaacggaacauguacgguggucaugaccgauggcuccgcuagcgggaaggccgacacaaaaauccuguuuaucgaggaaggaaagauuguucauaccuccauccucucuggcagcgcgcaacacguggaggaaugcuccugcuaucccagauacccuggggugcggugugucugccgcgauaacuggaagggaagcaauagacccauuguggacaucaacauuaaagaucacucuaucguuuccagcuacguguguucuggccuggucggcgacacaccgcggaagaaugacagcuccucuagcucccauugccuugauccuaacaaugaggaagggggacacggcgugaaagggugggccuucgacgauggaaacgacguuuggaugggccgcaccaucaaugagacgagcagacugggguaugagacauuuaaggugauugaaggauggucuaaccccaaauccaagcuccagaucaaucggcaggucauuguggaucgcggcgacagaagcggcuacucugggaucuucuccgucgagggaaaaagcuguauuaaccggugcuuuuauguggaacugaucagaggccgcaaggaggaaaccgagguucuguggaccuccaauucuauuguggucuucugugggacaagcggaaccuacggcacaggguccuggccugauggcgcugaccucaaccugaugcccaucuga

SEQ ID NO: 217014 - RNA, 1410 nt, Artificial Sequence; identical to SEQ ID NO: 215447
  derived and/or modified CDS sequence (opt5) from neuraminidase__InfluenzaA__AHL98497

SEQ ID NO: 217015 - RNA, 1410 nt, Artificial Sequence; identical to SEQ ID NO: 214218
  derived and/or modified CDS sequence (opt5) from neuraminidase__InfluenzaA__AHL98509

SEQ ID NO: 217016 - RNA, 1410 nt, Artificial Sequence; identical to SEQ ID NO: 214218
  derived and/or modified CDS sequence (opt5) from neuraminidase__InfluenzaA__AHL98521

SEQ ID NO: 217017 - RNA, 1410 nt, Artificial Sequence; identical to SEQ ID NO: 215447
  derived and/or modified CDS sequence (opt5) from neuraminidase__InfluenzaA__AHL98533

SEQ ID NO: 217018 - RNA, 1410 nt, Artificial Sequence; identical to SEQ ID NO: 214218
  derived and/or modified CDS sequence (opt5) from neuraminidase__InfluenzaA__AHL98545

SEQ ID NO: 217019 - RNA, 1410 nt, Artificial Sequence; identical to SEQ ID NO: 214218
  derived and/or modified CDS sequence (opt5) from neuraminidase__InfluenzaA__AHL98557

SEQ ID NO: 217020 - RNA, 1410 nt, Artificial Sequence; identical to SEQ ID NO: 214218
  derived and/or modified CDS sequence (opt5) from neuraminidase__InfluenzaA__AHL98569

SEQ ID NO: 217021 - RNA, 1410 nt, Artificial Sequence
  derived and/or modified CDS sequence (opt5) from neuraminidase__InfluenzaA__AHL98581
augaaccccaaucagaagaucauuaccaucggcagcgugucccugacaauuucuacgaucugcuucuuuaugcaaauugccauccucaucaccacagucacccugcacuucaaacaguacgaguuuaacagcccuccgaauaaccagguuaugcuuugugaacccacaauuaucgagagaaauauuaccgaaaucguguaucugacaaacaccacgauugagaaggaaaucugcccuaaacccgcugaguaccggaauugguccaagccucagugugggauuaccggauucgcccccuuuucuaaagacaacagcauccgccucuccgcgggcgggaauaucugggugacaagagagccuuaugucucuugcgauccggacaaguguuaccaauucgcucugggacagggcaccacacuuaacaaugugcauagcaacaauaccguucgggaucgcacgcccuauagaacacugcucaugaacgaacugggggugccuuuucaccugggaaccaagcaggucugcauugccugguccucuagcuccugucaugacggcaaagccuggcuccacgugugcaucacaggcgaugacaagaaugcuaccgccagcuucauuuacaacgggcggcugguugauucuguggucuccuggagcaaagagauccuucgcacccaggaaucugagugugugugcauuaacggaacauguacgguggucaugaccgacggcuccgcuagcgggaaggccgauacaaaaauccuguuuaucgaggaaggaaagauuguucauaccuccacacucucuggcagcgcgcaacacguggaggaaugcuccugcuaucccagauacccuggggugcggugugucugccgcgacaauuggaagggaagcaacagacccaucguggauauuaauaucaaagaccacucuauuguuuccagcuacguguguucuggccuggucggcgauaccccgcggaagaacgacagcuccucuagcucccauugccuugacccuaauaacgaggaagggggacacggcgugaaagggugggccuucgaugacggaaaugauguuuggaugggccgcacgaucaacgagacaagcagacugggguaugagaccuuuaaggugaucgaaggauggucuaaucccaaauccaagcuccagauuaaccggcaggucaucguggaccgcggcgauagaagcggcuacucugggauuuucuccgucgagggaaaaagcuguaucaaucggugcuuuuauguggaacugauuagaggccgcaaggaggaaaccgagguucuguggacauccaacucuaucguggucuucugugggaccagcggaacauacggcacgggguccuggccugacggcgcugaucucaaucugaugcccauuuga

SEQ ID NO: 217022 - RNA, 1410 nt, Artificial Sequence; identical to SEQ ID NO: 214218
  derived and/or modified CDS sequence (opt5) from neuraminidase__InfluenzaA__AHL98593

SEQ ID NO: 217023 - RNA, 1410 nt, Artificial Sequence; identical to SEQ ID NO: 215955
  derived and/or modified CDS sequence (opt5) from neuraminidase__InfluenzaA__AHL98605

SEQ ID NO: 217024 - RNA, 1410 nt, Artificial Sequence; identical to SEQ ID NO: 215447
  derived and/or modified CDS sequence (opt5) from neuraminidase__InfluenzaA__AHL98617

SEQ ID NO: 217025 - RNA, 1410 nt, Artificial Sequence; identical to SEQ ID NO: 215447
  derived and/or modified CDS sequence (opt5) from neuraminidase__InfluenzaA__AHL98629

SEQ ID NO: 217026 - RNA, 1410 nt, Artificial Sequence; identical to SEQ ID NO: 214218
  derived and/or modified CDS sequence (opt5) from neuraminidase__InfluenzaA__AHL98641

SEQ ID NO: 217027 - RNA, 1410 nt, Artificial Sequence; identical to SEQ ID NO: 216796
  derived and/or modified CDS sequence (opt5) from neuraminidase__InfluenzaA__AHL98653

SEQ ID NO: 217028 - RNA, 1410 nt, Artificial Sequence; identical to SEQ ID NO: 214218
  derived and/or modified CDS sequence (opt5) from neuraminidase__InfluenzaA__AHL98665

SEQ ID NO: 217029 - RNA, 1410 nt, Artificial Sequence
  derived and/or modified CDS sequence (opt5) from neuraminidase__InfluenzaA__AHL98677
augaaccccaaucagaagaucauuaccaucggcagcgugucccugacaauuucuacgaucugcuucuuuaugcaaauugccauccucaucaccacagucacccugcacuucaaacaguacgaguuuaacagcccuccgaauaaccagguuaugcuuugugaacccacaauuaucgagagaaauauuaccgaaaucguguaucugacaaacaccacgauugagaaggaaaucugcccuaaacccgcugaguaccggaauugguccaagccucagugugggauuaccggauucgcccccuuuucuaaagacaacagcauccgccucuccgcgggcggggauaucugggugacaagagagccuuaugucucuugcgacccggauaaguguuaccaauucgcucugggacagggcaccacacuuaauaacgugcauagcaauaacaccguucgggaccgcacgccccacagaacacugcucaugaaugaacugggggugccuuuucaucugggaaccaagcaggucugcauugccugguccucuagcuccugucacgauggcaaagccuggcuccaugugugcaucacaggcgacgauaagaacgcuaccgccagcuucauuuauaaugggcggcugguugacucuguggucuccuggagcaaagagauccuucgcacccaggaaucugagugugugugcauuaacggaacauguacgguggucaugaccgauggcuccgcuagcgggaaggccgacacaaaaauccuguuuaucgaggaaggaaagauuguucacaccuccacacucucuggcaacgcgcaacacguggaggaaugcagcugcuaccccagauauccuggggugcggugugucugccgcgauaauuggaagggauccaacagacccaucguggacauuaauaucaaagaucauagcauuguuucuuccuacguguguagcggccuggucggcgacaccccgcggaagaacgacucuagcuccucuagccacugccuugauccuaauaacgaggaagggggacauggcgugaaagggugggccuucgacgauggaaaugacguuuggaugggccgcacgaucaacgagacauccagacugggguacgagaccuuuaaggugaucgaaggauggagcaaucccaaaucuaagcuccagauuaaccggcaggucaucguggaucgcggcgacagauccggcuauagcgggauuuucucugucgagggaaaauccuguaucaaucggugcuuuuacguggaacugauuagaggccgcaaggaggaaaccgagguucuguggacaagcaacuccaucguggucuucugugggaccucuggaacauauggcacggggagcuggccugauggcgcugaccucaaucugaugcccauuuga

SEQ ID NO: 217030 - RNA, 1410 nt, Artificial Sequence; identical to SEQ ID NO: 215966
  derived and/or modified CDS sequence (opt5) from neuraminidase__InfluenzaA__AHL98689

SEQ ID NO: 217031 - RNA, 1410 nt, Artificial Sequence
  derived and/or modified CDS sequence (opt5) from neuraminidase__InfluenzaA__AHL98702
augaaccccaaucagaagaucauuaccaucggcagcgugucccugacaauuucuacgaucugcuucuuuaugcaaauugccauccucaucaccacagucacccugcacuucaaacaguacgaguuugacagcccuccgaacaaucagguuaugcuuugugaacccacaauuaucgagagaaacauuaccgaaaucguguaucugacaaauaccacgauugagaaggaaaucugcccuaaacccgcugaguaccggaacugguccaagccucagugugggauuaccggauucgcccccuuuucuaaagauaauagcauccgccucuccgcgggcggggacaucugggugacaagagagccuuaugucucuugcgauccggacaaguguuaccaauucgcucugggacagggcaccacacuuaacaaugggcauagcaacaauaccgugcgggaucgcacgcccuauagaacacugcucaugaacgaacugggaguuccuuuucaccugggcaccaaacaggugugcauugccugguccucuagcuccugucaugacggcaaggccuggcuccacgucugcaucacaggggaugacaagaaugcuaccgccagcuucauuuacaacggacggcugguggauucuguuguguccuggagcaaagagauccuucgcacccaggaaucugagugugucugcauuaauggcacauguacgguggugaugaccgacggguccgcuagcggaaaggccgauacaaaaauccuguuuaucgaggaaggcaagauuguccauaccuccacacucucugggagcgcgcaacacguugaggaaugcuccugcuaucccagauacccuggagugcggugugugugccgcgacaacuggaagggcagcaacagacccaucgucgauauuaauaucaaagaccacucuauuguguccagcuacguuuguucuggccuggugggggacaccccgcggaagaacgauagcuccucuagcucccauugccuugacccuaauaacgaggaaggaggccacggggucaaaggaugggccuucgaugacggcaaugauguguggauggggcgcacgaucaacgagacaagcagacugggauaugagaccuuuaagguuaucgaaggcuggucuaaucccaaauccaagcuccagauuaaccgccaggugaucgucgaccggggcgauagaagcggguacucuggaauuuucuccguggagggcaaaagcuguaucaaucggugcuuuuaugucgaacugauuagagggcgcaaggaggaaaccgaggugcuguggacauccaacucuaucguuguguucuguggaaccagcggcacauacgggacgggcuccuggccugacggagcugaucucaaucugaugcccauuuga

SEQ ID NO: 217032 - RNA, 1410 nt, Artificial Sequence; identical to SEQ ID NO: 215461
  derived and/or modified CDS sequence (opt5) from neuraminidase__InfluenzaA__AHL98714

SEQ ID NO: 217033 - RNA, 1410 nt, Artificial Sequence
  derived and/or modified CDS sequence (opt5) from neuraminidase__InfluenzaA__AHL98725
augaaccccaaucagaagaucauuaccaucggcagcgugucccugacaauuucuacgaucugcuucuuuaugcaaauugccauccucaucaccacagucacccugcacuucaaacaguacgaguuuaacagcccuccgaauaaccagguuaugcuuugugaacccacaauuaucgagagaaauauuaccgaaaucguguaucugacaaacaccacgauugagaaggaaaucugcccuaaacccgcugaguaccggaauugguccaagccucagugugggauuaccggauucgcccccuuuucuaaagacaacagcauccgccucuccgcgggcgggggaaucugggugacaagagagccuuaugucucuugcgauccggacaaguguuaccaauucgcucugggccaggggaccacacuuaauaacgugcauagcaauaacaccguucgggaucgcacgcccuauagaacacugcucaugaaugaacugggagugccuuuucaccugggcaccaagcaggucugcauugccugguccucuagcuccugucaugacggcaaagccuggcuccacgugugcaucacaggggaugacaagaacgcuaccgccagcuucauuuacaauggacggcugguugauucuguggucuccuggagcaaagagauccuucgcacccaggaaucugagugugugugcauuaacggcacauguacgguggucaugaccgacgggaacgcuuccggaaaggccgauacaaaaauccuguuuaucgaggaaggcaagauuguucauaccagcacacucuccgggucugcgcaacacguggaggaaugcagcugcuaucccagauacccuggagugcggugugucugccgcgacaauuggaagggcuccaacagacccaucguggauauuaauaucaaagaccacagcauuguuucuuccuacguguguagcggccuggucggggauaccccgcggaagaacgacucuagcuccucuagccauugccuugacccuaauaacgaggaaggaggccacggggugaaaggaugggccuucgaugacgagaaugauguuuggaugggccgcacgaucaacgagacauccagacugggguaugaaaccuuuaaggugaucgagggauggagcaaucccaaaucuaagcuccagauuaaccggcaggucaucguggaccgcggcaauagauccggcuacagcgggauuuucucugucgaaggaaaauccuguaucaaccggugcuuuuauguggagcugauuagaggccgcaaggaagagaccgagguucuguggacaagcaauuccaucguggucuucugugggaccucuggaacauacggcacggggagcuggccugauggcgcugaccucaaccugaugcccauuuga

SEQ ID NO: 217034 - RNA, 1410 nt, Artificial Sequence; identical to SEQ ID NO: 215955
  derived and/or modified CDS sequence (opt5) from neuraminidase__InfluenzaA__AHL98737

SEQ ID NO: 217035 - RNA, 1410 nt, Artificial Sequence; identical to SEQ ID NO: 215943
  derived and/or modified CDS sequence (opt5) from neuraminidase__InfluenzaA__AHL98749

SEQ ID NO: 217036 - RNA, 1410 nt, Artificial Sequence; identical to SEQ ID NO: 215955
  derived and/or modified CDS sequence (opt5) from neuraminidase__InfluenzaA__AHL98761

SEQ ID NO: 217037 - RNA, 1410 nt, Artificial Sequence
  derived and/or modified CDS sequence (opt5) from neuraminidase__InfluenzaA__AHL98773
augaaccccaaucagaagaucauuaccaucggcagcgugucccugacaauuucuacgaucugcuucuuuaugcaaauugccauccucaucaccacagucacccugcacuucaaacaguacgaguuuaacagcccuccgaauaaccagguuaugcuuugugaacccacaauuaucgagagaaauauuaccgaaaucguguaucugacaaacaccacgauugagaaggaaaucugcccuaaacccgcugaguaccggaauugguccaagccucagugugggauuaccggauucgcccccuuuucuaaagacaacagcauccgccucuccgcgggcgggaauaucugggugacaagagagccuuaugucucuugcgauccggacaaguguuaccaauucgcucugggacagggcaccacacuuaacaaugugcauagcaacaauaccgcccgggaucgcacgcccuauagaacacugcucaugaacgaacuggggguuccuuuucaccugggaaccaaacaggugugcauugccugguccucuagcuccugucaugacggcaaggcuuggcuccacgucugcaucacaggcgaugacaagaaugccaccgcuagcuucauuuacaacgggcggcugguggauucuguuguguccuggagcaaagagauccuucgcacccaggaaucugagugugucugcauuaacggaacauguacgguggugaugaccgacggcuccgccagcgggaaggcggauacaaaaauccuguuuaucgaggaaggaaagauuguccauaccuccacacucucuggcagcgcccaacacguugaggaaugcuccugcuaucccagauacccuggggugcggugugugugccgcgacaauuggaagggaagcaacagacccaucgucgauauuaauaucaaagaccacucuauuguguccagcuacguuuguucuggccuggugggcgauaccccgcggaagaacgacagcuccucuagcucccauugccuugacccuaauaacgaggaagggggacacggcgucaaagggugggcuuucgaugacggaaaugauguguggaugggccgcacgaucaacgagacaagcagacugggguaugagaccuuuaagguuaucgaaggauggucuaaucccaaauccaagcuccagauuaaccgccaggugaucgucgaccggggcgauagaagcggcuacucugggauuuucuccguggagggaaaaagcuguaucaaucggugcuuuuaugucgaacugauuagaggccgcaaggaggaaaccgaggugcuguggacauccaacucuaucguuguguucugugggaccagcggaacauacggcacgggguccuggccugacggcgccgaucucaaucugaugcccauuuga

SEQ ID NO: 217038 - RNA, 1410 nt, Artificial Sequence; identical to SEQ ID NO: 215975
  derived and/or modified CDS sequence (opt5) from neuraminidase__InfluenzaA__AHL98785

SEQ ID NO: 217039 - RNA, 1410 nt, Artificial Sequence
  derived and/or modified CDS sequence (opt5) from neuraminidase__InfluenzaA__AHL98797
augaaccccaaucagaagaucauuaccaucggcagcgugucccugacaauuucuacgaucugcuucuuuacccaaauugccauccucaucacaaccgucacacugcacuucaaacaguacgaguuuaacagcccuccgaauaaccagguuaugcuuugugaacccaccauuaucgagagaaauauuacagaaaucguguaucugaccaacacgaccauugagaaggaaaucugcccuaaacccgcugaguaccggaauugguccaagccucagugugggauuacaggauucgcccccuuuucuaaagacaacagcauccgccucuccgcgggcggggauaucugggugaccagagagccuuaugucucuugcgacccggauaaguguuaccaauucgcucugggacagggcacaacccuuaauaacgugcauagcaauaacacgguucgggaccgcacacccuauagaacccugcucaugaaugaacugggggugccuuuucaccugggaacaaagcaggucugcauugccugguccucuagcuccugucaugauggcaaagccuggcuccacgugugcaucaccggcgacgauaagaacgcuaccgccagcuucauuuacaaugggcggcugguugacucuguggucuccuggagcaaagagauccuucgcacacaggaaucugagugugugugcauuaacggaacguguaccguggucaugacagauggcuccgcuagcgggaaggccgacaccaaaauccuguuuaucgaggaaggaaagauuguucauacauccacccucucuggcagcgcgcaacacguggaggaaugcuccugcuaucccagauacccuggggugcggugugucugccgcgauaacuggaagggaagcaauagacccaucguggacauuaacaucaaagaucacucuauuguuuccagcuacguguguucuggccuggucggcgacacgccgcggaagaaugacagcuccucuagcucccauugccuugauccuaacaaugaggaagggggacacggcgugaaagggugggccuucgacgauggaaacgacguuuggaugggccgcacaaucaaugagaccagcagaucuggguaugagaccuuuaaggugaucgaaggaugguccaaccccaaaagcaagcugcagauuaaucggcaggucaucguggaucgcggcgacagaucuggcuacuccgggauuuucagcgucgagggaaaauccuguaucaaccggugcuuuuauguggaacucauuagaggccgcaaggaggaaacagagguucuguggaccucuaauagcaucguggucuucugugggacauccggaacguacggcaccgggucuuggccugauggcgcugaccugaaccucaugcccauuuga

SEQ ID NO: 217040 - RNA, 1410 nt, Artificial Sequence; identical to SEQ ID NO: 214218
  derived and/or modified CDS sequence (opt5) from neuraminidase__InfluenzaA__AHL98809

SEQ ID NO: 217041 - RNA, 1410 nt, Artificial Sequence
  derived and/or modified CDS sequence (opt5) from neuraminidase__InfluenzaA__AHL98821
augaaccccaaucagaagaucauuaccaucggcagcgugucccugacaauuucuacgaucugcuucuuuaugcaaauugccauccucaucaccacagucacccugcacuucaaacaguacgaguuuaacagcccuccgaauaaccagguuaugcuuugugaacccacaauuaucgagagaaauauuaccgaaaucguguaucugacaaacaccacgauugagaaggaaaucugcccuaaacccgcugaguaccggaauugguccaagccucagugugggauuaccggauucgcccccuuuucuaaagacaacagcauccgccucuccgcgggcggggauaucugggugacaagagagccuuaugucucuugcgacccggaucgguguuaccaauucgcucugggacagggcaccacacuuaauaacaugcauagcaauaacaccgugcgcgacagaacgcccuaucggacacugcucaugaaugaacuggggguuccuuuucaccugggaaccaaacaggugugcauugccugguccucuagcuccugucaugauggcaaggccuggcuccacgucugcaucacaggcgacgauaagaacgcuaccgccagcuucauuuacaaugggcgccugguggacucuguuguguccuggagcaaggagauccuuagaacccaggaaucugagugugucugcauuaacggaacauguacgguggugaugaccgauggcuccgcuagcgggaaagccgacacaaagauccuguuuaucgaggaaggaaaaauuguccauaccuccacacucucuggcagcgcgcaacacguugaggaaugcuccugcuauccccgguacccuggggugcgcugugugugcagagauaacuggaagggaagcaaucggcccaucgucgacauuaacaucaaggaucacucuauuguguccagcuacguuuguucuggccuggugggcgacaccccgcgcaaaaaugacagcuccucuagcucccauugccuugauccuaacaaugaggaagggggacacggcgucaaggggugggccuucgacgauggaaacgacguguggaugggcagaacgaucaaugagacaagccggcugggguaugagaccuuuaaaguuaucgaaggauggucuaaccccaaguccaaacuccagauuaaucgccaggugaucgucgauagaggcgaccggagcggcuacucugggauuuucuccguggagggaaagagcuguaucaacagaugcuuuuaugucgaacugauucgcggccggaaagaggaaaccgaggugcuguggacauccaauucuaucguuguguucugugggaccagcggaacauacggcacgggguccuggccugauggcgcugaccucaaccugaugcccauuuga

SEQ ID NO: 217042 - RNA, 1410 nt, Artificial Sequence; identical to SEQ ID NO: 214218
  derived and/or modified CDS sequence (opt5) from neuraminidase__InfluenzaA__AHL98833

SEQ ID NO: 217043 - RNA, 1410 nt, Artificial Sequence
  derived and/or modified CDS sequence (opt5) from neuraminidase__InfluenzaA__AHL98845
augaaccccaaucagaagaucauuaccaucggcagcgugucccugacaauuucuacgaucugcuucuuuaugcaaauugccauccucaucaccacagucacccugcacuucaaacaguacgaguuuaacagcccuccgaauaaccagguuaugcuuugugaacccacaauuaucgagagaaauauuaccgaaaucguguaucugauuaacacaaccaucgagaaggaaauuugcccuaaacccgcugaguaccggaauugguccaagccucagugugggaucacgggauucgcccccuuuucuaaagacaacagcauccgccucuccgcgggcggggauauuugggugaccagagagccuuaugucucuugcggaccggacaaguguuaccaauucgcucugggccaggggacaacccuuaauaacaugcauagcaauaacacagugcgggaucgcacccccuauagaacgcugcucaugaaugaacugggaguuccuuuucaccugggcacaaaacaggugugcaucgccugguccucuagcuccugucaugacggcaaggccuggcuccacgucugcauuaccggggaugacaagaacgcuacagccagcuucaucuacaauggacggcugguggauucuguuguguccuggagcaaagagauucuucgcacccaggaaucugagugugucugcaucaacggcaccuguacaguggugaugacggacggguccgcuagcggaaaggccgauaccaaaauccuguuuauugaggaaggcaagaucguccauacauccacccucucugggagcgcgcaacacguugaggaaugcuccugcuaucccagauacccuggagugcggugugugugccgcgacaacuggaagggcagcaauagacccauugucgauaucaacauuaaagaccacucuaucguguccagcuacguuuguucuggccuggugggggauacaccgcggaagaaugacagcuccucuagcucccauugccuugacccuaacaaugaggaaggaggccacggggucaaaggaugggccuucgaugacggcaacgauguguggauggggcgcaccaucaaugagacgagcagacugggauaugagacauuuaagguuauugaaggcuggucuaaccccaaauccaagcuccagaucaaucgccaggugauugucgaccggggcgauagaagcggguacucuggaaucuucuccguggagggcaaaagcuguauuaaccggugcuuuuaugucgaacugaucagagggcgcaaggaggaaaccgaggugcuguggaccuccaauucuauuguuguguucuguggaacaagcggcaccuacgggacaggcuccuggccugacggagcugaucucaaccugaugcccaucuga

SEQ ID NO: 217044 - RNA, 1410 nt, Artificial Sequence; identical to SEQ ID NO: 215955
  derived and/or modified CDS sequence (opt5) from neuraminidase__InfluenzaA__AHL98857

SEQ ID NO: 217045 - RNA, 1410 nt, Artificial Sequence; identical to SEQ ID NO: 215955
  derived and/or modified CDS sequence (opt5) from neuraminidase__InfluenzaA__AHL98869

SEQ ID NO: 217046 - RNA, 1410 nt, Artificial Sequence; identical to SEQ ID NO: 214218
  derived and/or modified CDS sequence (opt5) from neuraminidase__InfluenzaA__AHL98881

SEQ ID NO: 217047 - RNA, 1410 nt, Artificial Sequence
  derived and/or modified CDS sequence (opt5) from neuraminidase__InfluenzaA__AHL98893
augaaccccaaucagaagaucauuaccaucggcagcgugucccugacaauuucuacgaucugcuucuuuaugcaaauugccauccucaucaccacagucacccugcacuucaaacaguacgaguuugacagcccuccgaacaaucagguuaugcuuugugaacccacaauuaucgagagaaacauuaccgaaaucguguaucugacaaauaccacgauugagaaggaaaucugcccuaaacccgcugaguaccggaacugguccaagccucagugugggauuaccggauucgcccccuuuucuaaagauaauagcauccgccucuccgcgggcggggacaucugggugacaagagagccuuaugucucuugcgauccggacaaguguuaccaauucgcucugggacagggcaccacacuuaacaaugugcauagcaacaauaccguucgggaucgcacgcccuauagaacacugcucaugaacgaacugggggugccuuuucaccugggaaccaagcaggucugcauugccugguccucuagcuccugucaugacggcaaagccuggcuccacgugugcaucacaggcgaugacaagaaugcuaccgccagcuucauuuacaacgggcggcugguugauucuguggucuccuggagcaaagagauccuucgcacccaggaaucugagugugugugcauuaauggaacauguacgguggucaugaccgacggcuccgcuagcgggaaggccgauacaaaaauccuguuuaucgaggaaggaaagauuguucauaccuccacacucucuggcagcgcgcaacacguggaggaaugcuccugcuaucccagauacccuggggugcggugugucugccgcgacaacuggaagggaagcaacagacccaucguggauauuaauaucaaagaccacucuauuguuuccagcuacguguguucuggccuggucggcgacaccccgcggaagaacgauagcuccucuagcucccauugccuugacccuaauaacgaggaagggggacacggcgugaaagggugggccuucgaugacggaaaugauguuuggaugggccgcacgaucaacgagacaagcagacugggguaugagaccuuuaagguguucgaaggauggucuaaucccaaauccaagcuccagaucaaccggcaggucauuguggaccgcggcgauagaagcggcuacucugggaucuuuuccgucgagggaaaaagcuguauuaaucggugcuucuauguggaacugaucagaggccgcaaggaggaaaccgagguucuguggacauccaacucuauuguggucuucugugggaccagcggaacauacggcacgggguccuggccugacggcgcugaucucaaucugaugcccaucuga

SEQ ID NO: 217048 - RNA, 1410 nt, Artificial Sequence; identical to SEQ ID NO: 215943
  derived and/or modified CDS sequence (opt5) from neuraminidase__InfluenzaA__AHL98905

SEQ ID NO: 217049 - RNA, 1410 nt, Artificial Sequence; identical to SEQ ID NO: 214218
  derived and/or modified CDS sequence (opt5) from neuraminidase__InfluenzaA__AHL98916

SEQ ID NO: 217050 - RNA, 1410 nt, Artificial Sequence; identical to SEQ ID NO: 215966
  derived and/or modified CDS sequence (opt5) from neuraminidase__InfluenzaA__AHL98928

SEQ ID NO: 217051 - RNA, 1410 nt, Artificial Sequence; identical to SEQ ID NO: 214218
  derived and/or modified CDS sequence (opt5) from neuraminidase__InfluenzaA__AHL98940

SEQ ID NO: 217052 - RNA, 1410 nt, Artificial Sequence; identical to SEQ ID NO: 214218
  derived and/or modified CDS sequence (opt5) from neuraminidase__InfluenzaA__AHL98952

SEQ ID NO: 217053 - RNA, 1410 nt, Artificial Sequence; identical to SEQ ID NO: 215943
  derived and/or modified CDS sequence (opt5) from neuraminidase__InfluenzaA__AHL98964

SEQ ID NO: 217054 - RNA, 1410 nt, Artificial Sequence
  derived and/or modified CDS sequence (opt5) from neuraminidase__InfluenzaA__AHL98976
augaaccccaaucagaagaucauuaccaucggcagcgugucccugacaauuucuacgaucugcuucuuuaugcaaauugccauccucaucaccacagucacccugcacuucaaacaguacgaguuuaacagcccuccgaauaaccagguuaugcuuugugaacccacaauuguggagagaaauaucaccgaaauuguguaucugacaaacaccacgaucgagaaggaaauuugcccuaaacccgcugaguaccggaauugguccaagccucagugugggaucaccggauucgcccccuuuucuaaagacaacagcauucgccucuccgcgggcggggauaucugggucacaagagagccuuaugugucuugcgacccggauaaguguuaccaauucgcucugggacagggcaccacacuuaauaacguucauagcaauaacaccgugcgggaccgcacgcccuauagaacacugcucaugaaugaacugggggucccuuuucaccugggaaccaaacaggugugcaucgccugguccucuagcuccugucaugauggcaaggccuggcuccacguuugcauuacaggcgacgauaagaacgcuaccgccagcuucaucuacaaugggcggcugguggacucugucgcuuccuggagcaaagaggugcuucgcacccaggaaucugagugugugugcauuaacggaacaugugccgucguuaugacggauggcuccgcgagcgggaaggccgacaccaaaauccuguuuauugaggaaggaaagaucgugcauacauccacccucucuggcagcgcucaacacguggaggaaugcuccugcuaucccagauacccugggguccggugugugugccgcgauaacuggaagggaagcaauagacccaucguugacauuaacaucaaagaucacucuauuguguccagcuacgucuguucuggccuggugggcgacacaccgcggaagaaugacagcuccucuagcucccauugccuugauccuaacaaugaggaagggggacacggcguuaaagggugggccuucgacgauggaaacgacguguggaugggccgcaccaucaaugagacgagcagacugggguaugagacauuuaaggucauugaaggauggucuaaccccaaauccaagcuccagaucaaucgccaggugaucgucgaucggggcgacagaagcggcuacucugggauuuucuccguggagggaaaaagcuguaucaaccggugcuuuuauguugaacugauuagaggccgcaaggaggaaaccgaggugcuguggaccuccaauucuaucgucguguucugugggacaagcggaaccuacggcacaggguccuggccugauggcgcugaccucaaccugaugcccauuuga

SEQ ID NO: 217055 - RNA, 1410 nt, Artificial Sequence; identical to SEQ ID NO: 215943
  derived and/or modified CDS sequence (opt5) from neuraminidase__InfluenzaA__AHL98988

SEQ ID NO: 217056 - RNA, 1410 nt, Artificial Sequence; identical to SEQ ID NO: 214218
  derived and/or modified CDS sequence (opt5) from neuraminidase__InfluenzaA__AHL99000

SEQ ID NO: 217057 - RNA, 1410 nt, Artificial Sequence; identical to SEQ ID NO: 214218
  derived and/or modified CDS sequence (opt5) from neuraminidase__InfluenzaA__AHL99012

SEQ ID NO: 217058 - RNA, 1410 nt, Artificial Sequence
  derived and/or modified CDS sequence (opt5) from neuraminidase__InfluenzaA__AHL99024
augaaccccaaucagaagaucauuaccaucggcagcgugucccugacaauuucuacgaucugcuucuuuaugcaaauugccauccucaucaccacagucacccugcacuucaaacaguacgaguuuaacagcccuccgaauaaccagguuaugcuuugugaacccacaauuaucgagagaaauauuaccgaaaucguguaucugacaaacaccacgauugagaaggaaaucugcccuaaacccgcugaguaccggaauugguccaagccucagugugggauuaccggauucgcccccuuuucuaaagacaacagcauccgccucuccgcgggcggggauaucugggugacaagagagccuuaugucucuugcgacccggauaaguguuaccaauucgcucugggacagggcaccacacuuaauaacgugcauagcaauaacaccguucgggaccgcacgcccuauagaacacugcucaugaaugaacugggggugccuuuucaccugggaaccaagcaggucugcauugccugguccucuagcuccugucaugauggcaaagccuggcuccacgugugcaucacaggcgacgauaagaacgcuaccgccagcuucauuuacaaugggcggcugguugacucuguggucuccuggagcaaagagauccuucgcacccaggaaucugagugugugugcauuaacggaacauguacgguggucaugaccgauggcuccgcuagcgggaaggccgacacaaaaauccuguuuaucgaggaaggaaagauuguucauaccuccacacucucuggcagcgcgcaacacguggaggaaugcuccugcuaucccagauacccuggggugcgguguaucugccgcgauaacuggaagggaagcaauagacccauugucgacaucaacauuaaagaucacucuaucguguccagcuacguuuguucuggccuggugggcgacaccccgcggaagaaugacagcuccucuagcucccauugccuugauccuaacaaugaggaagggggacacggcgucaaagggugggccuucgacgauggaaacgacguguggaugggccgcacgaucaaugagacaagcagacugggguaugagaccuuuaagguuauugaaggauggucuaaccccaaauccaagcuccagaucaaucgccaggugauugucgaucggggcgacagaagcggcuacucugggaucuucuccguggagggaaaaagcuguauuaaccggugcuuuuaugucgaacugaucagaggccgcaaggaggaaaccgaggugcuguggacauccaauucuauuguuguguucugugggaccagcggaacauacggcacgggguccuggccugauggcgcugaccucaaccugaugcccaucuga

SEQ ID NO: 217059 - RNA, 1410 nt, Artificial Sequence; identical to SEQ ID NO: 215436
  derived and/or modified CDS sequence (opt5) from neuraminidase__InfluenzaA__AHL99036

SEQ ID NO: 217060 - RNA, 1410 nt, Artificial Sequence; identical to SEQ ID NO: 216858
  derived and/or modified CDS sequence (opt5) from neuraminidase__InfluenzaA__AHL99048

SEQ ID NO: 217061 - RNA, 1410 nt, Artificial Sequence; identical to SEQ ID NO: 214218
  derived and/or modified CDS sequence (opt5) from neuraminidase__InfluenzaA__AHL99060

SEQ ID NO: 217062 - RNA, 1410 nt, Artificial Sequence
  derived and/or modified CDS sequence (opt5) from neuraminidase__InfluenzaA__AHL99072
augaaccccaaucagaagaucauuaccaucggcagcgugucccugacaauuucuacgaucugcuucuuuaugcaaauugccauccucaucaccacagucacccugcacuucaaacaguacgaguuuaacagcccuccgaauaaccagguuaugcuuugugaacccacaauuaucgagagaaauauuaccgaaaucguguaucugacaaacaccacgauugagaaggaaaucugcccuaaacccgcugaguaccggaauugguccaagccucagugugggauuaccggauucgcccccuuuucuaaagacaacagcauccgccucuccgcgggcggggauaucugggugacaagagagccuuaugucucuugcgacccggauaaguguuaccaauucgcucugggacagggcaccacacuuaauaacgugcauagcaauaacaccguucgggaccgcacgcccuauagaacacugcucaugaaugaacugggggugccuuuucaccugggaaccaagcaggucugcauugccugguccucuagcuccugucaugauggcaaagccuggcuccacgugugcaucacaggcgacgauaagaacgcuaccgccagcuucauuuacaaugggcggcugguugacucuguggucuccuggagcaaagagauccuucgcacccaggaaucugagugugugugcauuaacggaacauguacgguggucaugaccgauggcuccgcuagcgggaaggccgacacaaaaauccuguuuaucgaggaaggaaagauuguucauaccuccacacucucuggcagcgcgcaacacguggaggaaugcuccugcuaucccagauacccuggggugcggugugucugccgcgauaacuggaagggaagcaauagacccaucguggacauuaacaugaaagaucacucuaucguuuccagcuacguguguucuggccuggucggcgacaccccgcggaagaaugacagcuccucuagcucccauugccuugauccuaacaaugaggaagggggacacggcgugaaagggugggccuucgacgauggaaacgacguuuggaugggccgcacgauuaaugagacaagcagacugggguaugagaccuuuaaggugaucgaaggauggucuaaccccaaauccaagcuccagaucaaucggcaggucauuguggaucgcggcgacagaagcggcuacucugggaucuucuccgucgagggaaaaagcuguauuaaccggugcuuuuauguggaacugaucagaggccgcaaggaggaaaccgagguucuguggacauccaauucuauuguggucuucugugggaccagcggaacauacggcacgggguccuggccugauggcgcugaccucaaccugaugcccaucuga

SEQ ID NO: 217063 - RNA, 1410 nt, Artificial Sequence
  derived and/or modified CDS sequence (opt5) from neuraminidase__InfluenzaA__AHL99084
augaaccccaaucagaagaucauuaccaucggcagcgugucccugacaauuucuacgaucugcuucuuuaugcaaauugccauccucaucaccacagucacccugcacuucaaacaguacgaguuuaacagcccuccgaauaaccagguuaugcuuugugaacccacaauuaucgagagaaauauuaccgaaaucguguaucugacaaacaccacgauugagaaggaaaucugcccuaaacccgcugaguaccggaauugguccaagccucagugugggauuaccggauucgcccccuuuucuaaagacaacagcauccgccucuccgcgggcggggauaucugggugacaagagagccuuaugucucuugcgacccggaucgguguuaccaauucgcucugggacagggcaccacacuuaauaacaugcauagcaauaacaccgugcgcgacagaacgcccuaucggacacugcucaugaaugaacuggggguuccuuuucaccugggaaccaaacaggugugcauugccugguccucuagcuccugucaugauggcaaggccuggcuccacgucugcaucacaggcgacgauaagaacgcuaccgccagcuucauuuacaaugggcgccugguggacucuguuguguccuggagcaaggagauccuuagaacccaggaaucugagugugucugcauuaacggaacauguacgguggugaugaccgauggcuccgcuagcgggaaagccgacacaaagauccuguuuaucgaggaaggaaaaauuguccauaccuccacacucucuggcagcgcgcaacacguugaggaaugcuccugcuauccccgguacccuggggugcgcugugugugcagagauaacuggaagggaagcaaucggcccaucgucgacauuaacaucaaggaucacaauauugugucuuccuacguuuguagcggccuggugggcgacaccccgcgcaaaaacgacucuagcuccucuagccauugccuugauccuaauaacgaggaagggggacacggcgucaaggggugggccuucgacgauggaaaugacguguggaugggcagaacgaucaacgagacaucccggcugggguaugagaccuuuaaaguuaucgaaggauggagcaaucccaagucuaaacuccagauuaaccgccaggugaucgucgauagaggcgaccgguccggcuacagcgggauuuucucuguggagggaaaguccuguaucaauagaugcuuuuaugucgaacugauucgcggccggaaagaggaaaccgaggugcuguggacaagcaacuccaucguuguguucugugggaccucuggaacauacggcacggggagcuggccugauggcgcugaccucaaucugaugcccauuuga

SEQ ID NO: 217064 - RNA, 1410 nt, Artificial Sequence; identical to SEQ ID NO: 214218
  derived and/or modified CDS sequence (opt5) from neuraminidase__InfluenzaA__AHL99096

SEQ ID NO: 217065 - RNA, 1410 nt, Artificial Sequence; identical to SEQ ID NO: 214218
  derived and/or modified CDS sequence (opt5) from neuraminidase__InfluenzaA__AHL99108

SEQ ID NO: 217066 - RNA, 1410 nt, Artificial Sequence; identical to SEQ ID NO: 214218
  derived and/or modified CDS sequence (opt5) from neuraminidase__InfluenzaA__AHL99120

SEQ ID NO: 217067 - RNA, 1410 nt, Artificial Sequence; identical to SEQ ID NO: 214218
  derived and/or modified CDS sequence (opt5) from neuraminidase__InfluenzaA__AHL99132

SEQ ID NO: 217068 - RNA, 1410 nt, Artificial Sequence
  derived and/or modified CDS sequence (opt5) from neuraminidase__InfluenzaA__AHL99144
augaaccccaaucagaagaucauuaccaucggcagcgugucccugacaauuucuacgaucugcuucuuuaugcaaauugccauccucaucaccacagucacccugcacuucaaacaguacgaguuuaacagcccuccgaauaaccagguuaugcuuugugaacccacaauuaucgagagaaauauuaccgaaaucguguaucugacaaacaccacgauugagaaggaaaucugcccuaaacccgcugaguaccggaauugguccaagccucagugugggauuaccggauucgcccccuuuucuaaagacaacagcauccgccucuccgcgggcggggauaucugggugacaagagagccuuaugucucuugcgacccggauaaguguuaccaauucgcucugggacagggcaccacacuuaauaacgugcauagcaauaacaccguucgggaccgcacgcccuauagaacacugcucaugaaugaacugggggugccuuuucaccugggaaccaagcaggucugcauugccugguccucuagcuccugucaugauggcaaagccuggcuccacgugugcaucacaggcgacgauaagaacgcuaccgccagcuucauuuacaaugggcggcugguugacucuguggucuccuggagcaaagagauccuucgcacccaggaaucugagugugugugcauuaacggaacauguacgguggucaugaccgauggcuccgcuagcgggaaggccgacacaaaaauccuguuuaucgaggaaggaagaauuguucauaccuccacacucucuggcagcgcgcaacacguggaggaaugcuccugcuauccccgguacccuggggugcgcugugucugcagagauaacuggaagggaagcaaucggcccaucguggacauuaacaucaaggaucacucuauuguuuccagcuacguguguucuggccuggucggcgacaccccgcgcaaaaaugacagcuccucuagcucccauugccuugauccuaacaaugaggaagggggacacggcgugaaggggugggccuucgacgauggaaacgacguuuggaugggcagaacgaucaaugagacaagccggcugggguaugagaccuuuaaagugaucgaaggauggucuaaccccaaguccaaacuccagauuaaucgccaggucaucguggauagaggcgaccggagcggcuacucugggauuuucuccgucgagggaaagagcuguaucaacagaugcuuuuauguggaacugauucgcggccggaaagaggaaaccgagguucuguggacauccaauucuaucguggucuucugugggaccagcggaacauacggcacgggguccuggccugauggcgcugaccucaaccugaugcccauuuga

SEQ ID NO: 217069 - RNA, 1410 nt, Artificial Sequence; identical to SEQ ID NO: 214218
  derived and/or modified CDS sequence (opt5) from neuraminidase__InfluenzaA__AHL99156

SEQ ID NO: 217070 - RNA, 1410 nt, Artificial Sequence
  derived and/or modified CDS sequence (opt5) from neuraminidase__InfluenzaA__AHL99168
augaaccccaaucagaagaucauuaccaucggcagcgugucccugacaauuucuacgaucugcuucuuuaugcaaauugccauccucaucaccacagucacccugcacuucaaacaguacgaguuuaacagcccuccgaauaaccagguuaugcuuugugaacccacaauuaucgagagaaauaccacagaaauuguguaucugaccaacacgaccaucgagaaggaaauuugcccuaaacccgcugaguaccggaauugguccaagccucagugugggaucacaggauucgcccccuuuucuaaagacaacagcauucgccucuccgcgggcggggauaucugggugaccagagagccuuaugucucuugcgacccggauaaguguuaccaauucgcucugggacagggcacaacccuuaauaacgugcauagcaauaacacgguucgggaccgcacacccuauagaacccugcucaugaaugaacugggggugccuuuucaccugggaacaaagcaggucugcaucgccugguccucuagcuccugucaugauggcaaagccuggcuccacgugugcauuaccggcgacgauaagaacgcuaccgccagcuucaucuacaaugggcggcugguugacucuguggucuccuggagcaaagagauucuucgcacacaggaaucugagugugugugcaucaacggaacguguaccguggucaugacagauggcuccgcuagcgggaaggccgacaccaaaauucuguuuaucgaggaaggaaagaucguucauacauccacccucucuggcagcgcgcaacacguggaggaaugcuccugcuaucccagauacccuggggugcggugugucugccgcgauaacuggaagggaagcaauagacccauuguggacaucaacauuaaagaucacucuaucguuuccagcuacguguguucuggccuggucggcgacacgccgcggaagaaugacagcuccucuagcucccauugccuugauccuaacaaugaggaagggggacacggcgugaaagggugggccuucgacgauggaaacgacguuuggaugggccgcacaauuaaugagaccagcagacugggguaugagaccuuuaaggugaucgaaggauggucuaaccccaaauccaagcuccagaucaaucggcaggucauuguggaucgcggcgacagaagcggcuacucugggaucuucuccgucgagggaaaaagcuguauuaaccggugcuuuuauguggaacugaucagaggccgcaaggaggaaacagagguucuguggaccuccaauucuauuguggucuucugugggacaagcggaacguacggcaccggguccuggccugauggcgcugaccucaaccugaugcccaucuga

SEQ ID NO: 217071 - RNA, 1410 nt, Artificial Sequence; identical to SEQ ID NO: 214218
  derived and/or modified CDS sequence (opt5) from neuraminidase__InfluenzaA__AHL99180

SEQ ID NO: 217072 - RNA, 1410 nt, Artificial Sequence; identical to SEQ ID NO: 215082
  derived and/or modified CDS sequence (opt5) from neuraminidase__InfluenzaA__AHL99204

SEQ ID NO: 217073 - RNA, 1410 nt, Artificial Sequence
  derived and/or modified CDS sequence (opt5) from neuraminidase__InfluenzaA__AHL99216
augaaccccaaucagaagaucauuaccaucggcagcgugucccugacaauuucuacgaucugcuucuuuaugcaaauugccauccucaucaccacagucacccugcacuucaaacaguacgaguuuaacagcccuccgaauaaccagguuaugcuuugugaacccacaauuaucgagagaaauauuaccgaaaucguguaucugacaaacaccacgguggagaaggaaauuugcccuaaacccgcugaguaccggaauugguccaagccucagugugggaucaccggauucgcccccuuuucuaaagacaacagcauucgccucuccgcgggcggggauaucugggucacaagagagccuuaugugucuugcgacccggauaaguguuaccaauucgcucugggacagggcaccacacuuaauaacguucauagcaauaacaccgugcgggaccgcacgcccuauagaacacugcucaugaaugaacugggggucccuuuucaccugggaaccaaacaggugugcaucgccugguccucuagcuccugucaugauggcaaggccuggcuccacguuugcauuacaggcgacgauaagaacgcuaccgccagcuucaucuacaaugggcggcugguggacucugucguguccuggagcaaagagauucuucgcacccaggaaucugagugugugugcaucaacggaacauguacggucguuaugaccgauggcuccgcuagcgggaaggccgacacaaaaauucuguuuaucgaggaaggaaagaucgugcauaccuccacacucucuggcagcgcgcaacacguggaggaaugcuccugcuaucccagauacccugggguccggugugugugccgcgauaacuggaagggaagcaauagacccauuaucgacauuaacaucaaagaucacucuauuguuuccagcuacguguguucuggccuggucggcgacaccccgcggaagaaugacagcuccucuagcucccauugccuugauccuaacaaugaggaagggggacacggcgugaaagggugggccuucgacgauggaaacgacguuuggaugggccgcacgaucaaugagacaagcagacugggguaugagaccuuuaaggugaucgaaggauggucuaaccccaaauccaagcuccagauuaaucggcaggucaucguggaucgcggcgacagaagcggcuacucugggauuuucuccgucgagggaaaaagcuguaucaaccggugcuuuuauguggaacugauuagaggccgcaagaaggagaccgaaguucuguggacauccaauucuaucguggucuucugugggaccagcggaacauacggcacgggguccuggccugauggcgcugaccucaaccugaugcccauuuga

SEQ ID NO: 217074 - RNA, 1410 nt, Artificial Sequence; identical to SEQ ID NO: 214218
  derived and/or modified CDS sequence (opt5) from neuraminidase__InfluenzaA__AHL99228

SEQ ID NO: 217075 - RNA, 1410 nt, Artificial Sequence; identical to SEQ ID NO: 214218
  derived and/or modified CDS sequence (opt5) from neuraminidase__InfluenzaA__AHL99240

SEQ ID NO: 217076 - RNA, 1410 nt, Artificial Sequence; identical to SEQ ID NO: 214218
  derived and/or modified CDS sequence (opt5) from neuraminidase__InfluenzaA__AHL99252

SEQ ID NO: 217077 - RNA, 1410 nt, Artificial Sequence; identical to SEQ ID NO: 214218
  derived and/or modified CDS sequence (opt5) from neuraminidase__InfluenzaA__AHL99264

SEQ ID NO: 217078 - RNA, 1410 nt, Artificial Sequence; identical to SEQ ID NO: 214218
  derived and/or modified CDS sequence (opt5) from neuraminidase__InfluenzaA__AHL99276

SEQ ID NO: 217079 - RNA, 1410 nt, Artificial Sequence; identical to SEQ ID NO: 215955
  derived and/or modified CDS sequence (opt5) from neuraminidase__InfluenzaA__AHL99288

SEQ ID NO: 217080 - RNA, 1410 nt, Artificial Sequence; identical to SEQ ID NO: 216858
  derived and/or modified CDS sequence (opt5) from neuraminidase__InfluenzaA__AHL99300

SEQ ID NO: 217081 - RNA, 1410 nt, Artificial Sequence; identical to SEQ ID NO: 214218
  derived and/or modified CDS sequence (opt5) from neuraminidase__InfluenzaA__AHL99312

SEQ ID NO: 217082 - RNA, 1410 nt, Artificial Sequence
  derived and/or modified CDS sequence (opt5) from neuraminidase__InfluenzaA__AHL99324
augaaccccaaucagaagaucauuaccaucggcagcgugucccugacaauuucuacgaucugcuucuuuaugcaaauugccauccucaucaccacagucacccugcacuucaaacaguacgaguuuaacagcccuccgaauaaccagguuauucuuugugaacccacaaucauugagagaaauaucaccgaaauuguguaucugacaaacaccacgaucgagaaggaaauuugcccuaaacccgcugaguaccggaauugguccaagccucagugugggaucaccggauucgcccccuuuucuaaagacaacagcauccgccucuccgcgggcggggauauuugggugacaagagagccuuaugucucuugcgacccggauaaguguuaccaauucgcucugggacagggcaccacacuuaauaacgugcauagcaauaacaccguucgggaccgcacgcccuauagaacacugcucaugaaugaacugggggugccuuuucaccugggaaccaagcaggucugcaucgccugguccucuagcuccugucaugauggcaaagccuggcuccacgugugcauuacaggcgacgauaagaacgcuaccgccagcuucaucuacaaugggaaacugguugacucuguggucuccuggagcaaggagauucuucggacccaggaaucugagugugugugcaucaacggaacauguacgguggucaugaccgauggcuccgcuagcgggaaagccgacacaaagauccuguuuauugaggaaggaaagaucguucauaccuccacacucucuggcagcgcgcaacacguggaggaaugcuccugcuauccccgcuacccuggggugagaugugucugccgggauaacuggaaaggaagcaaucgccccauuguggacaucaacauuaaggaucacucuaucguuuccagcuacguguguucuggccuggucggcgacaccccgcggaaaaaugacagcuccucuagcucccauugccuugauccuaacaaugaggaagggggacacggcgugaaggggugggccuucgacgauggaaacgacguuuggaugggcagaacgaucaaugagacaagccgccugggguaugagaccuuuaaagugauugaaggauggucuaaccccaaguccaaacuccagaucaauagacaggucauuguggaucggggcgaccgcagcggcuacucugggaucuucuccgucgagggaaagagcuguauuaacagaugcuuuuauguggaacugauccggggcagaaaggaggaaaccgagguucuguggacauccaauucuauuguggucuucugugggaccagcggaacauacggcacgggguccuggccugauggcgcugaccucaaccugaugcccaucuga

SEQ ID NO: 217083 - RNA, 1410 nt, Artificial Sequence; identical to SEQ ID NO: 215461
  derived and/or modified CDS sequence (opt5) from neuraminidase__InfluenzaA__AHL99348

SEQ ID NO: 217084 - RNA, 1410 nt, Artificial Sequence; identical to SEQ ID NO: 215461
  derived and/or modified CDS sequence (opt5) from neuraminidase__InfluenzaA__AHL99359

SEQ ID NO: 217085 - RNA, 1410 nt, Artificial Sequence
  derived and/or modified CDS sequence (opt5) from neuraminidase__InfluenzaA__AHL99370
augaaccccaaucagaagaucauuaccaucggcagcgugucccugacaauuacgaccaucugcuucuuuaugcaaauugccauccucaucacaaccgucacacugcacuucaaacaguacgaguuuaacucuccuccgaauaaccagaugaugcuuugugaacccaccauuaucgagagaaauauuacagaaaucguuuaucugaccaacacgaccauugagaaggaaaucugcccuaaacccgcugaguaccggaauuggagcaagccucagugugggauuacaggauucgcccccuuuuccaaagacaacucuauccgccucagcgcgggcggggauaucugggugaccagagagccuuauguguccugcgacccggauaaguguuaccaauucgcucugggacagggcacaacccuuaauaacguccauucuaauaacacggugcgggaccgcacacccuauagaacccugcucaugaaugaacuggggguuccuuuucaccugggaacaaaacaggugugcauugccuggagcuccagcucuugucaugauggcaaggccuggcuccacgucugcaucaccggcgacgauaagaacgcuaccgccuccuucauuuacaaugggcggcugguggacagcguugugucuugguccaaagagauccuucgcacacaggaaagcgagugugucugcauuaacggaacguguaccguggugaugacagauggcucugcuuccgggaaggccgacaccaaaauccuguuuaucgaggaaggaaagauuguccauacaagcacccucuccggcucugcgcaacacguugaggaaugcagcugcuaucccagauacccuggggugcggugugugugccgcgauaacuggaagggauccaauagacccaucgucgacauuaacaucaaagaucacagcauugugucuuccuacguuuguagcggccuggugggcgacacgccgcggaagaaugacucuagcuccucuagccauugccuugauccuaacaaugaggaagggggacacggcgucaaagggugggccuucgacgauggaaacgacguguggaugggccgcacaaucaaugagaccuccagacugggguaugagaccuuuaagguuaucgaaggauggagcaaccccaaaucuaagcuccagauuaaucgccaggugaucgucgaucggggcgacagauccggcuacagcgggauuuucucuguggagggaaaauccuguaucaaccggugcuuuuaugucgaacugauuagaggccgcaaggaggaaacagaggugcuguggaccagcaauuccaucguuguguucugugggacaucuggaacguacggcaccgggagcuggccugauggcgcugaccucaaccugaugcccauuuga

SEQ ID NO: 217086 - RNA, 1410 nt, Artificial Sequence; identical to SEQ ID NO: 214218
  derived and/or modified CDS sequence (opt5) from neuraminidase__InfluenzaA__AHL99393

SEQ ID NO: 217087 - RNA, 1410 nt, Artificial Sequence; identical to SEQ ID NO: 214218
  derived and/or modified CDS sequence (opt5) from neuraminidase__InfluenzaA__AHL99417

SEQ ID NO: 217088 - RNA, 1410 nt, Artificial Sequence; identical to SEQ ID NO: 214218
  derived and/or modified CDS sequence (opt5) from neuraminidase__InfluenzaA__AHL99429

SEQ ID NO: 217089 - RNA, 1410 nt, Artificial Sequence; identical to SEQ ID NO: 214218
  derived and/or modified CDS sequence (opt5) from neuraminidase__InfluenzaA__AHL99441

SEQ ID NO: 217090 - RNA, 1410 nt, Artificial Sequence; identical to SEQ ID NO: 214218
  derived and/or modified CDS sequence (opt5) from neuraminidase__InfluenzaA__AHL99453

SEQ ID NO: 217091 - RNA, 1410 nt, Artificial Sequence; identical to SEQ ID NO: 214218
  derived and/or modified CDS sequence (opt5) from neuraminidase__InfluenzaA__AHL99477

SEQ ID NO: 217092 - RNA, 1410 nt, Artificial Sequence; identical to SEQ ID NO: 216858
  derived and/or modified CDS sequence (opt5) from neuraminidase__InfluenzaA__AHL99489

SEQ ID NO: 217093 - RNA, 1410 nt, Artificial Sequence
  derived and/or modified CDS sequence (opt5) from neuraminidase__InfluenzaA__AHL99501
augaaccccaaucagaagaucauuaccaucggcagcgugucccugacaauuucuacgaucugcuucuuuaugcaaauugccauccucaucaccacagucacccugcacuucaaacaguacgaguuuaacagcccuccgaauaaccagguuaugcuuugugaacccacaauuaucgagagaaauauuaccgaaaucguguaucugacaaacaccacgauugagaaggaaaucugcccuaaacccgcugaguaccggaauugguccaagccucagugugggauuaccggauucgcccccuuuucuaaagacaacagcauccgccucuccgcgggcggggauaucugggugacaagagagccuuaugucucuugcgacccggauaaguguuaccaauucgcucugggacagggcaccacacuuaauaacgugcauagcaauaacaccguucgggaccgcacgcccuauagaacacugcucaugaaugaacugggggugccuuuucaccugggaaccaagcaggucugcauugccugguccucuagcuccugucaugauggcaaagccuggcuccacgugugcaucacaggcgacgauaagaacgcuaccgccagcuucauuuacaaugggcggcugguugacucuguggucuccuggagcaaagagauccuucgcacccaggaaucugagugugugugcauuaacggaacauguacgguggucaugaccgauggcuccgcuagcgggaaggccgacacaaaaauccuguuuaucgaggaaggaaagauuguucauaccuccacacucucuggcagcgcgcaacacguggaggaaugcuccugcuaucccagauacccuggggugcggugugucugccgcgauaacuggaagggaagcaauagacccaucguggacauuaacaucaaagaucacucuaccguuuccagcuacguguguucuggccuggucggcgacacgccgcggaagaaugacagcuccucuagcucccauugccuugauccuaacaaugaggaagggggacacggcgugaaagggugggccuucgacgauggaaacgacguuuggaugggccgcacaauuaaugagaccagcagacugggguaugagaccuuuaaggugaucgaaggauggucuaaccccaaauccaagcuccagaucaaucggcaggucauuguggaucgcggcgacagaagcggcuacucugggaucuucuccgucgagggaaaaagcuguauuaaccggugcuuuuauguggaacugaucagaggccgcaaggaggaaacagagguucuguggaccuccaauucuauuguggucuucugugggacaagcggaacguacggcaccggguccuggccugauggcgcugaccucaaccugaugcccaucuga

SEQ ID NO: 217094 - RNA, 1410 nt, Artificial Sequence; identical to SEQ ID NO: 214218
  derived and/or modified CDS sequence (opt5) from neuraminidase__InfluenzaA__AHL99525

SEQ ID NO: 217095 - RNA, 1410 nt, Artificial Sequence
  derived and/or modified CDS sequence (opt5) from neuraminidase__InfluenzaA__AHL99537
augaaccccaaucagaagaucauuaccaucggcagcgugucccugacaauuucuacgaucugcuucuuuaugcaaauugccauccucaucaccacagucacccugcacuucaaacaguacgaguuuaacagcccuccgaauaaccagguuaugcuuugugaacccacaauuaucgagagaaauauuaccgaaaucguguaucugacaaacaccacgauugagaaggaaaucugcccuaaacccgcugaguaccggaauugguccaagccucagugugggauuaccggauucgcccccuuuucuaaagacaacagcauccgccucuccgcgggcggggauaucugggugacaagagagccuuaugucucuugcgacccggauaaguguuaccaauucgcucugggacagggcaccacacuuaauaacgugcauagcaauaacaccguucgggaccgcacguccuauagaacacugcucaugaaugaacugggggugcccuuucaccugggaaccaagcaggucugcauugccuggucuagcuccagcugucaugauggcaaagccuggcuccacgugugcaucacaggcgacgauaagaacgcuaccgccucuuucauuuacaaugggcggcugguugacuccguggucagcuggucuaaagagauccuucgcacccaggaauccgagugugugugcauuaacggaacauguacgguggucaugaccgauggcagcgcuuccgggaaggccgacacaaaaauccuguuuaucgaggaaggaaagauuguucauaccucuacacucagcggcuccgcgcaacacguggaggaaugcagcugcuauccuagauaccccggggugcggugugucugccgcgauaacuggaagggaucuaauagaccuaucguggacauuaacaucaaagaucacuccauuguuagcucuuacguguguagcggccuggucggcgacacgccccggaagaaugacuccucuagcuccagccauugccuugauccgaacaaugaggaagggggacacggcgugaaagggugggccuucgacgauggaaacgacguuuggaugggccgcaccaucaaugagacaucuagacugggguaugagaccuuuaaggugaucgaaggaugguccaacccuaaaagcaagcuccagauuaaucggcaggucaucguggaucgcggcgacagaucuggcuacuccgggauuuucagcgucgagggaaaauccuguaucaaccggugcuuuuauguggaacugauuagaggccgcaaggaggaaaccgagguucuguggacaucuaauagcaucguggucuucugugggaccuccggaacauacggcacggggucuuggcccgauggcgcugaccucaaccugaugccuauuuga

SEQ ID NO: 217096 - RNA, 1410 nt, Artificial Sequence; identical to SEQ ID NO: 215955
  derived and/or modified CDS sequence (opt5) from neuraminidase__InfluenzaA__AHL99549

SEQ ID NO: 217097 - RNA, 1410 nt, Artificial Sequence; identical to SEQ ID NO: 214218
  derived and/or modified CDS sequence (opt5) from neuraminidase__InfluenzaA__AHL99561

SEQ ID NO: 217098 - RNA, 1410 nt, Artificial Sequence
  derived and/or modified CDS sequence (opt5) from neuraminidase__InfluenzaA__AHL99573
augaaccccaaucagaagaucauuaccaucggcagcgugucccugacaauuucuacgaucugcuucuuuaugcaaauugccauccucaucaccacagucacccugcacuucaaacaguacgaguuuaacagcccuccgaauaaccagguuaugcuuugugaacccacaauuaucgagagaaauauuaccgaaaucguguaucugacaaacaccacgggggagaaggaaauuugcccuaaacccgcugaguaccggaauugguccaagccucaguguggaaucaccggcuucgcccccuuuucuaaagacaacagcauucgccucuccgcugggggagauaucugggugacaagagagccuuaugucucuugcgacccggauaaguguuaccaauucgcgcugggccaggggaccacacuuaauaacgugcauagcaauaacaccguucgggaccgcacgcccuauagaacacugcucaugaaugaacugggagugccuuuucaccugggcaccaagcaggucugcaucgccugguccucuagcuccugucaugauggcaaagccuggcuccacgugugcauuacaggggacgauaagaacgcuaccgccagcuucaucuacaauggacggcugguugacucuguggucuccuggagcaaagagauucuucgcacccaggaaucugagugugugugcaucaacggcacauguacgguggucaugaccgauggguccgcuagcggaaaggccgacacaaaaauucuguuuaucgaggaaggcaagaucguucauaccuccacacucucugggagcgcgcaacacguggaggaaugcuccugcuaucccagauacccuggagugcggugugucugccgcgauaacuggaagggcagcaauagacccauuaucgacauuaacaucaaagaucacucuauuguguccagcuacguuuguucuggccuggugggggacaccccgcggaagaaugacagcuccucuagcucccauugccuugauccuaacaaugaggaaggaggccacggggucaaaggaugggccuucgacgauggcaacgacguguggauggggcgcacgaucaaugagacaagcagacugggauaugagaccuuuaagguuaucgaaggcuggucuaaccccaaauccaagcuccagauuaaucgccaggugaucgucgauaaaggcgaccggagcggguacucuggaauuuucuccguggagggcaagagcuguaucaacagaugcuuuuaugucgaacugauucgggggagaaaggaggaaaccgaggugcuguggacauccaauucuaucguuguguucuguggaaccagcggcacauacgggacgggcuccuggccugauggagcugaccucaaccugaugcccauuuga

SEQ ID NO: 217099 - RNA, 1410 nt, Artificial Sequence
  derived and/or modified CDS sequence (opt5) from neuraminidase__InfluenzaA__AHL99585
augaaccccaaucagaagaucauuaccaucggcagcgugucccugacaauuucuacgaucugcuucuuuaugcaaauugccauccucaucaccacagucacccugcacuucaaacaguacgaguuuaacagcccuccgaauaaccagguuaugcuuugugaacccacaauuaucgagagaaauauuaccgaaaucguguaucugacaaacaccacgauugagaaggaaaucugcccuaaacccgcugaguaccggaauugguccaagccucagugugggauuaccggauucgcccccuuuucuaaagacaacagcauccgccucuccgcgggcggggauaucugggugacaagagagccuuaugucucuugcgacccggauaaguguuaccaauucgcucugggacagggcaccacacuuaauaacgugcauagcaauaacaccgcccgggaccgcacgcccuauagaacacugcucaugaaugaacuggggguuccuuuucaccugggaaccaaacaggugugcauugccugguccucuagcuccugucaugauggcaaggcuuggcuccacgucugcaucacaggcgacgauaagaacgccaccgcuagcuucauuuacaaugggcggcugguggacucuguuguguccuggagcaaagagauccuucgcacccaggaaucugagugugucugcauuaacggaacauguacgguggugaugaccgauggcuccgccagcgggaaggcggacacaaaaauccuguuuaucgaggaaggaaagauuguccauaccuccacacucucuggcagcgcccaacacguugaggaaugcuccugcuaucccagauacccuggggugcggugugugugccgcgauaacuggaagggaagcaauagacccaucgucgacauuaacaucaaagaucacucuauuguguccagcuacguuuguucuggccuggugggcgacaccccgcggaagaaugacagcuccucuagcucccauugccuuaacccuaauaacgaggaagggggacacggcgucaaagggugggcuuucgaugacggaaaugauguguggaugggccgcacgaucaacgagacaagcagacugggguaugagaccuuuaagguuaucgaaggauggucuaaucccaaauccaagcuccagauuaaccgccaggugaucgucgaccggggcgauagaagcggcuacucugggauuuucuccguggagggaaaaagcuguaucaaucggugcuuuuaugucgaacugauuagaggccgcaaggaggaaaccgaggugcuguggacauccaacucuaucguuguguucugugggaccagcggaacauacggcacgggguccuggccugacggcgccgaucucaaucugaugcccauuuga

SEQ ID NO: 217100 - RNA, 1410 nt, Artificial Sequence
  derived and/or modified CDS sequence (opt5) from neuraminidase__InfluenzaA__AHL99597
augaaccccaaucagaagaucauuaccaucggcagcgugugcaugacaauugggauggccaaccugauccuccaaauuggaaauaucaucuccauuuggaucucucacagcauucaggucggcaaccagucccagaucgagacguguaaucaaucuguuauuaccuacgaaaacaauacaugggugaaccagaccuaugugaauaucagcaacacaaauuucgcugucgggcaguccgugguuucugugaaacuggccggaaacagcucccuuugcccugucagcggcugggcgauuuacucuaaggacaauuccgugagaaucgggagcaaaggagauguuuuugugauccgggagccguucauuucuuguagcccccuggaaugccgcaccuuuuuccucacacagggcgcucugcuuaacgacaagcauuccaauggcaccaucaaagauagaucuccuuaucggacgcugauguccugucccauuggggaggucccuagccccuacaacucccgcuuugaaucuguggccuggagcgccuccgcuugccacgacggaaucaacuggcucaccauuggcaucagcgggccugauucuggagccguggcuguccugaaguauaauggcaucauuacagacaccaucaaguccuggagaaacgauauucugcggacacaagagagcgagugugccugcguuaaugggucuuguuucaccaucaugacggacggaccgagcgauggccaggcguccuacaaaauuuuucgcaucgaaaagggcaaaaucgugaagucuguggagaugaacgcccccaauuaucauuacgaagagugcagcuguuacccugacuccagcgagauuacaugcgucugcagagauaacuggcacgggucuaaucggcccuggguguccuucaaccagaaucucgaauaucagaucggauacauuuguagcggcaucuuuggggacaacccucgccccaaugauaaaaccggaucuugcggcccgguuuccagcaacggggcuaauggagugaagggcuucuccuuuaaguauggcaacggggucuggauuggaagaacaaaaucuaucagcucccggaagggcuucgagaugauuugggacccuaauggguggaccggaaccgacaacaacuuuucuaucaaacaagauaucgugggcauuaaugaauggagcggguacuccggcagcuucguucagcaucccgagcugacaggacuugacuguauccgcccuugcuucuggguggaacugauuagaggccggcccaaggagaacacgaucuggaccucuggguccagcauuucuuuuuguggagucaauuccgauacagugggcuggagcuggcccgacggggccgagcucccuuucaccaucgauaaauga

SEQ ID NO: 217101 - RNA, 1410 nt, Artificial Sequence
  derived and/or modified CDS sequence (opt5) from neuraminidase__InfluenzaA__AHL99608
augaaccccaaucagaagaucauuaccaucggcagcgugucccugacaauuucuacgaucugcgucuucaugcaaauugccauccucaucaccacaguuacccugcacuuuaaacaguacgaguucaacagcccuccgaauaaccaggugaugcuuugugaacccacaauuaucgagagaaauauuaccgaaaucguguaucugacaaacaccacgauugagaaggaaaucugcccuaaacccgcugaguaccggaauugguccaagccucagugugggauuaccggauuugcccccuucucuaaagacaacagcauccgccucuccgcgggcggggauaucugggucacaagagagccuuaugugucuugcgacccggauaaguguuaccaauuugcucugggacagggcaccacacuuaauaacguucauagcaauaacaccgugcgggaccgcacgcccuauagaacacugcucaugaaugaacugggggucccuuuccaccugggaaccaaacaggugugcauugccugguccuccucuuccugucaugauggcaaggccuggcuccacguuugcaucacaggcgacgauaagaacgcuaccgccagcuuuauuuacaaugggcggcugguggacucugucguguccuggagcaaagagauccuucgcacccaggaaucugagugugugugcauuaacggaacauguacggucguuaugaccgauggcuccgcuagcgggaaggccgacacaaaaauccuguucaucgaggaaggaaagauugugcauaccuccacacucucuggcagcgcgcaacacguggaggaaugcuccugcuaucccagauacccugggguccggugugugugccgcgauaacuggaagggaagcaauagacccaucguugacauuaacaucaaagaucacucuauuguguccagcuacgucuguucuggccuggugggcgacaccccgcggaagaaugacagcuccucuagcucccauugccuugauccuaacaaugaggaagggggacacggcguuaaagggugggccuuugacgauggaaacgacguguggaugggccgcacgaucaaugagacaagcagacugggguaugagaccuucaaggucaucgaaggauggucuaaccccaaauccaagcuccagauuaaucgccaggugaucgucgaucggggcgacagaagcggcuacucugggauuuuuagcguggagggaaaaagcuguaucaaccggugcuucuauguugaacugauuagaggccgcaaggaggaaaccgaggugcuguggacauccaauucuaucgucguguuuugugggaccagcggaacauacggcacgggguccuggccugauggcgcugaccucaaccugaugcccauuuga

SEQ ID NO: 217102 - RNA, 1410 nt, Artificial Sequence
  derived and/or modified CDS sequence (opt5) from neuraminidase__InfluenzaA__AHL99620
augaaccccaaucagaagaucauuaccaucggcagcgugucccugacaauuucuacgaucugcuucuuuaugcaaauugccauccucaucaccacagucacccugcacuucaaacaguacgaguuuaacagcccuccgaauaaccagguuaugcuuugugaacccacaauuaucgagagaaauauuaccgaaaucguguaucugacaaacaccacgauugagaaggaaaucugcccuaaacccgcugaguaccggaauugguccaagccucagugugggauuaccggauucgcccccuuuucuaaagacaacagcauccgccucuccgcgggcggggauaucugggugacaagagagccuuaugucucuugcgacccggauaaguguuaccaauucgcucugggacagggcaccacacuuaauaacgugcauagcaauaacaccguucgggaccgcacgcccuauagaacacugcucaugaaugaacugggggugccuuuucaccugggaaccaagcaggucugcauugccugguccucuagcuccugucaugauggcaaagccuggcuccacgugugcaucacaggcgacgauaagaacgcuaccgccagcuucauuuacaaugggaaacugguugacucuguggucuccuggagcaaggagauccuucggacccaggaaucugagugugugugcauuaacggaacauguacgguggucaugaccgauggcuccgcuagcgggaaagccgacacaaagauccuguuuaucgaggaaggaaagauuguucauaccuccacacucucuggcagcgcgcaacacguggaggaaugcuccugcuauccccgcuacccuggggugagaugugucugccgggauaacuggaaaggaagcaaucgccccaucguggacauuaacaucaaggaucacucuauuguuuccagcuacguguguucuggccuggucggcgacaccccgcggaaaaaugacagcuccucuagcucccauugccuugauccuaacaaugaggaagggggacacggcgugaaggggugggccuucgacgauggaaacgacguuuggaugggcagaacgaucaaugagacaagccgccugggguaugagaccuuuaaagugaucgaaggauggucuaaccccaaguccaaacuccagauuaauagacaggucaucguggaucggggcgaccgcagcggcuacucugggauuuucuccgucgagggaaagagcuguaucaacagaugcuuuuauguggaacugauucggggcagaaaggaggaaaccgagguucuguggacauccaauucuaucguggucuucugugggaccagcggaacauacggcacgggguccuggccugauggcgcugaccucaaccugaugcccauuuga

SEQ ID NO: 217103 - RNA, 1410 nt, Artificial Sequence
  derived and/or modified CDS sequence (opt5) from neuraminidase__InfluenzaA__AHL99632
augaaccccaaucagaagaucauuaccaucggcagcgugucccugacaauuucuacgaucugcuucuuuaugcaaauugccauccucaucaccacagucacccugcacuucaaacaguacgaguuuaacagcccuccgaauaaccagguuaugcuuugugaacccacaaccauugagagaaauaucacagaaauuguguaucugaccaacacgaccaucgagaaggaaauuugcccuaaacccgcugaguaccggaauugguccaagccucagugugggaucacaggauucgcccccuuuucuaaagacaacagcauucgccucuccgcgggcggggauaucugggugaccagagagccuuaugucucuugcgacccggauaaguguuaccaauucgcucugggacagggcacaacccuuaauaacgugcauagcaauaacacgguucgggaccgcacacccuauagaacccugcucaugaaugaacugggggugccuuuucaccugggaacaaagcaggucugcaucgccugguccucuagcuccugucaugauggcaaagccuggcuccacgugugcauuaccggcgacgauaagaacgcuaccgccagcuucaucuacaaugggcggcugguugacucuguggucuccuggagcaaagagauucuucgcacacaggaaucugagugugugugcaucaacggaacguguaccguggucaugacagauggcuccgcuagcgggaaggccgacaccaaaauucuguuuaucgaggaaggaaagaucguucauacauccacccucucuggcagcgcgcaacacguggaggaaugcuccugcuaucccagauacccuggggugcggugugucugccgcgauaacuggaagggaagcaauagacccauuguggacaucaacauuaaagaucacucuaucguuuccagcuacguguguucuggccuggucggcgacacgccgcggaagaaugacagcuccucuagcucccauugccuugauccuaacaaugaggaagggggacacggcgugaaagggugggccuucgacgauggaaacgacguuuggaugggccgcacaauuaaugagaccagcagacugggguaugagaccuuuaaggugaucgaaggauggucuaaccccaaauccaagcuccagaucaaucggcaggucauuguggaucgcggcgacagaagcggcuacucugggaucuucuccgucgagggaaaaagcuguauuaaccggugcuuuuauguggaacugaucagaggccgcaaggaggaaacagagguucuguggaccuccaauucuauuguggucuucugugggacaagcggaacguacggcaccggguccuggccugauggcgcugaccucaaccugaugcccaucuga

SEQ ID NO: 217104 - RNA, 1410 nt, Artificial Sequence; identical to SEQ ID NO: 216893
  derived and/or modified CDS sequence (opt5) from neuraminidase__InfluenzaA__AHL99644

SEQ ID NO: 217105 - RNA, 1410 nt, Artificial Sequence
  derived and/or modified CDS sequence (opt5) from neuraminidase__InfluenzaA__AHL99668
augaaccccaaucagaagaucauuaccaucggcagcgugucccugacaauuucuacgaucugcuucuuuaugcaaauugccauccucaucaccacagucacccugcacuucaaacaguacgaguuuaacagcccuccgaauaaccagguuaugcuuugugaacccacaauuaucgagagaaauauuaccgaaaucguguaucugacaaacaccacgguggagaaggaaauuugcccuaaacccgcugaguaccggaauugguccaagccucagugugggaucaccggauucgcccccuuuucuaaagacaacagcauucgccucuccgcgggcggggauaucugggucacaagagagccuuaugugucuugcgacccggauaaguguuaccaauucgcucugggacagggcaccacacuuaauaacguucauagcaauaacaccgugcgggaccgcacgcccuauagaacacugcucaugaaugaacugggggucccuuuucaccugggaaccaaacaggugugcaucgccugguccucuagcuccugucaugauggcaaggccuggcuccacguuugcauuacaggcgacgauaagaacgcuaccgccagcuucaucuacaaugggcggcugguggacucugucguguccuggagcaaagagauucuucgcacccaggaaucugagugugugugcaucaacggaacauguacggucguuaugaccgauggcuccgcuagcgggaaggccgacacaaaaauucuguuuaucgaggaaggaaagaucgugcauaccuccacacucucuggcagcgcgcaacacguggaggaaugcuccugcuaucccagauacccugggguccggugugugugccgcgauaacuggaagggaagcaauagacccauuaucgacauuaacaucaaagaucacucuauuguuuccagcuacguguguucuggccuggucggcgacaccccgcggaagaaugacagcuccucuagcucccauugccuugauccuaacaaugaggaagggggacacggcgugaaagggugggccuucgacgauggaaacgacguuuggaugggccgcacgaucaaugagacaagcagacugggguaugagaccuuuaaggugaucgaaggauggucuaaccccaaauccaagcuccagauuaaucggcaggucaucguggaucgcggcgacagaagcggcuacucugggauuuucuccgucgagggaaaaagcuguaucaaccggugcuuuuauguggaacugauuagaggccgcaaggaggaaaccgagguucuguggacauccaauucuaucguggucuucugugggaccagcggaacauacggcacgggguccuggccugauggcgcugaccucaaccugaugcccauuuga

SEQ ID NO: 217106 - RNA, 1410 nt, Artificial Sequence; identical to SEQ ID NO: 214218
  derived and/or modified CDS sequence (opt5) from neuraminidase__InfluenzaA__AHL99680

SEQ ID NO: 217107 - RNA, 1410 nt, Artificial Sequence
  derived and/or modified CDS sequence (opt5) from neuraminidase__InfluenzaA__AHL99692
augaaccccaaucagaagaucauuaccaucggcagcgugucccugacaauuucuacgaccugcuucuuuaugcaaaucgccauucucaucacaaccgucacacugcacuucaaacaguacgaguuuaacagcccuccgaauaaccagguuaugcuuugugaacccaccaucauugagagaaauaucacagaaauuguguaucugaccaacacgaccaucgagaaggaaauuugcccuaaacccgcugaguaccggaauugguccaagccucagugugggaucacaggauucgcccccuuuucuaaagacaacagcauucgccucuccgcgggcggggauaucugggugaccagagagccuuaugucucuugcgacccggauaaguguuaccaauucgcucugggacagggcacaacccuuaauaacgugcauagcaauaacacgguucgggaccgcacacccuauagaacccugcucaugaaugaacugggggugccuuuucaccugggaacaaagcaggucugcaucgccugguccucuagcuccugucaugauggcaaagccuggcuccacgugugcauuaccggcgacgauaagaacgcuaccgccagcuucaucuacaaugggcggcugguugacucuguggucuccuggagcaaagagauucuucgcacacaggaaucugagugugugugcaucaacggaacguguaccguggucaugacagauggcuccgcuagcgggaaggccgacaccaaaauucuguuuaucgaggaaggaaagaucguucauacauccacccucucuggcagcgcgcaacacguggaggaaugcuccugcuaucccagauacccuggggugcggugugucugccgcgauaacuggaagggaagcaauagacccauuguggacaucaacauuaaagaucacucuaucguuuccagcuacguguguucuggccuggucggcgacacgccgcggaagaaugacagcuccucuagcucccauugccuugauccuaacaaugaggaagggggacacggcgugaaagggugggccuucgacgauggaaacgacguuuggaugggccgcacaauuaaugagaccagcagacugggguaugagaccuuuaaggugaucgaaggauggucuaaccccaaauccaagcuccagaucaaucggcaggucauuguggaucgcggcgacagaagcggcuacucugggaucuucuccgucgagggaaaaagcuguauuaaccggugcuuuuauguggaacugaucagaggccgcaaggaggaaacagagguucuguggaccuccaauucuauuguggucuucugugggacaagcggaacguacggcaccggguccuggccugauggcgcugaccucaaccugaugcccaucuga

SEQ ID NO: 217108 - RNA, 1410 nt, Artificial Sequence; identical to SEQ ID NO: 214218
  derived and/or modified CDS sequence (opt5) from neuraminidase__InfluenzaA__AHL99704

SEQ ID NO: 217109 - RNA, 1410 nt, Artificial Sequence; identical to SEQ ID NO: 214218
  derived and/or modified CDS sequence (opt5) from neuraminidase__InfluenzaA__AHL99716

SEQ ID NO: 217110 - RNA, 1410 nt, Artificial Sequence; identical to SEQ ID NO: 217100
  derived and/or modified CDS sequence (opt5) from neuraminidase__InfluenzaA__AHL99740

SEQ ID NO: 217111 - RNA, 1410 nt, Artificial Sequence
  derived and/or modified CDS sequence (opt5) from neuraminidase__InfluenzaA__AHL99751
augaaccccaaucagaagaucauuaccaucggcagcgugucccugacaauuucuacgaucugcuucuuuaugcaaauugccauccucaucaccacagucacccugcacuucaaacaguacgaguuuaacagcccuccgaauaaccagguuaugcuuugugaacccacaauuaucgagagaaauauuaccgaaaucguguaucugacaaacaccacgguggagaaggaaauuugcccuaaacccgcugaguaccggaauugguccaagccucagugugggaucaccggauucgcccccuuuucuaaagacaacagcauucgccucuccgcgggcggggauaucugggucacaagagagccuuaugugucuugcgacccggauaaguguuaccaauucgcucugggacagggcaccacacuuaauaacguucauagcaauaacaccgcccgggaccgcacgcccuauagaacacugcucaugaaugaacugggggugccuuuucaccugggaaccaagcaggucugcaucgccugguccucuagcuccugucaugauggcaaggcuuggcuccacgugugcauuacaggcgacgauaaaaacgccaccgcuagcuucaucuacaaugggcggcugguugacucuguggucuccuggagcaaagagauucuucgcacccaggaaucugagugugugugcaucaacggaacauguacgguggucaugaccgauggcuccgccagcgggaaggcggacacaaaaauucuguuuaucgaggaaggaaagaucguucauaccuccacacucucuggcagcgcccaacacguggaggaaugcuccugcuaucccagauacccuggggugcggugugucugccgcgauaacuggaagggaagcaauagacccauuguggacaucaacauuaaagaucacucuaucguuuccagcuacguguguucuggccuggucggcgacaccccgcggaagaaugacagcuccucuagcucccauugccuuaacccuaauaacgaggaagggggacacggcgugaaagggugggcuuucgaugacggaaaugauguuuggaugggccgcacgauuaacgagacaagcagacugggguaugagaccuuuaaggugaucgaaggauggucuaaucccaaauccaagcuccagaucaaccggcaggucauuguggaccgcggcgauagaagcggcuacucugggaucuucuccgucgagggaaaaagcuguauuaaucggugcuuuuauguggaacugaucagaggccgcaaggaggaaaccgagguucuguggacauccaacucuauuguggucuucugugggaccagcggaacauacggcacgggguccuggccugacggcgccgaucucaaucugaugcccaucuga

SEQ ID NO: 217112 - RNA, 1410 nt, Artificial Sequence
  derived and/or modified CDS sequence (opt5) from neuraminidase__InfluenzaA__AHL99763
augaaccccaaucagaagaucauuaccaucggcagcgugucccugacaauuucuacgaucugcuucuuuaugcaaauugccauccucaucaccacagucacccugcacuucaaacaguacgaguuuaacagcccuccgaauaaccagguuaugcuuugugaacccacaauuaucgagagaaauauuaccgaaaucguguaucugacaaacaccacgauugagaaggaaaucugcccuaaacccgcugaguaccggaauugguccaagccucagugugggauuaccggauucgcccccuuuucuaaagacaacagcauccgccucuccgcgggcggggauaucugggugacaagagagccuuaugucucuugcgacccggauaaguguuaccaauucgcucugggacagggcaccacacuuaauaacgugcauagcaauaacaccguucgggaccgcacgcccuauagaacacugcucaugaaugaacugggggugccuuuucaccugggaaccaagcaggucugcauugccugguccucuagcuccugucaugauggcaaagccuggcuccacgugugcaucacaggcgacgauaagaacgcuaccgccagcuucauuuacaaugggcggcugguugacucuguggucuccuggagcaaagagauccuucgcacccaggaaucugagugugugugcauuaacggaacauguacgguggucaugaccgauggcuccgcuagcgggaaggccgacacaaaaauccuguuuaucgaggaaggaaagauuguucauaccuccacacucucuggcagcgcgcaacacguggaggaaugcuccugcuaucccagauacccuggggugcggugugucugccgcgauaacuggaagggaagcaauagacccaucguggacauuaacaucaaagaucacucuauuguuuccagcuacguguguucuggccuggucggcgacaccccgcggaagaaugacagcuccucuagcucccauugccuugauccuaacaaugaggaagggggacacggcgugaaagggugggccuucgacgauggaaacgacguuuggaugggccgcacgaucaaugagacaagcagacugggguaugagaccuuuaaggugaucgaaggauggucuaaccccaaauccaagcuccagaugaaucggcaggucauuguggaucgcggcgacagaagcggcuacucugggaucuucuccgucgagggaaaaagcuguauuaaccggugcuuuuauguggaacugaucagaggccgcaaggaggaaaccgagguucuguggacauccaauucuauuguggucuucugugggaccagcggaacauacggcacgggguccuggccugauggcgcugaccucaaccugaugcccaucuga

SEQ ID NO: 217113 - RNA, 1410 nt, Artificial Sequence; identical to SEQ ID NO: 214218
  derived and/or modified CDS sequence (opt5) from neuraminidase__InfluenzaA__AHL99775

SEQ ID NO: 217114 - RNA, 1410 nt, Artificial Sequence
  derived and/or modified CDS sequence (opt5) from neuraminidase__InfluenzaA__AHL99787
augaaccccaaucagaagaucauuaccaucggcagcgugucccugacaauuucuacgaucugcuucuuuaugcaaauugccauccucaucaccacagucacccugcacuucaaacaguacgaguuuaacagcccuccgaauaaccagguuaugcuuugugaacccacaauuaucgagagaaauauuaccgaaaucguguaucugacaaacaccacgauugagaaggaaaucugcccuaaacccgcugaguaccggaauugguccaagccucagugugggauuaccggauucgcccccuuuucuaaagacaacagcauccgccucuccgcgggcggggauaucugggugacaagagagccuuaugucucuugcgacccggauaaguguuaccaauucgcucugggacagggcaccacacuuaauaacgugcauagcaauaacaccguucgggaccgcacgcccuauagaacacugcucaugaaugaacugggggugccuuuucaccugggaaccaagcaggucugcauugccugguccucuagcuccugucaugauggcaaagccuggcuccacgugugcaucacaggcgacgauaagaacgcuaccgccagcuucauuuacaaugggcggcugguugacucuguggucuccuggagcaaagagauccuucgcacccaggaaucugagugugugugcauuaacggaacauguacgguggucaugaccgauggcuccgcuagcgggaaggccgacacaaaaauccuguuuaucgaggaaggaaagauuguucauaccuccacacucucuggcagcgcgcaacacguggaggaaugcuccugcuaucccagauacccuggggugcggugugucugccgcgauaacuggaagggaagcaauagacccaucguggacauuaacaucaaagaucacucuauuguuuccagcuacguguguucuggccuggucggcgacaccccgcggaagaaugacagcuccucuagcucccauugccuugauccuaacaaugaggaagggggacacggcgugaaagggugggccuucgacgauggaaacgacguuuggaugggccgcacgaucaaugagacaagcagacugggguaugagaccuuuaaggugaucgaaggauggucuaaccccgaguccaaacuccagauuaaucggcaggucaucguggaucgcggcgacagaagcggcuacucugggauuuucuccgucgaaggaaagagcuguaucaaccggugcuuuuauguggagcugauuagaggccgcaaagaagagaccgagguucuguggacauccaauucuaucguggucuucugugggaccagcggaacauacggcacgggguccuggccugauggcgcugaccucaaccugaugcccauuuga

SEQ ID NO: 217115 - RNA, 1410 nt, Artificial Sequence
  derived and/or modified CDS sequence (opt5) from neuraminidase__InfluenzaA__AHL99799
augaaccccaaucagaagaucauuaccaucggcagcgugucccugacaauuucuacgaucugcuucuuuaugcaaauugccauccucaucaccacagucacccugcacuucaaacaguacgaguuuaacagcccuccgaauaaccagguuaugcuuugugaacccacaauuaucgagagaaauauuaccgaaaucguguaucugacaaacaccacgauugagaaggaaaucugcccuaaacccgcugaguaccggaauugguccaagccucagugugggauuaccggauucgcccccuuuucuaaagacaacagcauccgccucuccgcgggcggggauaucugggugacaagagagccuuaugucucuugcgacccggauaaguguuaccaauucgcucugggacagggcaccacacuuaauaacgugcauagcaauaacaccguucgggaccgcacgcccuauagaacacugcucaugaaugaacugggggugccuuuucaccugggaaccaagcaggucugcauugccugguccucuagcuccugucaugauggcaaagccuggcuccacgugugcaucacaggcgacgauaagaacgcuaccgccagcuucauuuacaaugggcggcugguugacucuguggucuccuggagcaaagagauccuucgcacccaggaaucugagugugugugcauuaacggaacauguacgguggucaugaccgauggcuccgcuagcgggaaggccgacacaaaaauccuguuuaucgaggaaggaaagauuguucauaccuccacacucucuggcagcgcgcaacacguggaggaaugcuccugcuaucccagauacccuggggugcgguguaucugccgcgauaacuggaagggaagcaauagacccauugucgacaucaacauuaaagaucacucuaucguguccagcuacguuuguucuggccuggugggcgacaccccgcggaagaaugacagcuccucuagcucccauugccuugggccuaacaaugaggaaggaggccacggggucaaaggaugggccuucgaugacggcaacgauguguggauggggcgcacgaucaaugagacaagcagacugggauaugagaccuuuaagguuauugaaggcuggucuaaccccaaauccaagcuccagaucaaucgccaggugauugucgaccggggcgauagaagcggguacucuggaaucuucuccguggagggcaaaagcuguauuaaccggugcuuuuaugucgaacugaucagagggcgcaaggaggaaaccgaggugcuguggacauccaauucuauuguuguguucuguggaaccagcggcacauacgggacgggcuccuggccugacggagcugaucucaaccugaugcccaucuga

SEQ ID NO: 217116 - RNA, 1410 nt, Artificial Sequence; identical to SEQ ID NO: 214218
  derived and/or modified CDS sequence (opt5) from neuraminidase__InfluenzaA__AHL99811

SEQ ID NO: 217117 - RNA, 1410 nt, Artificial Sequence
  derived and/or modified CDS sequence (opt5) from neuraminidase__InfluenzaA__AHL99823
augaaccccaaucagaagaucauuaccaucggcagcgugucccugacaauuucuacgaucugcuucuuuaugcaaauugccauccucaucaccacagucacccugcacuucaaacaguacgaguuuaacagcccuccgaauaaccagguuaugcuuugugaacccacaauuaucgagagaaauauuaccgaaaucguguaucugacaaacaccacgauugagaaggaaaucugcccuaaacccgcugaguaccggaauugguccaagccucagugugggauuaccggauucgcccccuuuucuaaagacaacagcauccgccucuccgcgggcggggauaucugggugacaagagagccuuaugucucuugcgacccggauaaguguuaccaauucgcucugggacagggcaccacacuuaauaacgugcauagcaauaacaccguucgggaccgcacgcccuauagaacacugcucaugaaugaacugggggugccuuuucaccugggaaccaagcaggucugcauugccugguccucuagcuccugucaugauggcaaagccuggcuccacgugugcaucacaggcgacgauaagaacgcuaccgccagcuucauuuacaaugggcggcugguugacucuguggucuccuggagcaaagagauccuucgcacccaggaaucugagugugugugcauuaacggaacaugugcuguggucaugacggauggcuccgccagcgggaaggcggacaccaaaauccuguuuaucgaggaaggaaagauuguucauacauccacccucucuggcagcgcccaacacguggaggaaugcuccugcuaucccagauacccuggggugcggugugucugccgcgauaacuggaagggaagcaauagacccaucguggacauuaacaucaaagaucacucuauuguuuccagcuacguguguucuggccuggucggcgacacaccgcggaagaaugacagcuccucuagcucccauugccuugauccuaacaaugaggaagggggacacggcgugaaagggugggcuuucgacgauggaaacgacguuuggaugggccgcaccaucaaugagacgagcagacugggguaugagacauuuaaggugaucgaaggauggucuaaccccaaauccaagcuccagauuaaucggcaggucaucguggaucgcggcgacagaagcggcuacucugggauuuucuccgucgagggaaaaagcuguaucaaccggugcuuuuauguggaacugauuagaggccgcaaggaggaaaccgagguucuguggaccuccaauucuaucguggucuucugugggacaagcggaaccuacggcacaggguccuggccugauggcgccgaccucaaccugaugcccauuuga

SEQ ID NO: 217118 - RNA, 1410 nt, Artificial Sequence
  derived and/or modified CDS sequence (opt5) from neuraminidase__InfluenzaA__AHL99835
augaaccccaaucagaagaucauuaccaucggcagcgugucccugacaauuucuacgaucugcuucuuuaugcaaauugccauccucaucaccacagucacccugcacuucaaacaguacgaguuuaacagcccuccgaauaaccagguuaugcuuugugaacccacaauuaucgagagaaauauuaccgaaaucguguaucugacaaacaccacgauugagaaggaaaucugcccuaaacccgcugaguaccggaauugguccaagccucagugugggauuaccggauucgcccccuuuucuaaagacaacagcauccgccucuccgcgggcggggauaucugggugacaagagagccuuaugucucuugcgcuccggacaaguguuaccaauucgcccugggacagggcaccacacuuaauaacgugcauagcaauaacaccguucgggaucgcacgcccuauagaacacugcucaugaaugaacugggggugccuuuucaccugggaaccaagcaggucugcauugccugguccucuagcuccugucaugacggcaaggcuuggcuccacgugugcaucacaggcgaugacaaaaacgccaccgcuagcuucauuuacaaugggcggcugguugauucuguggucuccuggagcaaagagauccuucgcacccaggaaucugagugugugugcauuaacggaacauguacgguggucaugaccgacggcuccgccagcgggaaggcggauacaaaaauccuguuuaucgaggaaggaaagauuguucauaccuccacacucucuggcagcgcccaacacguggaggaaugcuccugcuaucccagauacccuggggugcggugugucugccgcgacaacuggaagggaagcaauagacccaucguggauauuaacaucaaagaccacucuauuguuuccagcuacguguguucuggccuggucggcgauaccccgcggaagaaugacagcuccucuagcucccauugccuugacccuaacaaugaggaagggggacacggcgugaaagggugggcuuucgaugacggaaacgauguuuggaugggccgcacgaucaaugagacaagcagacugggguaugagaccuuuaaggugaucgaaggauggucuaaccccaaauccaagcuccugauuaaucggcaggucaucguggaccgcggcgauagaagcggcuacucugggauuuucuccgucgagggaaaaagcuguaucaaccggugcuuuuauguggaacugauuagaggccgcaaggaggaaaccgagguucucuggacauccaauucuaucguggucuucugugggaccagcggaacauacggcacgggguccuggccugacggcgccgaucugaaccuuaugcccauuuga

SEQ ID NO: 217119 - RNA, 1410 nt, Artificial Sequence; identical to SEQ ID NO: 214218
  derived and/or modified CDS sequence (opt5) from neuraminidase__InfluenzaA__AHL99847

SEQ ID NO: 217120 - RNA, 1410 nt, Artificial Sequence; identical to SEQ ID NO: 215447
  derived and/or modified CDS sequence (opt5) from neuraminidase__InfluenzaA__AHL99859

SEQ ID NO: 217121 - RNA, 1410 nt, Artificial Sequence
  derived and/or modified CDS sequence (opt5) from neuraminidase__InfluenzaA__AHL99871
augaaccccaaucagaagaucauuaccaucggcagcgugucccugacaauuucuacgaucugcuucuuuaugcaaauugccauccucaccacaaccgucacacugcacuucaaacaguacgaguuuaacagcccuccgaauaaccagguuaugcuuugugaacccaccaucauugagagaaauaucacagaaauuguguaucugaccaacacgaccaucgagaaggaaauuugcccuaaacccgcugaguaccggaauugguccaagccucagugugacaucacaggguucgcccccuuuucuaaagauaacagcauucgccucuccgcgggaggcgacaucugggugaccagagagccuuaugucucuugcgauccggacaaguguuaccaauucgcucuggggcagggaacaacccuuaauaacgugcauagcaauaacacgguucgggaucgcacacccuauagaacccugcucaugaaugaacugggcgugccuuuucaccuggggacaaagcaggucugcaucgccugguccucuagcuccugucaugacggaaaagccuggcuccacgugugcauuaccggcgaugacaagaacgcuaccgccagcuucaucuacaauggccggcugguugauucuguggucuccuggagcaaagagauucuucgcacacaggaaucugagugugugugcaucaacgggacguguaccguggucaugacagacggauccgcuagcggcaaggccgauaccaaaauucuguuuaucgaggaagggagaaucguucauacauccacccucucuggaagcgcgcaacacguggaggaaugcuccugcuauccccgguacccuggcgugcgcugugucugcagagacaacuggaaggggagcaaucggcccauuguggauaucaacauuaaggaccacucuaucguuucccgcuacguguguagcggacuggucggcgacacgccgcggaaaaaugauucuagcuccucuagccauugccuugacccuaacaaugaggaaggcgggcacggagugaagggcugggccuucgaugacgggaacgauguuuggaugggaagaacaauuaaugagaccucccgccugggcuaugagaccuuuaaagugaucgaaggguggagcaaccccaagucuaaacuccagaucaauagacaggucauuguggaccggggagauagauccggcuacagcggcaucuucucugucgaggggaaguccuguauuaaccgcugcuuuuauguggaacugauccggggaagaaaagaggaaacagagguucuguggaccagcaauuccauuguggucuucuguggcacaucugggacguacggaaccggcagcuggccugacggggcugaucucaaccugaugcccaucuga

SEQ ID NO: 217122 - RNA, 1410 nt, Artificial Sequence; identical to SEQ ID NO: 214218
  derived and/or modified CDS sequence (opt5) from neuraminidase__InfluenzaA__AHL99883

SEQ ID NO: 217123 - RNA, 1410 nt, Artificial Sequence; identical to SEQ ID NO: 217099
  derived and/or modified CDS sequence (opt5) from neuraminidase__InfluenzaA__AHL99895

SEQ ID NO: 217124 - RNA, 1410 nt, Artificial Sequence; identical to SEQ ID NO: 214218
  derived and/or modified CDS sequence (opt5) from neuraminidase__InfluenzaA__AHL99907

SEQ ID NO: 217125 - RNA, 1410 nt, Artificial Sequence; identical to SEQ ID NO: 214218
  derived and/or modified CDS sequence (opt5) from neuraminidase__InfluenzaA__AHL99919

SEQ ID NO: 217126 - RNA, 1410 nt, Artificial Sequence
  derived and/or modified CDS sequence (opt5) from neuraminidase__InfluenzaA__AHL99943
augaaccccaaucagaagaucauuaccaucggcagcgugucccugacaauuucuacgaucugcuucuuuaugcaaauugccauccucaucaccacagucacccugcacuucaaacagcaugaguuuaacagcccuccgaauaaccagguuaugcuuugugaacccacaauuaucgagagaaauauuaccgaaaucguguaccugacaaacaccacgauugagaaggaaaucugcccuaaacccgcugaguaucggaauugguccaagccucagugugggauuaccggauucgcccccuuuucuaaagacaacagcauccgccucuccgcgggcggggauaucugggugacaagagagccuuacgucucuugcgacccggauaaguguuaucaauucgcucugggacagggcaccacacuuaauaacgugcacagcaauaacaccguucgggaccgcacgcccuacagaacacugcucaugaaugaacugggggugccuuuucaucugggaaccaagcaggucugcauugccugguccucuagcuccugucacgauggcaaagccuggcuccaugugugcaucacaggcgacgauaagaacgcuaccgccagcuucauuuauaaugggcggcugguugacucuguggucuccuggagcaaagagauccuucgcacccaggaaucugagugugugugcauuaacggaacauguacgguggucaugaccgauggcuccgcuagcgggaaggccgacacaaaaauccuguuuaucgaggaaggaaagauuguucacaccuccacacucucuggcagcgcgcaacacguggaggaaugcuccugcuaccccagauauccuggggugcggugugucugccgcgauaacuggaagggaagcaauagacccaucguggacauuaacaucaaagaucauucuauuguuuccagcuacguguguucuggccuggucggcgacaccccgcggaagaaugacagcuccucuagcucccacugccuugauccuaacaaugaggaagggggacauggcgugaaagggugggccuucgacgauggaaacgacguuuggaugggccgcacgaucaaugagacaagcagacugggguacgagaccuuuaaggugaucgaaggauggucuaaccccaaauccaagcuccagauuaaucggcaggucaucguggaucgcggcgacagaagcggcuauucugggauuuucuccgucgagggaaaaagcuguaucaaccggugcuuuuacguggaacugauuagaggccgcaaggaggaaaccgagguucuguggacauccaauucuaucguggucuucugugggaccagcggaacauauggcacgggguccuggccugauggcgcugaccucaaccugaugcccauuuga

SEQ ID NO: 217127 - RNA, 1410 nt, Artificial Sequence; identical to SEQ ID NO: 214218
  derived and/or modified CDS sequence (opt5) from neuraminidase__InfluenzaA__AHL99955

SEQ ID NO: 217128 - RNA, 1410 nt, Artificial Sequence
  derived and/or modified CDS sequence (opt5) from neuraminidase__InfluenzaA__AHL99967
augaaccccaaucagaagaucauuaccaucggcagcgugucccugacaauuucuacgaucugcuucuuuaugcaaauugccauccucaucaccacagucacccugcacuucaaacaguacgaguuuaacagcccuccgaauaaccagguuaugcuuugugaacccacaauuaucgagagaaauauuaccgaaaucguguaucugacaaacaccacgauugagaaggaaaucugcccuaaacccgcugaguaccggaauugguccaagccucagugugggauuaccggauucgcccccuuuucuaaagacaacagcauccgccucuccgcgggcggggauaucugggugacaagagagccuuaugucucuugcgacccggauaaguguuaccaauucgcucugggacagggcaccacacuuaauaacgugcauagcaauaacaccguucacgaccggacgcccuaucgcacacugcucaugaaugaacugggggugccuuuucaucugggaaccaagcaggucugcauugccugguccucuagcuccugucacgauggcaaagccuggcuccaugugugcaucacaggcgacgauaagaacgcuaccgccagcuucauuuacaaugggagacugguugacucuguggucuccuggagcaaagagauccuucggacccaggaaucugagugugugugcauuaacggaacauguacgguggucaugaccgauggcuccgcuagcgggaaggccgacacaaaaauccuguuuaucgaggaaggaaagauuguucacaccuccacacucucuggcagcgcgcaacacguggaggaaugcuccugcuauccccgcuacccuggggugagaugugucugccgggauaacuggaagggaagcaaucgccccaucguggacauuaacaugaaagaucauucuaucguuuccagcuacguguguucuggccuggucggcgacaccccgagaaagaaugacagcuccucuagcucccacugccuugauccuaacaaugaggaagggggacauggcgugaaagggugggccuucgacgauggaaacgacguuuggaugggccggacgauuaaugagacaagccgccugggguaugagaccuuuaaggugaucgaaggauggucuaaccccaaauccaagcuccagaucaauagacaggucauuguggaucggggcgaccgcagcggcuacucugggaucuucuccgucgagggaaaaagcuguauuaacagaugcuuuuauguggaacugauccggggcagaaaggaggaaaccgagguucuguggacauccaauucuauuguggucuucugugggaccagcggaacauacggcacgggguccuggccugauggcgcugaccucaaccugaugcccaucuga

SEQ ID NO: 217129 - RNA, 1410 nt, Artificial Sequence
  derived and/or modified CDS sequence (opt5) from neuraminidase__InfluenzaA__AHL99979
augaaccccaaucagaagaucauuaccaucggcagcgugucccugacaauuucuacgaucugcuucuuuaugcaaauugccauccucaucaccacagucgcucugcacuucaaacagcaugaguuuaacagcccuccgaauaaccagguuaugcuuugugaacccaccauuaucgagagaaauauuacagaaaucguguaccugaccaacacaaccauugagaaggaaaucugcccuaaacccgccgaguaucggaauugguccaagccucagugugggauuacgggauucgcgcccuuuucuaaagacaacagcauccgccucuccgcuggcggggauaucugggugaccagagagccuuacgucucuugcgacccggauaaguguuaucaauucgcccugggacagggcacaacccuuaauaacgugcacagcaauaacacaguucgggaccgcacccccuacagaacgcugcucaugaaugaacugggggugccuuuucaucugggaacaaagcaggucugcauugccugguccucuagcuccugucacgauggcaaggcuuggcuccaugugugcaucaccggcgacgauaaaaacgccacagcuagcuucauuuauaaugggcggcugguugacucuguggucuccuggagcaaagagauccuucgcacccaggaaucugagugugugugcauuaacggaaccuguacaguggucaugacggauggcuccgccagcgggaaggcggacaccaaaauccuguuuaucgaggaaggaaagauuguucacacauccacccucucuggcagcgcccaacacguggaggaaugcuccugcuaccccagauauccuggggugcggugugucugccgcgauaacuggaagggaagcaauagacccaucguggacauuaacaucaaagaucauucuauuguuuccagcuacguguguucuggccuggucggcgacacaccgcggaagaaugacagcuccucuagcucccacugccuugauccuaacaaugaggaagggggacauggcgugaaagggugggcuuucgacgauggaaacgacguuuggaugggccgcaccaucaaugagacgagcagacugggguacgagacauuuaaggugaucgaaggauggucuaaccccaaauccaagcuccagauuaaucggcaggucaucguggaucgcggcgacagaagcggcuauucugggauuuucuccgucgagggaaaaagcuguaucaaccggugcuuuuacguggaacugauuagaggccgcaaggaggaaaccgagguucuguggaccuccaauucuaucguggucuucugugggacaagcggaaccuauggcacaggguccuggccugauggcgccgaccucaaccugaugcccauuuga

SEQ ID NO: 217130 - RNA, 1410 nt, Artificial Sequence; identical to SEQ ID NO: 217126
  derived and/or modified CDS sequence (opt5) from neuraminidase__InfluenzaA__AHL99991

SEQ ID NO: 217131 - RNA, 1410 nt, Artificial Sequence; identical to SEQ ID NO: 214218
  derived and/or modified CDS sequence (opt5) from neuraminidase__InfluenzaA__AHM00004

SEQ ID NO: 217132 - RNA, 1410 nt, Artificial Sequence; identical to SEQ ID NO: 214218
  derived and/or modified CDS sequence (opt5) from neuraminidase__InfluenzaA__AHM00016

SEQ ID NO: 217133 - RNA, 1410 nt, Artificial Sequence; identical to SEQ ID NO: 214218
  derived and/or modified CDS sequence (opt5) from neuraminidase__InfluenzaA__AHM00028

SEQ ID NO: 217134 - RNA, 1410 nt, Artificial Sequence; identical to SEQ ID NO: 217126
  derived and/or modified CDS sequence (opt5) from neuraminidase__InfluenzaA__AHM00040

SEQ ID NO: 217135 - RNA, 1410 nt, Artificial Sequence; identical to SEQ ID NO: 214218
  derived and/or modified CDS sequence (opt5) from neuraminidase__InfluenzaA__AHM00052

SEQ ID NO: 217136 - RNA, 1410 nt, Artificial Sequence; identical to SEQ ID NO: 215082
  derived and/or modified CDS sequence (opt5) from neuraminidase__InfluenzaA__AHM00064

SEQ ID NO: 217137 - RNA, 1410 nt, Artificial Sequence; identical to SEQ ID NO: 214218
  derived and/or modified CDS sequence (opt5) from neuraminidase__InfluenzaA__AHM00076

SEQ ID NO: 217138 - RNA, 1410 nt, Artificial Sequence; identical to SEQ ID NO: 214218
  derived and/or modified CDS sequence (opt5) from neuraminidase__InfluenzaA__AHM00088

SEQ ID NO: 217139 - RNA, 1410 nt, Artificial Sequence
  derived and/or modified CDS sequence (opt5) from neuraminidase__InfluenzaA__AHM00100
augaaccccaaucagaagaucauuaccaucggcagcauuugcaugacaaucgggauggccaaccugauucuccaaaucggaaauaucauuuccaucuggauuucucacagcauccagcugggcaaccagucccagauugagacguguaaucaaucugugaucaccuacgaaaacaauacaugggucaaccagaccuauguuaauauuagcaacacaaauuucgcugccgggcaguccguggugucugucaaacuugcgggaaacagcucccugugcccugugagcggcugggcuaucuacucuaaggacaauuccaucagaauugggagcaaaggagauguuuuugugauccgggagccguucauuucuuguagcccccucgaaugccgcaccuuuuuccugacacagggcgcccuucugaacgacaagcauuccaauggcaccaucaaagauagaucuccuuaucggacgcucauguccugucccauuggggaggucccuagccccuacaacucccgcuuugaaucuguggccuggagcgcuuccgccugccacgacggaaucaacuggcugaccaucggcauuagcgggccugauaauggagcuguugccgugcugaaguauaacggcgucaucacagacaccauuaagucuuggagaaauaacauccuccggacacaagaguccgagugugcgugcgugaaugggagcuguuucaccauuaugacggauggaccgucugacggccaggccagcuacaaaaucuuucgcaucgaaaagggcaaaauugugaaguccgucgagaugaacgcucccaauuaucauuacgaagagugcucuuguuacccugauagcuccgagaucacaugcguuugcagagacaacuggcacgggagcaaucggcccugggugucuuucaaccagaaucuggaauaucagauuggauacaucuguuccggcauuuuuggggauaacccucgccccaaugacaaaaccggaagcugcggcccggugucuuccaacggggccaauggagucaagggcuucagcuuuaaguauggcaacgggguguggaucggaagaacaaaauccauuucuagccggaagggcuucgagaugaucugggauccuaacggguggaccggaaccgacaauaacuuuuccacaaaacaagacaucguuggcauuaaugaauggucuggguacagcggcuccuucgugcagcaucccgagcuuacgggacuggauuguauccgcccuugcuucugggucgaacucauuagaggccggcccaaggagaacaccaucuggacaagcgggucuuccauuagcuuuuguggaguuaauucugacaccgugggcugguccuggcccgauggggcugagcugccuuucacaaucgacaacuga

SEQ ID NO: 217140 - RNA, 1410 nt, Artificial Sequence; identical to SEQ ID NO: 217062
  derived and/or modified CDS sequence (opt5) from neuraminidase__InfluenzaA__AHM00111

SEQ ID NO: 217141 - RNA, 1410 nt, Artificial Sequence; identical to SEQ ID NO: 217126
  derived and/or modified CDS sequence (opt5) from neuraminidase__InfluenzaA__AHM00123

SEQ ID NO: 217142 - RNA, 1410 nt, Artificial Sequence; identical to SEQ ID NO: 215447
  derived and/or modified CDS sequence (opt5) from neuraminidase__InfluenzaA__AHM00135

SEQ ID NO: 217143 - RNA, 1410 nt, Artificial Sequence; identical to SEQ ID NO: 215955
  derived and/or modified CDS sequence (opt5) from neuraminidase__InfluenzaA__AHM00147

SEQ ID NO: 217144 - RNA, 1410 nt, Artificial Sequence; identical to SEQ ID NO: 217126
  derived and/or modified CDS sequence (opt5) from neuraminidase__InfluenzaA__AHM00159

SEQ ID NO: 217145 - RNA, 1410 nt, Artificial Sequence; identical to SEQ ID NO: 214218
  derived and/or modified CDS sequence (opt5) from neuraminidase__InfluenzaA__AHM00171

SEQ ID NO: 217146 - RNA, 1410 nt, Artificial Sequence; identical to SEQ ID NO: 214218
  derived and/or modified CDS sequence (opt5) from neuraminidase__InfluenzaA__AHM00183

SEQ ID NO: 217147 - RNA, 1410 nt, Artificial Sequence
  derived and/or modified CDS sequence (opt5) from neuraminidase__InfluenzaA__AHM00195
augaaccccaaucagaagaucauuaccaucggcagcgugucccugacaauuucuacgaucugcuucuuuaugcaaauugccauccucaucaccacagucacccugcacuucaaacaguacgaguuuaacagcccuccgaauaaccagguuaugcuuugugaacccacaauuaucgagagaaauauuaccgaaaucguguaucugacaaacaccacgauugagaaggaaaucugcccuaaacccgcugaguaccggaauugguccaagccucagugugacauuaccggguucgcccccuuuucuaaagauaacagcauccgccucuccgcgggaggcgacaucugggugacaagagagccuuaugucucuugcgauccggacaaguguuaccaauucgcucuggggcagggaaccacacuuaauaacgugcauagcaauaacaccguucgggaucgcacgcccuauagaacacugcucaugaaugaacugggcgugccuuuucaccuggggaccaagcaggucugcauugccugguccucuagcuccugucaugacggaaaagccuggcuccacgugugcaucacaggcgaugacaagaacgcuaccgccagcuucauuuacaauggccggcugguugauucuguggucuccuggagcaaagagauccuucgcacccaggaaucugagugugugugcauuaacgggacauguacgguggucaugaccgacggauccgcuagcggcaaggccgauacaaaaguucuguuuaucgaggaagggaagaucgugcauaccuccacacucucuggaagcgcgcaacacguggaggaaugcuccugcuaucccagauacccuggcguccggugugugugccgcgacaacuggaaggggagcaauagacccauuguugauaucaacauuaaagaccacucuaucgugucccgguacgucuguagcggacuggugggcgacaccccgcgcaagaaugauucuagcuccucuagccauugccuugacccuaacaaugaggaaggcgggcacggaguuaaaggcugggccuucgaugacgggaacgauguguggaugggaagaacgauuaaugagacaucccggcugggcuaugagaccuuuaaggucaucgaaggguggagcaaccccaaaucuaagcuccagaucaaucgccaggugauugucgacagaggagaucgguccggcuacagcggcaucuucucuguggaggggaaauccuguauuaacagaugcuuuuauguugaacugauccgcggacggaaggaggaaaccgaggugcuguggacaagcaauuccauugucguguucuguggcaccucugggacauacggaacgggcagcuggccugacggggcugaucucaaccugaugcccaucuga

SEQ ID NO: 217148 - RNA, 1410 nt, Artificial Sequence
  derived and/or modified CDS sequence (opt5) from neuraminidase__InfluenzaA__AHM00207
augaaccccaaucagaagaucauuaccaucggcagcgugucccugacaauuucuacgaucugcuucuuuaugcaaauugccauccucaucaccacagucacccugcacuucaaacagcaugaguuuaacagcccuccgaauaaccagguuaugcuuugugaacccacaauuaucgagagaaauauuaccgaaaucguguaccugacaaacaccacgauugagaaggaaaucugcccuaaacccgcugaguaucggaauugguccaagccucagugugggauuaccggauucgcccccuuuucuaaagacaacagcauccgccucuccgcgggcgggaauaucugggugacaagagagccuuacgucucuugcgauccggacaaguguuaucaauucgcucugggacagggcaccacacuuaacaaugugcacagcaacaauaccguucgggaucgcacgcccuacagaacacugcucaugaacgaacugggggugccuuuucaucugggaaccaagcaggucugcauugccugguccucuagcuccugucacgacggcaaagccuggcuccaugugugcaucacaggcgaugacaagaaugcuaccgccagcuucauuuauaacgggcggcugguugauucuguggucuccuggagcaaagagauccuucgcacccaggaaucugagugugugugcauuaacggaacauguacgguggucaugaccgacggcuccgcuagcgggaaggccgauacaaaaauccuguuuaucgaggaaggaaagauuguucacaccuccacacucucuggcagcgcgcaacacguggaggaaugcuccugcuaccccagauauccuggggugcggugugucugccgcgacaauuggaagggaagcaacagacccaucguggauauuaauaucaaagaccauucuauuguuuccagcuacguguguucuggccuggucggcgauaccccgcggaagaacgacagcuccucuagcucccacugccuugacccuaauaacgaggaagggggacauggcgugaaagggugggccuucgaugacggaaaugauguuuggaugggccgcacgaucaacgagacaagcagacugggguacgagaccuuuaaggugaucgaaggauggucuaaucccaaauccaagcuccagauuaaccggcaggucaucguggaccgcggcgauagaagcggcuauucugggauuuucuccgucgagggaaaaagcuguaucaaucggugcuuuuacguggaacugauuagaggccgcaaggaggaaaccgagguucuguggacauccaacucuaucguggucuucugugggaccagcggaacauauggcacgggguccuggccugacggcgcugaucucaaucugaugcccauuuga

SEQ ID NO: 217149 - RNA, 1410 nt, Artificial Sequence; identical to SEQ ID NO: 217126
  derived and/or modified CDS sequence (opt5) from neuraminidase__InfluenzaA__AHM00219

SEQ ID NO: 217150 - RNA, 1410 nt, Artificial Sequence; identical to SEQ ID NO: 214218
  derived and/or modified CDS sequence (opt5) from neuraminidase__InfluenzaA__AHM00231

SEQ ID NO: 217151 - RNA, 1410 nt, Artificial Sequence; identical to SEQ ID NO: 214218
  derived and/or modified CDS sequence (opt5) from neuraminidase__InfluenzaA__AHM00243

SEQ ID NO: 217152 - RNA, 1410 nt, Artificial Sequence; identical to SEQ ID NO: 214218
  derived and/or modified CDS sequence (opt5) from neuraminidase__InfluenzaA__AHM00255

SEQ ID NO: 217153 - RNA, 1410 nt, Artificial Sequence
  derived and/or modified CDS sequence (opt5) from neuraminidase__InfluenzaA__AHM00267
augaaccccaaucagaagaucauuaccaucggcagcgugucccugacaauuucuacgaucugcuucuuuaugcaaauugccauccucaucaccacagucacccugcacuucaaacaguacgaguuuaacagcccuccgaauaaccagguuaugcuuugugaacccacaauuaucgagagaaauauuaccgaaaucguguaucugacaaacaccacgauugagaaggaaaucugcccuaaacccgcugaguaccggaauugguccaagccucagugugggauuaccggauucgcccccuuuucuaaagacaacagcauccgccucuccgcgggcggggauaucugggugacaagagagccuuaugucucuugcgacccggauaaguguuaccaauucgcucugggacagggcaccacacuuaauaacgugcauagcaauaacaccguucgggaccgcacgcccuauagaacacugcucaugaaugaacugggggugccuuuucaccugggaaccaagcaggucugcauugccugguccucuagcuccugucaugauggcaaagccuggcuccacgugugcaucacaggcgacgauaagaacgcuaccgccagcuucauuuacaaugggcggcugguugacucuguggcuuccuggagcaaagagauccuucgcacccaggaaucugagugugucugcauuaacggaacauguacgguggugaugaccgauggcuccgccagcgggaaggcggacacaaaaauccuguuuaucgaggaaggaaagauuguccauaccuccacacucucuggcagcgcccaacacguugaggaaugcuccugcuaucccagauacccuggggugcggugugugugccgcgauaacuggaagggaagcaauagacccaucgucgacauuaacaucaaagaucacucuauuguguccagcuacguuuguucuggccuggugggcgacaccccgcggaagaaugacagcuccucuagcucccauugccuugauccuaacaaugaggaagggggacacggcgucaaagggugggcuuucgacgauggaaacgacguguggaugggccgcacgaucaaugagacaagcagacugggguaugagaccuuuaagguuaucgaaggauggucuaaccccaaauccaagcuccagauuaaucgccaggugaucgucgaucggggcgacagaagcggcuacucugggauuuucuccguggagggaaaaagcuguaucaaccggugcuuuuaugucgaacugauuagaggccgcaaggaggaaaccgaggugcuguggacauccaauucuaucguuguguucugugggaccagcggaacauacggcacgggguccuggccugauggcgccgaccucaaccugaugcccauuuga

SEQ ID NO: 217154 - RNA, 1410 nt, Artificial Sequence; identical to SEQ ID NO: 215447
  derived and/or modified CDS sequence (opt5) from neuraminidase__InfluenzaA__AHM00279

SEQ ID NO: 217155 - RNA, 1410 nt, Artificial Sequence; identical to SEQ ID NO: 214218
  derived and/or modified CDS sequence (opt5) from neuraminidase__InfluenzaA__AHM00291

SEQ ID NO: 217156 - RNA, 1410 nt, Artificial Sequence; identical to SEQ ID NO: 214218
  derived and/or modified CDS sequence (opt5) from neuraminidase__InfluenzaA__AHM00303

SEQ ID NO: 217157 - RNA, 1410 nt, Artificial Sequence; identical to SEQ ID NO: 214218
  derived and/or modified CDS sequence (opt5) from neuraminidase__InfluenzaA__AHM00315

SEQ ID NO: 217158 - RNA, 1410 nt, Artificial Sequence; identical to SEQ ID NO: 215447
  derived and/or modified CDS sequence (opt5) from neuraminidase__InfluenzaA__AHM00327

SEQ ID NO: 217159 - RNA, 1410 nt, Artificial Sequence; identical to SEQ ID NO: 215447
  derived and/or modified CDS sequence (opt5) from neuraminidase__InfluenzaA__AHM00339

SEQ ID NO: 217160 - RNA, 1410 nt, Artificial Sequence; identical to SEQ ID NO: 217126
  derived and/or modified CDS sequence (opt5) from neuraminidase__InfluenzaA__AHM00351

SEQ ID NO: 217161 - RNA, 1410 nt, Artificial Sequence; identical to SEQ ID NO: 217062
  derived and/or modified CDS sequence (opt5) from neuraminidase__InfluenzaA__AHM00363

SEQ ID NO: 217162 - RNA, 1410 nt, Artificial Sequence
  derived and/or modified CDS sequence (opt5) from neuraminidase__InfluenzaA__AHM00375
augaaccccaaucagaagaucauuaccaucggcagcgugucccugacaauuucuacgaucugcuucuuuaugcaaauugccauccucaucaccacagucacccugcacuucaaacagcaugaguuuaacagcccuccgaauaaccagguuaugcuuugugaacccacaauuaucgagagaaauauuaccgaaaucguguaccugacaaacaccacgauugagaaggaagugugcccuaaacccgcugaguaucggaauugguccaagccucagugugggaucaccggauucgcccccuuuucuaaagacaacagcauucgccucuccgcgggcggggauaucugggucacaagagagccuuacgugucuugcgacccggauaaguguuaucaauucgcucugggacagggcaccacacuuaauaacguucacagcaauaacaccgugcgggaccgcacgcccuacagaacacugcucaugaaugaacugggggucccuuuucaucugggaaccaaacaggugugcaucgccugguccucuagcuccugucacgauggcaaggccuggcuccauguuugcauuacaggcgacgauaagaacgcuaccgccagcuucaucuauaaugggcggcugguggacucugucguguccuggagcaaagagauucuucgcacccaggaaucugagugugugugcaucaacggaacauguacggucguuaugaccgauggcuccgcuagcgggaaggccgacacaaaaauucuguuuaucgaggaaggaaagaucgugcacaccuccacacucucuggcagcgcgcaacacguggaggaaugcuccugcuaccccagauauccugggguccggugugugugccgcgauaacuggaagggaagcaauagacccauuguugacaucaacauuaaagaucauucuaucguguccagcuacgucuguucuggccuggugggcgacaccccgcggaagaaugacagcuccucuagcucccacugccuugauccuaacaaugaggaagggggacauggcguuaaagggugggccuucgacgauggaaacgacguguggaugggccgcacgauuaaugagacaagcagacugggguacgagaccuuuaaggucaucgaaggauggucuaaccccaaauccaagcuccagaucaaucgccaggugauugucgaucggggcgacagaagcggcuauucugggaucuucuccguggagggaaaaagcuguauuaaccggugcuuuuacguugaacugaucagaggccgcaaggaggaaaccgaggugcuguggacauccaauucuauugucguguucugugggaccagcggaacauauggcacgggguccuggccugauggcgcugaccucaaccugaugcccaucuga

SEQ ID NO: 217163 - RNA, 1410 nt, Artificial Sequence
  derived and/or modified CDS sequence (opt5) from neuraminidase__InfluenzaA__AHM00398
augaaccccaaucagaagaucauuaccaucggcagcgugucccugacaauuucuacgaucugcuucuuuaugcaaauugccauccucaucaccacagucacccugcacuucaaacagcaugaguuuaacagcccuccgaauaaccagguuaugcuuugugaacccacaauuaucgagagaaauauuaccgaaaucguguaccugacaaacaccacgauugagaaggaaaucugcccuaaacccgcugaguaucggaauugguccaagccucagugugggauuaccggauucgcccccuuuucuaaagagaacagcauccgccucuccgcgggcggggacaucugggugacaagagaaccuuacgucucuugcgauccggacaaguguuaucaauucgcucugggacagggcaccacacuuaauaacgugcacagcaauaacaccguucgggaucgcacgcccuacagaacacugcucaugaaugagcugggggugccuuuucaucugggaaccaagcaggucugcauugccugguccucuagcuccugucacgacggcaaagccuggcuccaugugugcaucacaggcgaugacaagaacgcuaccgccagcuucauuuauaaugggcggcugguugauucuguggucuccuggagcaaagaaauccuucgcacccaggagucugagugugugugcauuaacggaacauguacgguggucaugaccgacggcuccgcuagcgggaaggccgauacaaaaauccuguuuaucgaagagggaaagauuguucacaccuccacacucucuggcagcgcgcaacacguggaagagugcuccugcuaccccagauauccuggggugcggugugucugccgcgacaacuggaagggaagcaauagacccaucguggauauuaacaucaaagaccauucuauuguuuccagcuacguguguucuggccuggucggcgauaccccgcggaagaaugacagcuccucuagcucccacugccuugacccuaacaaugaagaagggggacauggcgugaaagggugggccuucgaugacggaaacgauguuuggaugggccgcacgaucaaugagacaagcagacugggguacgagaccuuuaaggugaucgagggauggucuaaccccaaauccaagcuccagauuaaucggcaggucaucguggaccgcggcgauagaagcggcuauucugggauuuucuccgucgaaggaaaaagcuguaucaaccggugcuuuuacguggagcugauuagaggccgcaaggaagagaccgagguucuguggacauccucuagcaucguggucuucugugggaccuccggaacauauggcacggggucuuggccugacggcgcugaucucaaucugaugcccauuuga

SEQ ID NO: 217164 - RNA, 1410 nt, Artificial Sequence; identical to SEQ ID NO: 214218
  derived and/or modified CDS sequence (opt5) from neuraminidase__InfluenzaA__AHM00410

SEQ ID NO: 217165 - RNA, 1410 nt, Artificial Sequence
  derived and/or modified CDS sequence (opt5) from neuraminidase__InfluenzaA__AHM00422
augaaccccaaucagaagaucauuaccaucggcagcgugucccugacaauuucuacgaucugcuucuuuaugcaaauugccauccucgucaccacaguuacccugcacuucaaacaguacgaguuuaacagcccuccgaauaaccaggugaugcuuugugaacccacaaucauugagagaaauaucaccgaaauuguguaucugacaaacaccacgaucgagaaggaaauuugcccuaaacccgcugaguaccggaauugguccaagccucagugugggaucaccggauucgcccccuuuucuaaagacaacagcauucgccucuccgcgggcggggauaucugggucacaagagagccuuaugugucuugcgacccggauaaguguuaccaauucgcucugggacagggcaccacacuuaauaacguucauagcaauaacaccgugcgggaccgcacgcccuauagaacacugcucaugaaugaacugggggucccuuuucaccugggaaccaaacaggugugcaucgccugguccucuagcuccugucaugauggcaaggccuggcuccacguuugcauuacaggcgacgauaagaacgcuaccgccagcuucaucuacaaugggcggcugguggacucugucguguccuggagcaaagagauucuucgcacccaggaaucugagugugugugcaucaacggaacauguacggucguuaugaccgauggcuccgcuagcgggaaggccgacacaaaaauucuguuuaucgaggaaggaaagaucgugcauaccuccacacucucuggcagcgcgcaacacguggaggaaugcuccugcuaucccagauacccugggguccggugugugugccgcgauaacuggaagggaagcaauagacccauuguugacaucaacauuaaagaucacucuaucguguccagcuacgucuguucuggccuggugggcgacaccccgcggaagaaugacagcuccucuagcucccauugccuugauccuaacaaugaggaagggggacacggcguuaaagggugggccuucgacgauggaaacgacguguggaugggccgcacgauuaaugagacaagcagacugggguaugagaccuuuaaggucaucgaaggauggucuaaccccaaauccaagcuccagaucaaucgccaggugauugucgaucggggcgacagaagcggcuacucugggaucuucuccguggagggaaaaagcuguauuaaccggugcuuuuauguugaacugaucagaggccgcaaggaggaaaccgaggugcuguggacauccaauucuauugucguguucugugggaccagcggaacauacggcacgggguccuggccugauggcgcugaccucaaccugaugcccaucuga

SEQ ID NO: 217166 - RNA, 1410 nt, Artificial Sequence
  derived and/or modified CDS sequence (opt5) from neuraminidase__InfluenzaA__AHM00434
augaaccccaaucagaagaucauuaccaucggcagcgugucccugacaauuucuacgaucugcuucuuuaugcaaauugccauccucaucaccacagucacccugcacuucaaacaguacgaguuuaacccuccgcccaauaaccagguuaugcuuugugaaccuacaauuaucgagagaaauauuaccgaaaucguguaucugacaaacaccacgauugagaaggaaaucugccccaaaccugcugaguaccggaauuggagcaagccccagugugggauuaccggauucgccccuuuuuccaaagacaacucuauccgccucagcgcgggcggggauaucugggugacaagagagccguaugucuccugcgaccccgauaaguguuaccaauucgcucugggacagggcaccacacuuaauaacgugcauucuaauaacaccguucgggaccgcacgccuuauagaacacugcucaugaaugaacugggggugcccuuucaccugggaaccaagcaggucugcauugccuggagcuccagcucuugucaugauggcaaagccuggcuccacgugugcaucacaggcgacgauaagaacgcuaccgccuccuucauuuacaaugggcggcugguugacagcguggucucuugguccaaagagauccuucgcacccaggaaagcgagugugugugcauuaacggaacauguacgguggucaugaccgauggcucugcuuccgggaaggccgacacaaaaauccuguuuaucgaggaaggaaagauuguucauaccagcacacucuccggcucugcgcaacacguggaggaaugcagcugcuauccuagauaccccggggugcggugugucugccgcgauaacuggaagggauccaauagaccgaucguggacauuaacaucaaagaucacagcauuguuucuuccuacguguguagcggccuggucggcgacaccccucggaagaaugacucuagcuccucuagccauugccuugaucccaacaaugaggaagggggacacggcgugaaagggugggccuucgacgauggaaacgacguuuggaugggccgcacgaucaaugagacauccagacugggguaugagaccuuuaaggugaucgaaggauggagcaacccuaaaucuaagcuccagauuaaucggcaggucaucguggaucgcggcgacagauccggcuacagcgggauuuucucugucgagggaaaauccuguaucaaccggugcuuuuauguggaacugauuagaggccgcaaggaggaaaccgagguucuguggacaagcaauuccaucguggucuucugugggaccucuggaacauacggcacggggagcuggcccgauggcgcugaccucaaccugaugcccauuuga

SEQ ID NO: 217167 - RNA, 1410 nt, Artificial Sequence; identical to SEQ ID NO: 214218
  derived and/or modified CDS sequence (opt5) from neuraminidase__InfluenzaA__AHM00446

SEQ ID NO: 217168 - RNA, 1410 nt, Artificial Sequence; identical to SEQ ID NO: 217126
  derived and/or modified CDS sequence (opt5) from neuraminidase__InfluenzaA__AHM00458

SEQ ID NO: 217169 - RNA, 1410 nt, Artificial Sequence; identical to SEQ ID NO: 217126
  derived and/or modified CDS sequence (opt5) from neuraminidase__InfluenzaA__AHM00470

SEQ ID NO: 217170 - RNA, 1410 nt, Artificial Sequence; identical to SEQ ID NO: 217126
  derived and/or modified CDS sequence (opt5) from neuraminidase__InfluenzaA__AHM00482

SEQ ID NO: 217171 - RNA, 1410 nt, Artificial Sequence; identical to SEQ ID NO: 217126
  derived and/or modified CDS sequence (opt5) from neuraminidase__InfluenzaA__AHM00494

SEQ ID NO: 217172 - RNA, 1410 nt, Artificial Sequence
  derived and/or modified CDS sequence (opt5) from neuraminidase__InfluenzaA__AHM00506
augaaccccaaucagaagaucauuaccaucggcagcgugucccugacaauuucuacgaucugcuucuuuaugcaaauugccauccucaucaccacagucacccugcacuucaaacaguacgaguuuaacagcccuccgaauaaccagguuaugcuuugugaacccacaauuaucgagagaaauauuaccgaaaucguguaucugacaaacaccacgauugagaaggaaaucugcccuaaacccgcugaguaccggaauugguccaagccucagugugggauuaccggauucgcccccuuuucuaaagacaacagcauccgccucuccgcgggcggggauaucugggugacaagagagccuuaugucucuugcgacccggauaaguguuaccaauucgcucugggacagggcaccacacuuaauaacgugcauagcaauaacaccguucgggaccgcacgcccuauagaacacugcucaugaaugaacugggggugccuuuucaccugggaaccaagcaggucugcauugccugguccucuagcuccugucaugauggcaaagccuggcuccacgugugcaucacaggcgacgauaagaacgcuaccgccagcuucauuuacaaugggcggcugguugacucuguggucuccuggagcaaagagauccuucgcacccaggaaucugagugugugugcauuaacggaacauguacgguggucaugaccgauggcuccgcuagcgggaaggccgacacaaaaauccuguuuaucgaggaaggaaagauuguucauaccuccacacucucuggcagcgcgcaacacguggaggaaugcuccugcuaucccagauacccuggggugcggugugucugccgcgauaacuggaagggaagcaauagacccaucguggacauuaacaucaaagaucacucuauuguuuccagcuacguguguucuggccuggucggcgacaccccgcggaagaaugacagcuccucuagcucccauugccuugauccuaacaaugaggaagggggacacggcgugaaagggugggccuucgacgauggaaacgacguuuggaugggccgcacgaucaaugagacaagcagacugggguaugagaccuuuaaggugaucgaaggauggucuaaccccaaauccaagcuccagauuaaucggcaggucaucgugaaccgcggcgauagaagcggcuacucugggauuuucuccgucgagggaaaaagcuguaucaaucggugcuuuuauguggaacugauuagaggccgcaaggaggaaaccgagguucuguggacauccaacucuaucguggucuucugugggaccagcggaacauacggcacgggguccuggccugacggcgcugaucucaaucugaugcccauuuga

SEQ ID NO: 217173 - RNA, 1410 nt, Artificial Sequence; identical to SEQ ID NO: 214218
  derived and/or modified CDS sequence (opt5) from neuraminidase__InfluenzaA__AHM00518

SEQ ID NO: 217174 - RNA, 1410 nt, Artificial Sequence
  derived and/or modified CDS sequence (opt5) from neuraminidase__InfluenzaA__AHM00530
augaaccccaaucagaagaucauuaccaucggcagcgugucccugacaauuucuacgaucugcuucagcaugcaaauugccauccucaucaccacagucacccugcacuuuaaacaguacgaguucaacccuccgcccaauaaccagguuaugcuuugugaaccuacaauuaucgagagaaauauuaccgaaaucguguaucugacaaacaccacgauugagaaggaaaucugccccaaaccugcugaguaccggaauugguccaagccccagugugggauuaccggauuugccccuuucucuaaagacaacagcauccgccucuccgcgggcggggauaucugggugacaagagagccguaugucucuugcgaccccgauaaguguuaccaauuugcucugggacagggcaccacacuuaauaacgugcauagcaauaacaccguucgggaccgcacgccuuauagaacacugcucaugaaugaacugggggugcccuuccaccugggaaccaagcaggucugcauugccugguccuccucuuccugucaugauggcaaagccuggcuccacgugugcaucacaggcgacgauaagaacgcuaccgccagcuuuauuuacaaugggcggcugguugacucuguggucuccuggagcaaagagauccuucgcacccaggaaucugagugugugugcauuaacggaacauguacgguggucaugaccgauggcuccgcuagcgggaaggccgacacaaaaauccuguucaucgaggaaggaaagauuguucauaccuccacacucucuggcagcgcgcaacacguggaggaaugcuccugcuauccuagauaccccggggugcggugugucugccgcgauaacuggaagggaagcaauagaccgaucguggacauuaacaucaaagaucacucuauuguuuccagcuacguguguucuggccuggucggcgacaccccucggaagaaugacagcuccucuagcucccauugccuugaucccaacaaugaggaagggggacacggcgugaaagggugggccuuugacgauggaaacgacguuuggaugggccgcacgaucaaugagacaagcagacugggguaugagaccuucaaggugaucgaaggauggucuaacccuaaauccaagcuccagauuaaucggcaggucaucguggaucgcggcgacagaagcggcuacucugggauuuuuagcgucgagggaaaaagcuguaucaaccggugcuucuauguggaacugauuagaggccgcaaggaggaaaccgagguucuguggacauccaauucuaucguggucuuuugugggaccagcggaacauacggcacgggguccuggcccgauggcgcugaccucaaccugaugcccauuuga

SEQ ID NO: 217175 - RNA, 1410 nt, Artificial Sequence; identical to SEQ ID NO: 215447
  derived and/or modified CDS sequence (opt5) from neuraminidase__InfluenzaA__AHM00542

SEQ ID NO: 217176 - RNA, 1410 nt, Artificial Sequence
  derived and/or modified CDS sequence (opt5) from neuraminidase__InfluenzaA__AHM00546
augaaccccaaucagaagaucauuaccaucggcagcgugucccugacaauuucuacgaucugcuucuuuaugcaaauugccauccucaucaccacagucacccugcacuucaaacaguacgaguuuaacagcccuccgaauaaccagguuaugcuuugugaacccacaauuaucgagagaaauauuaccgaaaucguguaucugacaaacaccacgauugagaaggaaaucugcccuaaacccgcugaguaccggaauugguccaagccucagugugacauuaccggguucgcccccuuuucuaaagauaacagcauccgccucuccgcgggaggcgacaucugggugacaagagagccuuaugucucuugcgauccggacaaguguuaccaauucgcucuggggcagggaaccacacuuaauaacgugcauagcaauaacaccguucgggaucgcacgcccuauagaacacugcucaugaaugaacugggcgugccuuuucaccuggggaccaagcaggucugcauugccugguccucuagcuccugucaugacggaaaagccuggcuccacgugugcaucacaggcgaugacaagaacgcuaccgccagcuucauuuacaauggccggcugguugauucuguggucuccuggagcaaagagauccuucgcacccaggaaucugagugugugugcauuaacgggacauguacgguggucaugaccgacggauccgcuagcggcaaggccgauacaaaaauccuguuuaucgaggaagggaagauuguucauaccuccacacucucuggaagcgcgcaacacguggaggaaugcuccugcuaucccagauacccuggcgugcggugugucugccgcgacaacuggaaggggagcaauagacccaucguggauauuaacaucaaagaccacucuauuguuuccaaguacguguguagcggacuggucggcgacaccccgcggaaaaaugauucuagcuccucuagccauugccuugacccuaacaaugaggaaggcgggcacggagugaagggcugggccuucgaugacgggaacgauguuuggaugggacgcacgaucaaugagacauccagacugggcuaugagaccuuuaaagugaucgaaggguggagcaaccccaagucuaaacuccagauuaaucggcaggucaucguggaccgcggagauagauccggcuacagcggcauuuucucugucgaggggaaguccuguaucaaccggugcuuuuauguggaacugauuagaggacgcaaggaggaaaccgagguucuguggacaagcaauuccaucguggucuucuguggcaccucugggacauacggaacgggcagcuggccugacggggcugaucucaaccugaugcccauuuga

SEQ ID NO: 217177 - RNA, 1410 nt, Artificial Sequence
  derived and/or modified CDS sequence (opt5) from neuraminidase__InfluenzaA__AHM00558
augaaccccaaucagaagaucauuaccaucggcagcgugucccugacaauuucuacgaucugcuucuuuaugcaaauugccauccucaucaccacagucacccugcacuucaaacaguacgaguuuaacagcccuccgaauaaccagguuaugcuuugugaacccacaauuaucgagagaaauauuaccgaaaucguguaucugacaaacaccacgauugagaaggaagugugcccuaaacccgcugaguaccggaauugguccaagccucagugugggaucaccggauucgcccccuuuucuaaagacaacagcauucgccucuccgcgggcggggauaucugggucacaagagagccuuaugugucuugcgacccggauaaguguuaccaauucgcucugggacagggcaccacacuuaauaacguucauagcaauaacaccgugcgggaccgcacgcccuauagaacacugcucaugaaugaacugggggucccuuuucaccugggaaccaaacaggugugcaucgccugguccucuagcuccugucaugauggcaaggccuggcuccacguuugcauuacaggcgacgauaagaacgcuaccgccagcuucaucuacaaugggcggcugguggacucugucguguccuggagcaaagagauucuucgcacccaggaaucugagugugugugcaucaacggaacauguacggucguuaugaccgauggcuccgcuagcgggaaggccgacacaaaaauucuguuuaucgaggaaggaaagaucgugcauaccuccacacucucuggcagcgcgcaacacguggaggaaugcuccugcuaucccagauacccugggguccggugugugugccgcgauaacuggaagggaagcaauagacccauuguugacaucaacauuaaagaucacucuaucguguccagcuacgucuguucuggccuggugggcgacaccccgcggaagaaugacagcuccucuagcucccauugccuugauccuaacaaugaggaagggggacacggcguuaaagggugggccuucgacgauggaaacgacguguggaugggccgcacgauuaaugagacaagcagacugggguaugagaccuuuaaggucaucgaaggauggucuaaccccaaauccaagcuccagaucaaucgccaggugauugucgaucggggcgacagaagcggcuacucugggaucuucuccguggagggaaaaagcuguauuaaccggugcuuuuauguugaacugaucagaggccgcaaggaggaaaccgaggugcuguggacauccaauucuauugucguguucugugggaccagcggaacauacggcacgggguccuggccugauggcgcugaccucaaccugaugcccaucuga

SEQ ID NO: 217178 - RNA, 1410 nt, Artificial Sequence; identical to SEQ ID NO: 214218
  derived and/or modified CDS sequence (opt5) from neuraminidase__InfluenzaA__AHM00570

SEQ ID NO: 217179 - RNA, 1410 nt, Artificial Sequence; identical to SEQ ID NO: 214218
  derived and/or modified CDS sequence (opt5) from neuraminidase__InfluenzaA__AHM00582

SEQ ID NO: 217180 - RNA, 1410 nt, Artificial Sequence
  derived and/or modified CDS sequence (opt5) from neuraminidase__InfluenzaA__AHM00594
augaaccccaaucagaagaucauuaccaucggcagcgugucccugacaauuucuacgaucugcuucuuuaugcaaauugccauccucaucaccacagucacccugcacuucaaacagcaugaguuuaacagcccuccgaauaaccagguuaugcuuugugaacccacaauuaucgagagaaauauuaccgaaaucgugcaccugacaaacaccacgauugagaaggaaaucugcccuaaacccgcugaguaccggaauugguccaagccucagugugggauuaccggauucgcccccuuuucuaaagacaacagcauccgccucuccgcgggcggggauaucugggugacaagagagccuuaugucucuugcgacccggauaaguguuaccaauucgcucugggacagggcaccacacuuaauaacgugcauagcaauaacaccguucgggaccgcacgcccuauagaacacugcucaugaaugaacugggggugccuuuucaccugggaaccaagcaggucugcauugccugguccucuagcuccugucaugauggcaaagccuggcuccacgugugcaucacaggcgacgauaagaacgcuaccgccagcuucauuuacaaugggcggcugguugacucuguggucuccuggagcaaagagauccuucgcacccaggaaucugagugugugugcauuaacggaacauguacgguggucaugaccgauggcuccgcuagcgggaaggccgacacaaaaauccuguuuaucgaggaaggaaagauuguucacaccuccacacucucuggcagcgcgcaacauguggaggaaugcuccugcuaucccagauacccuggggugcggugugucugccgcgauaacuggaagggaagcaauagacccaucguggacauuaacaucaaagaucacucuauuguuuccagcuauguguguucuggccuggucggcgacaccccgcggaagaaugacagcuccucuagcucccauugccuugauccuaacaaugaggaagggggacacggcgugaaagggugggccuucgacgauggaaacgacguuuggaugggccgcacgaucaaugagacaagcagacugggguacgagaccuuuaaggugaucgaaggauggucuaaccccaaauccaagcuccagauuaaucggcaggucaucguggaucgcggcgacagaagcggcuacucugggauuuucuccgucgagggaaaaagcuguaucaaccggugcuuuuauguggaacugauuagaggccgcaaggaggaaaccgagguucuguggacauccaauucuaucguggucuucugugggaccagcggaacauacggcacgggguccuggccugauggcgcugaccucaaccugaugcccauuuga

SEQ ID NO: 217181 - RNA, 1410 nt, Artificial Sequence; identical to SEQ ID NO: 214218
  derived and/or modified CDS sequence (opt5) from neuraminidase__InfluenzaA__AHM00606

SEQ ID NO: 217182 - RNA, 1410 nt, Artificial Sequence; identical to SEQ ID NO: 214218
  derived and/or modified CDS sequence (opt5) from neuraminidase__InfluenzaA__AHM00618

SEQ ID NO: 217183 - RNA, 1410 nt, Artificial Sequence; identical to SEQ ID NO: 214218
  derived and/or modified CDS sequence (opt5) from neuraminidase__InfluenzaA__AHM00630

SEQ ID NO: 217184 - RNA, 1410 nt, Artificial Sequence; identical to SEQ ID NO: 214218
  derived and/or modified CDS sequence (opt5) from neuraminidase__InfluenzaA__AHM00642

SEQ ID NO: 217185 - RNA, 1410 nt, Artificial Sequence; identical to SEQ ID NO: 215447
  derived and/or modified CDS sequence (opt5) from neuraminidase__InfluenzaA__AHM00654

SEQ ID NO: 217186 - RNA, 1410 nt, Artificial Sequence; identical to SEQ ID NO: 214218
  derived and/or modified CDS sequence (opt5) from neuraminidase__InfluenzaA__AHM00666

SEQ ID NO: 217187 - RNA, 1410 nt, Artificial Sequence; identical to SEQ ID NO: 217126
  derived and/or modified CDS sequence (opt5) from neuraminidase__InfluenzaA__AHM00678

SEQ ID NO: 217188 - RNA, 1410 nt, Artificial Sequence; identical to SEQ ID NO: 215461
  derived and/or modified CDS sequence (opt5) from neuraminidase__InfluenzaA__AHM00690

SEQ ID NO: 217189 - RNA, 1410 nt, Artificial Sequence; identical to SEQ ID NO: 215447
  derived and/or modified CDS sequence (opt5) from neuraminidase__InfluenzaA__AHM00701

SEQ ID NO: 217190 - RNA, 1410 nt, Artificial Sequence
  derived and/or modified CDS sequence (opt5) from neuraminidase__InfluenzaA__AHM00713
augaaccccaaucagaagaucauuaccaucggcagcgugucccugacaauuucuacgaucugcuucuuuaugcaaauugccauccucaucaccacagucacccugcacuucaaacaguacgaguuuaacagcccuccgaauaaccagguuaugcuuugugaacccacaauuaucgagagaaauauuaccgaaaucguguaucugacaaacaccacgauugagaaggaaaucugcccuaaauccgcugaguaccggaauuggucuaagccccagugugggauuaccggauucgccccuuuuagcaaagacaacuccauccgccucucugcgggcggggauaucugggugacaagagagcccuaugucagcugcgacccugauaaguguuaccaauucgcucugggacagggcaccacacuuaauaacgugcauuccaauaacaccguucgggaccgcacgccguauagaacacugcucaugaaugaacugggggugcccuuucaccugggaaccaagcaggucugcauugccuggucuagcuccagcugucaugauggcaaagccuggcuccacgugugcaucacaggcgacgauaagaacgcuaccgccucuuucauuuacaaugggcggcugguugacuccguggucagcuggucuaaagagauccuucgcacccaggaauccgagugugugugcauuaacggaacauguacgguggucaugaccgauggcagcgcuuccgggaaggccgacacaaaaauccuguuuaucgaggaaggaaagauuguucauaccucuacacucagcggcuccgcgcaacacguggaggaaugcagcugcuauccuagauaccccggggugcggugugucugccgcgauaacuggaagggaucuaauagaccuaucguggacauuaacaucaaagaucacuccauuguuagcucuuacguguguagcggccuggucggcgacacgccccggaagaaugacuccucuagcuccagccauugccuugauccgaacaaugaggaagggggacacggcgugaaagggugggccuucgacgauggaaacgacguuuggaugggccgcaccaucaaugagacaucuagacugggguaugagaccuuuaaggugaucgaaggaugguccaacccuaaaagcaagcuccagauuaaucggcaggucaucguggaucgcggcgacagaucuggcuacuccgggauuuucagcgucgagggaaaauccuguaucaaccggugcuuuuauguggaacugauuagaggccgcaaggaggaaaccgagguucuguggacaucuaauagcaucguggucuucugugggaccuccggaacauacggcacggggucuuggcccgauggcgcugaccucaaccugaugccuauuuga

SEQ ID NO: 217191 - RNA, 1410 nt, Artificial Sequence; identical to SEQ ID NO: 214218
  derived and/or modified CDS sequence (opt5) from neuraminidase__InfluenzaA__AHM00725

SEQ ID NO: 217192 - RNA, 1410 nt, Artificial Sequence; identical to SEQ ID NO: 214218
  derived and/or modified CDS sequence (opt5) from neuraminidase__InfluenzaA__AHM00737

SEQ ID NO: 217193 - RNA, 1410 nt, Artificial Sequence; identical to SEQ ID NO: 217126
  derived and/or modified CDS sequence (opt5) from neuraminidase__InfluenzaA__AHM00749

SEQ ID NO: 217194 - RNA, 1410 nt, Artificial Sequence; identical to SEQ ID NO: 214218
  derived and/or modified CDS sequence (opt5) from neuraminidase__InfluenzaA__AHM00761

SEQ ID NO: 217195 - RNA, 1410 nt, Artificial Sequence; identical to SEQ ID NO: 215447
  derived and/or modified CDS sequence (opt5) from neuraminidase__InfluenzaA__AHM00785

SEQ ID NO: 217196 - RNA, 1410 nt, Artificial Sequence; identical to SEQ ID NO: 215082
  derived and/or modified CDS sequence (opt5) from neuraminidase__InfluenzaA__AHM00797

SEQ ID NO: 217197 - RNA, 1410 nt, Artificial Sequence
  derived and/or modified CDS sequence (opt5) from neuraminidase__InfluenzaA__AHM00809
augaaccccaaucagaagaucauuaccaucggcagcgugucccugacaauuucuacgaucugcuucuuuauucaaaucgccauccucauuaccacagucacccugcacuucaaacaguacgaguuuaacagcccuccgaauaaccagguuaugcuuugugaacccacaaucauugagagaaauaucaccgaaauuguguaucugacaaacaccacgaucgagaaggaaauuugcccuaaacccgcugaguaccggaauugguccaagccucagugugacaucaccggguucgcccccuuuucuaaagauaacagcauccgccucuccgcgggaggcgacauuugggugacaagagagccuuaugucucuugcgauccggacaaguguuaccaauucgcucuggggcagggaaccacacuuaauaacaugcauagcaauaacaccgugcgggaucgcacgcccuauagaacacugcucaugaaugaacugggcguuccuuuucaccuggggaccaaacaggugugcaucgccugguccucuagcuccugucaugacggaaaggccuggcuccacgucugcauuacaggcgaugacaagaacgcuaccgccagcuucaucuacaauggccggcugguggauucuguuguguccuggagcaaagagauucuucgcacccaggaaucugagugugucugcaucaacgggacauguacgguggugaugaccgacggauccgcuagcggcaaggccgauacaaaaauccuguuuauugaggaagggaagaucguccauaccuccacacucucuggaagcgcgcaacacguugaggaaugcuccugcuaucccagauacccuggcgugcggugugugugccgcgacaacuggaaggggagcaauagacccauugucgauaucaacauuaaagaccacucuaucguguccagcuacguuuguucuggacuggugggcgacaccccgcggaagaaugauagcuccucuagcucccauugccuugacccuaacaaugaggaaggcgggcacggagucaaaggcugggccuucgaugacgggaacgauguguggaugggacgcacgaucaaugagacaagcagacugggcuaugagaccuuuaagguuauugaaggguggucuaaccccaaauccaagcuccagaucaaucgccaggugauugucgaccggggagauagaagcggcuacucuggcaucuucuccguggaggggaaaagcuguauuaaccggugcuuuuaugucgaacugaucagaggacgcaaggaggaaaccgaggugcuguggacauccaauucuauuguuguguucuguggcaccagcgggacauacggaacgggcuccuggccugacggggcugaucucaaccugaugcccaucuga

SEQ ID NO: 217198 - RNA, 1410 nt, Artificial Sequence; identical to SEQ ID NO: 217126
  derived and/or modified CDS sequence (opt5) from neuraminidase__InfluenzaA__AHM00821

SEQ ID NO: 217199 - RNA, 1410 nt, Artificial Sequence; identical to SEQ ID NO: 217126
  derived and/or modified CDS sequence (opt5) from neuraminidase__InfluenzaA__AHM00833

SEQ ID NO: 217200 - RNA, 1410 nt, Artificial Sequence; identical to SEQ ID NO: 215082
  derived and/or modified CDS sequence (opt5) from neuraminidase__InfluenzaA__AHM00845

SEQ ID NO: 217201 - RNA, 1410 nt, Artificial Sequence; identical to SEQ ID NO: 214218
  derived and/or modified CDS sequence (opt5) from neuraminidase__InfluenzaA__AHM00857

SEQ ID NO: 217202 - RNA, 1410 nt, Artificial Sequence; identical to SEQ ID NO: 214218
  derived and/or modified CDS sequence (opt5) from neuraminidase__InfluenzaA__AHM00869

SEQ ID NO: 217203 - RNA, 1410 nt, Artificial Sequence; identical to SEQ ID NO: 214218
  derived and/or modified CDS sequence (opt5) from neuraminidase__InfluenzaA__AHM00881

SEQ ID NO: 217204 - RNA, 1410 nt, Artificial Sequence; identical to SEQ ID NO: 215447
  derived and/or modified CDS sequence (opt5) from neuraminidase__InfluenzaA__AHM00893

SEQ ID NO: 217205 - RNA, 1410 nt, Artificial Sequence
  derived and/or modified CDS sequence (opt5) from neuraminidase__InfluenzaA__AHM00905
augaaccccaaucagaagaucauuaccaucggcagcgugucccugacaauuucuacgaucugcuucuuuaugcaaauugccauccucaucaccacagucacccugcacuucaaacaguacgaguuuaacagcccuccgaauaaccagguuaugcuuugugaacccacaauuaucgagagaaauauuaccgaaaucguguaucugacaaacaccacgauugagaaggaaaucugcccuaaacccgcugaguaccggaauugguccaagccucagugugggauuaccggauucgcccccuuuucuaaagacaacagcauccgccucuccgcgggcggggauaucugggugacaagagagccuuaugucucuugcgacccggauaaguguuaccaauucgcucugggacagggcaccacacuuaauaacgugcauagcaauaacaccguucgggaccgcacgcccuauagaacacugcucaugaaugaacugggggugccuuuucaccugggaaccaagcaggucugcauugccugguccucuagcuccugucaugauggcaaagccuggcuccacgugugcaucacaggcgacgauaagaacgcuaccgccagcuucauuuacaaugggcggcugguugacucuguggucuccuggagcaaagagauccuucgcacccaggaaucugagugugugugcauuaacggaacauguacgguggucaugaccgauggcuccgcuagcgggaaggccgacacaaaaauccuguuuaucgaggaaggaaagauuguucauaccuccacacucucuggcagcgcgcaacacguggaggaaugcuccugcuaucccagauacccuggggugcggugugucugccgcgauaacuggaagggaagcaauagacccaucguggacauuaacaucaaagaucacucuauuguuuccagcuacguguguucuggccuggucggcgacaccccgcggaagacggacagcuccucuagcgggcauugccuugauccuaauaacgaggaaggaggccacggggugaaaggaugggccuucgacgauggcaaugacguuuggauggggcgcacaaucaacgagaccuccagacugggauaugagaccuuuaaggugaucgaaggcuggagcaaucccaaaucuaagcuccagauuaaccggcaggucaucguggaucgcggcgacagauccggguacagcggaauuuucucugucgagggcaaauccuguaucaaucggugcuuuuauguggaacugauuagagggcgcaaggaggaaacagagguucuguggaccagcaacuccaucguggucuucuguggaacaucuggcacguacgggaccggcagcuggccugauggagcugaccucaaucugaugcccauuuga

SEQ ID NO: 217206 - RNA, 1410 nt, Artificial Sequence
  derived and/or modified CDS sequence (opt5) from neuraminidase__InfluenzaA__AHM00917
augaaccccaaucagaagaucauuaccaucggcagcgugucccugacaauuucuacgaucugcuucuuuaugcaaauugccauccucaucaccacagucacccugcacuucaaacaguacgaguuuaacagcccuccgaauaaccagguuaugcuuugugaacccacaauuaucgagagaaauauuaccgaaaucguguaucugacaaacaccacgauugagaaggaaaucugcccuaaacccgcugaguaccggaauugguccaagccucagugugggauuaccggauucgcccccuuuucuaaagacaacagcauccgccucuccgcgggcggggauaucugggugacaagagagccuuaugucucuugcgacccggauaaguguuaccaauucgcucugggacagggcaccacacuuaauaacgugcauagcaauaacaccguucgggaccgcacgcccuauagaacacugcucaugaaugaacugggggugccuuuucaccugggaaccaagcaggucugcauugccugguccucuagcuccugucaugauggcaaagccuggcuccacgugugcaucacaggcgacgauaagaacgcuaccgccagcuucauuuacaaugggcggcugguugacucuguggucuccuggagcaaagagauccuucgcacccaggaaucugagugugugugcauuaacggaacauguacgguggucaugaccgauggcuccgcuagcgggaaggccgacacaaaaauccuguuuaucgaggaaggaaagauuguucauaccuccacacucucuggcagcgcgcaacacguggaggaaugcuccugcuaucccagauacccuggggugcggugugucugccgcgauaacuggaagggaagcaauagacccaucguggacauuaacaucaaagaucacucuauuguuuccagcuacguguguucuggccuggucggcgacaccccgcggaagaaugacagcuccucuagcucccauugccuugauccuaacaaugaggaagggggacacggcgugaaagggugggccuucgacgauggaaacgacaucuggaugggccgcacgaucaaugagacaagcagacugggguaugagaccuuuaagguuauugaaggauggucuaaccccaaauccaagcuccagaucaaucgccaggugauugucgaucggggcgacagaagcggcuacucugggaucuucuccguggagggaaaaagcuguauuaaccggugcuuuuaugucgaacugaucagaggccgcaaggaggaaaccgaggugcuguggacauccaauucuauuguuguguucugugggaccagcggaacauacggcacgggguccuggccugauggcgcugaccucaaccugaugcccaucuga

SEQ ID NO: 217207 - RNA, 1410 nt, Artificial Sequence; identical to SEQ ID NO: 214218
  derived and/or modified CDS sequence (opt5) from neuraminidase__InfluenzaA__AHM00929

SEQ ID NO: 217208 - RNA, 1410 nt, Artificial Sequence
  derived and/or modified CDS sequence (opt5) from neuraminidase__InfluenzaA__AHM00941
augaaccccaaucagaagaucauuaccaucggcagcgugucccugacaauuucuacgaucugcuucuuuaugcaaauugccauccucaucaccacagucacccugcacuucaaacaguacgaguuuaacagcccuccgaauaaccagguuaugcuuugugaacccacaauuaucgagagaaauauuaccgaaaucguguaucugacaaacaccacgauugagaaggaaaucugcccuaaacccgcugaguaccggaauugguccaagccucagugugacauuaccggguucgcccccuuuucuaaagauaacagcauccgccucuccgcgggaggcgacaucugggugacaagagagccuuaugucucuugcgauccggacaaguguuaccaauucgcucuggggcagggaaccacacuuaauaacgugcauagcaauaacaccauucgggaucgcacgcccuauagaacacugcucaugaaugaacugggcguuccuuuucaccuggggaccaaacaggugugcaucgccugguccucuagcuccugucaugacggaaaggccuggcuccacgucugcauuacaggcgaugacaagaacgcuaccgccagcuucaucuacaauggccggcugguggauucuguuguguccuggagcaaagagauucuucgcacccaggaaucugagugugucugcaucaacgggacauguacgguggugaugaccgacggauccgcuagcggcaaggccgauacaaaaauccuguuuauugaggaagggaagaucguccauaccuccacacucucuggaagcgcgcaacacguugaggaaugcuccugcuaucccagauacccuggcgugcggugugugugccgcgacaacuggaaggggagcaauagacccauugucgauaucaacauuaaagaccacucuaucgugucccgguacguuuguagcggacuggugggcgacaccccgcgcaagaaugauucuagcuccucuagccauugccuugacccuaacaaugaggaaggcgggcacggagucaaaggcugggccuucgaugacgggaacgauguguggaugggaagaacgaucaaugagacaucccggcugggcuaugagaccuuuaagguuauugaaggguggagcaaccccaaaucuaagcuccagaucaaucgccaggugauugucgacagaggagaucgguccggcuacagcggcaucuucucuguggaggggaaauccuguauuaacagaugcuuuuaugucgaacugauccgcggacggaaggaggaaaccgaggugcuguggacaagcaauuccauuguuguguucuguggcaccucugggacauacggaacgggcagcuggccugacggggcugaucucaaccugaugcccaucuga

SEQ ID NO: 217209 - RNA, 1410 nt, Artificial Sequence
  derived and/or modified CDS sequence (opt5) from neuraminidase__InfluenzaA__AHM00953
augaaccccaaucagaagaucauuaccaucggcagcgugucccugacaauuucuacgaucugcuucuuuaugcaaauugccauccucaucaccacagucacccugcacuucaaacaguacgcuuuuaacagcccuccgaauaaccagguuaugcuuugugagcccacaauuaucgaaagaaauauuaccgagaucguguaucugacaaacaccacgauugaaaaggagaucugcccuaaacccgccgaauaccggaauugguccaagccucagugugggauuaccggauucgcgcccuuuucuaaagacaacagcauccgccucuccgcuggcggggauaucugggugacaagagagccuuaugucucuugcgacccggauaaguguuaccaauucgcccugggacagggcaccacacuuaauaacgugcauagcaauaacaccguucgggaccgcacgcccuauagaacacugcucaugaaugagcugggggugccuuuucaccugggaaccaagcaggucugcauugccugguccucuagcuccugucaugauggcaaggcuuggcuccacgugugcaucacaggcgacgauaaaaacgccaccgcuagcuucauuuacaaugggcggcugguugacucuguggucuccuggagcaaagaaauccuucgcacccaggagucugaaugugugugcauuaacggaacauguacgguggucaugaccgauggcuccgccagcgggaaggcggacacaaaaauccuguuuaucgaggagggaaagauuguucauaccuccacacucucuggcagcgcccaacacguggaagagugcuccugcuaucccagauacccuggggugcggugugucugccgcgauaacuggaagggaagcaauagacccaucguggacauuaacaucaaagaucacucuauuguuuccagcuacguguguucuggccuggucggcgacaccccgcggaagaaugacagcuccucuagcucccauugccuugauccuaacaaugaagaagggggacacggcgugaaagggugggcuuucgacgauggaaacgacguuuggaugggccgcacgaucaaugagacaagcagacugggguaugagaccuuuaaggugaucgagggauggucuaaccccaaauccaagcuccagauuaaucggcaggucaucguggaucgcggcgacagaagcggcuacucugggauuuucuccgucgaaggaaaaagcuguaucaaccggugcuuuuauguggagcugauuagaggccgcaaggaagagaccgaaguucuguggacauccaauucuaucguggucuucugugggaccagcggaacauacggcacgggguccuggccugauggcgccgaccucaaccugaugcccauuuga

SEQ ID NO: 217210 - RNA, 1410 nt, Artificial Sequence; identical to SEQ ID NO: 215447
  derived and/or modified CDS sequence (opt5) from neuraminidase__InfluenzaA__AHM00965

SEQ ID NO: 217211 - RNA, 1410 nt, Artificial Sequence; identical to SEQ ID NO: 215447
  derived and/or modified CDS sequence (opt5) from neuraminidase__InfluenzaA__AHM00977

SEQ ID NO: 217212 - RNA, 1398 nt, Artificial Sequence
  derived and/or modified CDS sequence (opt5) from neuraminidase__InfluenzaA__AHM24226
augaaccccaaucagaagauccugugcaccagcgccacagcuauuaucauuggcgccaucgcggugcucauugggaucgcuaaccugggacuuaauaucggccugcaccucaaaccuggguguaacugcucccauucucaaccggagacgaccaauacaagccagaccauuaucaacaauuacuauaacgaaacaaauauuaccaacauccagauggaggaaagaacaucccggaauuucaacaaucugaccaagggacuuuguacgauuaacucuuggcacaucuacggcaaagacaaugccguccgcauuggggagagcuccgauguucuggugaccagagaacccuaugugucuugcgacccugaugagugucgguuuuacgcccucagccagggaacaaccauccgcggcaagcauuccaacggcacaauccacgacagaagccaauaucgggcucugauuucuuggccccuguccagcccucccaccgucuacaacucucgcguggagugcaucgggugguccagcacgucuugucaugauggaaaauccagaaugagcauuugcaucuccggcccuaauaacaaugccucugcuguugugugguauaaccggcgcccggucgccgaaauuaauacaugggcgagaaacauccuccggacccaggagagcgaaugugugugccacaaugggguuugucccguggucuucacagacggauccgccaccggcccugcugauacccgcaucuacuacuuuaaggaggggaagaugcugaaaugggagagccuuacaggaacggccaagcacaacgaagagugcucuugcuauggcgaaagaaccggcauuacauguaccugccgggacaauuggcagggguccaaccgccccgugauccagauugauccuguggcuaugacacauaccagccaauacaucuguucucccguccugacggacaauccgagaccuaacgaucccaauauuggaaaaugcaacgacccuuaucccggcaauaacaacaaugggguuaagggauucagcuaccucgauggcgccaacacauggcuggggcggaccaucuccaccgcgucuagaagcggauaugagaugcuuaaagugcccaaugcccugacagacgaccgcuccaagccuauccagggccagaccauugugcucaacgcugauuggagcggcuacucuggguccuuuauggacuauugggccgaaggagauuguuaccgggcuugcuucuacgucgagcugaucagaggccgcccgaaggaggacaaagugugguggacaagcaauucuauuguuuccauguguagcuccacggaauuucuggggcaguggaacuggcccgauggagccaagaucgaguauuuccucuga

SEQ ID NO: 217213 - RNA, 1398 nt, Artificial Sequence; identical to SEQ ID NO: 215526
  derived and/or modified CDS sequence (opt5) from neuraminidase__InfluenzaA__AHM24238

SEQ ID NO: 217214 - RNA, 1398 nt, Artificial Sequence
  derived and/or modified CDS sequence (opt5) from neuraminidase__InfluenzaA__AHM24250
augaaccccaaucagaagauccugugcaccagcgccacagcuauuaucauuggcgccaucgcggugcucauugggaucgcuaaccugggacuuaauaucggccugcaccucaaaccuuccuguaacugcucucauagccaaccggagacgaccaauacaucccagaccauuaucaacaauuacuauaacgaaacaaauauuaccaacauccagauggaggaaagaacaucucggaauuucaacaaucugaccaaggggcuuuguacgauuaacagcuggcacaucuacggaaaagacaaugccguccgcauuggcgagaacuccgauguucuggugaccagagaacccuaugugucuugcgacccugaugagugucgguuuuacgcccucagccaggggacaaccauccgcggaaagcauuccaacggcacaauccacgacagaagccaauaucgggcucugauuucuuggccccuguccagcccucccaccgucuacaauucucgcguggagugcaucggcugguccagcacgucuugucaugaugggaaauccagaaugagcauuugcaucuccggaccuaacaauaacgccucugcuguugugugguauaaucggcgcccggucgccgaaauuaacacaugggcgagaaauauccuccggacccaggagagcgaaugugugugccacaacggcguuugucccguggucuucacagacggguccgccaccggaccugcugauacccgcaucuacuacuuuaaggagggcaagauucugaaaugggagagccuuacagggacggccaagcacaucgaagagugcucuugcuauggagaaagaaccggcauuacauguaccugccgggacaauuggcagggcuccaaccgccccgugauccagauugauccuguggcuaugacacauaccagccaauacaucuguucucccguccugacggacaauccgagaccuaacgaucccaauaucgggaaaugcaacgacccuuaucccggaaauaacaacaauggcguuaagggguucagcuaccucgauggagccaacacauggcugggccggaccauuuccaccgcgucuagaagcggguaugagaugcuuaaagugcccaaugcccugacagacgaccgcuccaagccuauccagggacagaccauugugcucaacgcugauuggagcggcuacucuggcuccuuuauggacuauugggccgaaggggauuguuaccgggcuugcuucuacgucgagcugaucagaggacgcccgaaggaggacaaagugugguggacaagcaauucuauuguuuccauguguagcuccacggaauuucugggccaguggaacuggcccgauggggccaagaucgaguauuuccucuga

SEQ ID NO: 217215 - RNA, 1410 nt, Artificial Sequence; identical to SEQ ID NO: 212781
  derived and/or modified CDS sequence (opt5) from neuraminidase__InfluenzaA__AHM98312

SEQ ID NO: 217216 - RNA, 1410 nt, Artificial Sequence
  derived and/or modified CDS sequence (opt5) from neuraminidase__InfluenzaA__AHM98331
augaaccccaaucagaagaucauuaccaucggcagcgugugcaugacaauugggauggccaaccugauccuccaaauuggaaauaucaucuccauuuggaucucucacagcauucagcugggcaaccagucccagaucgagacguguaaucaaucugucauuaccuacgaaaacaauacauggguuaaccagaccuaugugaauaucagcaacacaaauuucgcugccgggcaguccguggucucugugaaacuugcgggaaacagcucccugugcccuguuagcggcugggcuauuuacucuaaggacaauuccaucagaaucgggagcaaaggagauguguuugucauucgggagccguucaucucuuguagcccccucgaaugccgcaccuuuuuccugacacagggcgcccuucugaacgacaagcauuccaauggcaccauuaaagauagaucuccuuaucggacgcucauguccugucccaucggggaggugccuagccccuacaacucccgcuuugaaucuguugccuggagcgcuuccgccugccacgacggaauuaacuggcugaccaucggcaucagcgggccugauaauggagcuguggccguccugaaguauaacggcauuaucacagacaccauuaagucuuggagaaauaacauccuccggacacaagaguccgagugugcgugcgugaaugggagcuguuucaccauuaugacggauggaccgucugacggccaggccagcuacaaaaucuuucgcaucgaaaagggcaaaauugugaaguccgucgagaugaacgcucccaauuaucauuacgaagagugcucuuguuacccugauagcuccgagaucacaugcguuugcagagacaacuggcacgggagcaaucggcccugggugucuuucaaccagaaucuggaauaucagauuggauacaucuguuccggcauuuuuggggauaacccucgccccaaugacaaaaccggaagcugcggcccggugucuuccaacggggccaauggagucaagggcuucagcuuuaaguauggcaacgggguguggaucggaagaacaaaauccauuucuagccggaagggcuucgagaugaucugggauccuaacggguggaccggaaccgacaauaacuuuuccaucaaacaagacauuguuggcaucaaugaauggucuggguacagcggcuccuucgugcagcaucccgagcuuacaggacuggauuguauucgcccuugcuucugggucgaacucaucagaggccggcccaaggagaacacgauuuggaccagcgggucuuccaucagcuuuuguggagugcacucugacacaguuggcugguccuggcccgauggggcugagcugccuuucaccaucgacaaauga

SEQ ID NO: 217217 - RNA, 1410 nt, Artificial Sequence; identical to SEQ ID NO: 212797
  derived and/or modified CDS sequence (opt5) from neuraminidase__InfluenzaA__AHM98342

SEQ ID NO: 217218 - RNA, 1410 nt, Artificial Sequence
  derived and/or modified CDS sequence (opt5) from neuraminidase__InfluenzaA__AHM98353
augaaccccaaucagaagaucauuaccaucggcagcgugugcaugacaauugggauggccaaccugauccuccaaauuggaaauaucaucuccauuuggaucucucacagcauucagcugggcaaccagucccagaucgagacguguaaucaaucugucauuaccuacgaaaacaauacauggguuaaccagaccuaugugaauaucagcaacacaaauuucgcugccgggcaguccguggucucugugaaacuugcgggaaacagcucccugugcccuguuagcggcugggcuauuuacucuaaggacaauuccaucagaaucgggagcaaaggagauguguuugucauucgggagccguucaucucuuguagcccccucgaaugccgcaccuuuuuccugacacagggcgcccuucugaacgacaagcauuccaauggcaccauuaaagauagaucuccuuaucggacgcucauguccugucccaucggggaggugccuagccccuacaacucccgcuuugaaucuguugccuggagcgcuuccgccugccacgacggaauuaacuggcugaccaucggcaucagcgggccugauaauggagcuguggccguccugaaguauaacggcauuaucacagacaccauuaagucuuggagaaauaacauccuccggacacaagaguccgagugugcgugcguggaugggagcuguuucaccauuaugacggacggaccgucugauggccaggccagcuacaaaaucuuucgcaucgaaaagggcaaaauugugaaguccgucgagaugaaugcucccaacuaucauuacgaagagugcucuuguuacccugacagcuccgagaucacaugcguuugcagagauaauuggcacgggagcaaccggcccugggugucuuucaaucagaaccuggaauaucagauuggauacaucuguuccggcauuuuuggggacaauccucgccccaacgauaaaaccggaagcugcggcccggugucuuccaauggggccaacggagucaagggcuucagcuuuaaguauggcaaugggguguggaucggaagaacaaaauccauuucuagccggaagggcuucgagaugaucugggacccuaacggguggaccggaaccgacaacaauuuuuccaucaaacaagauauuguuggcaucaacgaauggucuggguacagcggcuccuucgugcagcaucccgagcuuacaggacuggacuguauucgcccuugcuucugggucgaacucaucagaggccggcccaaggagaauacgauuuggaccagcgggucuuccaucagcuuuuguggagugaacucugauacaguuggcugguccuggcccgacggggcugagcugccuuucaccaucgauaaauga

SEQ ID NO: 217219 - RNA, 1410 nt, Artificial Sequence
  derived and/or modified CDS sequence (opt5) from neuraminidase__InfluenzaA__AHM98364
augaaccccaaucagaagaucauuaccaucggcagcgugugcaugacaauugggauggccaaccugauccuccaaauuggaaauaucaucuccauuuggaucucucacagcauucagcugggcaaccagucccagaucgagacguguaaucaaucugucauuaccuacgaaaacaauacauggguuaaccagaccuaugugaauaucagcaacacaaauuucgcugccgggcaguccguggucucugugaaccuugcgggaaauagcucccugugcccuguuagcggcugggcuauuuacucuaaagacaacuccaucagaaucgggagcaagggagauguguuugucauucgggagccguucaucucuuguagcccccucgaaugccgcaccuuuuuccugacacagggcgcccuucugaaugacaaacauuccaacggcaccauuaaggauagaucuccuuaucggacgcucauguccugucccaucggggaggugccuagccccuacaacucccgcuuugaaucuguugccuggagcgcuuccgccugccacgacggaauuaauuggcugaccaucggcaucagcgggccugauaacggagcuguggccguccugaaauauaauggcauuaucacagacaccauuaagucuuggagaaacaauauccuccggacacaagaguccgagugugcgugcgugaacgggagcuguuucaccauuaugacggauggaccgucugacggccaggccagcuacaagaucuuucgcaucgaaaaaggcaagauugugaaauccgucgagaugaaugcucccaacuaucauuacgaagagugcucuuguuacccugauagcuccgagaucacaugcguuugcagagacaauuggcacgggagcaaccggcccugggugucuuucaaucagaaccuggaauaucagauuggauacaucuguuccggcauuuuuggggauaauccucgccccaacgacaagaccggaagcugcggcccggugucuuccaauggggccaacggagucaaaggcuucagcuuuaaguauggcaacgggguguggaucggaagaacaaaguccauuucuagccggaaaggcuucgagaugaucugggauccuaauggguggaccggaaccgacaacaauuuuuccaucaagcaagacauuguuggcaucaacgaauggucuggguacagcggcuccuucgugcagcaucccgagcuuacaggacuggauuguauucgcccuugcuucugggucgaacucaucagaggccggcccaaagagaauacgauuuggaccagcgggucuuccaucagcuuuuguggagugaacucugacacaguuggcugguccuggcccgauggggcugagcugccuuucaccaucgacaaguga

SEQ ID NO: 217220 - RNA, 1410 nt, Artificial Sequence
  derived and/or modified CDS sequence (opt5) from neuraminidase__InfluenzaA__AHM98375
augaaccccaaucagaagaucauuaccaucggcagcgugugcaugacaauugggauggccaaccugauccuccaaauuggaaauaucaucuccauuuggaucucucacagcauucagcugggcaaccagaaucagaucgagacguguaaccaauccgucauuaccuacgaaaauaacacauggguuaaucagaccuaugugaacaucucuaauacaaacuucgcugccgggcagagcguggucuccgugaaacuugcgggaaauucuagccugugcccuguuuccggcugggcuauuuacagcaaggacaacucuaucagaaucggguccaaaggagauguguuugucauucgggagccguucaucagcuguucuccccucgaaugccgcaccuuuuuccugacacagggcgcccuucugaaugacaagcauuccaacggcaccauuaaagauagaagcccuuuucggacgcucaugucuugucccaucggggaggugccuucccccuauaacagccgcuucgaauccguugccuggucugcuagcgccugccacgacggaauuaauuggcugaccaucggcaucuccgggccugauaacggagcuguggccguccugaaguacaauggcauuaucacagacaccauuaagagcuggagaaacaauauccuccggacacaagagucugagugugcgugcgugaacggguccuguuuuaccauuaugacggauggaccgagcgacggccaggccucuuauaaaaucuuccgcaucgaaaagggcaaaauugucaagagcguggagaugaaugcucccaacuaccauuaugaagagugcuccuguuacccugauucuagcgagaucacaugcguuugcagagacaauuggcacggguccaaccggcccugggugagcuuuaaucagaaccuggaauaccagauuggauauaucuguucuggcauuuucggggauaauccucgccccaacgacaaaaccggauccugcggcccggugagcucuaauggggccaacggagucaagggcuuuuccuucaaguacggcaacgggguguggaucggaagaacaaaaagcauuuccucucggaagggcuuugagaugaucugggauccuaauggguggaccggaaccgacaacaauuucagcaucaaacaagacauuguuggcaucaacgaaugguccggguauucuggcagcuucgugcagcaucccgagcuuacaggacuggauuguauucgcccuugcuuuugggucgaacucaucagaggccggcccaaggagaauacgauuuggaccuccgggagcucuaucuccuucuguggagugaacagcgacacaguuggcuggucuuggcccgauggggcugagcugccuuuuaccaucgacaaauga

SEQ ID NO: 217221 - RNA, 1410 nt, Artificial Sequence; identical to SEQ ID NO: 212781
  derived and/or modified CDS sequence (opt5) from neuraminidase__InfluenzaA__AHM98386

SEQ ID NO: 217222 - RNA, 1410 nt, Artificial Sequence
  derived and/or modified CDS sequence (opt5) from neuraminidase__InfluenzaA__AHM98408
augaaccccaaucagaagaucauuaccaucggcagcgugugcaugacaauugggauggccaaccugauccuccaaauuggaaauaucaucuccauuuggaucucucacagcauucagcugggcaaccagucccagaucgagacguguaaucaaucugucauuaccuacgaaaacaauacauggaucaaccagaccuauguuaauauuagcaacacaaauuucgcugccgggcaguccguggugucugucaaacuugcgggaaacagcucccugugcccugugagcggcugggcuaucuacucuaaggacaauuccaucagaauugggagcaaaggagauguuuuugugauccgggagccguucauuucuuguagcccccucgaaugccgcaccuuuuuccugacacagggcgcccuucugaacgacaagcauuccaauggcaccaucaaagauagaucuccuuaucggacgcucauguccugucccauuggggaggucccuagccccuacaacucccgcuuugaaucuguggccuggagcgcuuccgccugccacgacggaaucaacuggcugaccaucggcauuagcgggccugauaauggagcuguugccgugcugaaguauaacggcaucauuacagacaccaucaagucuuggagaaauaacauucuccggacacaagaguccgagugugcgugcgucaaugggagcuguuucaccaucaugacggauggaccgucugacggccaggccagcuacaaaaucuuucgcauugaaaagggcaaaaucgugaaguccguggagaugaacgcucccaauuaucauuacgaagagugcucuuguuacccugauagcuccgagauuacaugcgucugcagagacaacuggcacgggagcaaucggcccuggguuucuuucaaccagaaucuggaauaucagaucggauacauuuguuccggcaucuuuggggauaacccucgccccaaugacaaaaccggaagcugcggcccggugucuuccaacggggccaauggagugaagggcuucagcuuuaaguauggcaacggggucuggauuggaagaacaaaauccaucucuagccggaagggcuucgagaugaucugggauccuaacggguggaccggaaccgacaauuccuuuucuauuaaacaagacaucgugggcauuaacgaauggagcggguacuccggcagcuucguucagcaucccgagcuuacaggacuggauuguauccgcccuugcuucuggguggaacucauuagaggccggcccaaggagaauacgaucuggaccucuggguccagcaucucuuuuuguggagucaacuccgacacagugggcuggagcuggcccgauggggcugagcugccuuucaccauugacaaauga

SEQ ID NO: 217223 - RNA, 1410 nt, Artificial Sequence; identical to SEQ ID NO: 217222
  derived and/or modified CDS sequence (opt5) from neuraminidase__InfluenzaA__AHM98419

SEQ ID NO: 217224 - RNA, 1410 nt, Artificial Sequence
  derived and/or modified CDS sequence (opt5) from neuraminidase__InfluenzaA__AHM98430
augaaccccaaucagaagaucauuaccaucggcagcgugugcaugacaauugggauggccaaccugauccuccaaauuggaaauaucaucuccauuuggaucucucacagcauucagcugggcaaccagucccagaucgagacguguaaucaaaacgucauuaccuacgaaaauaacacauggguuaaucagaccuaugugaacaucucuaauacaaacuucgcugccgggcagagcguggucccugugaaacuugcgggaaauuccucucugugcccgguuagcggcugggcuauuuacuccaaggacaacagcaucagaaucgggucuaaaggagauguguuugucauucgggagcccuucaucuccuguagcccucucgaaugccgcaccuuuuuccugacacagggcgcccuucugaaugacaagcauucuaacggcaccauuaaagauagaucccccuaucggacgcucaugagcuguccuaucggggaggugcccucuccuuacaacucccgcuuugaaagcguugccugguccgcuucugccugccacgacggaauuaauuggcugaccaucggcaucagcgggccggauaacggagcuguggccguccugaaguauaauggcauuaucacagacaccauuaaguccuggagaaacaauauccuccggacacaagagagcgagugugcgugcgugaacgggucuuguuucaccauuaugacggauggacccuccgacggccaggccagcuacaaaaucuuucgcaucgaaaagggcaaaauugugaagucugucgagaugaaugcuccuaacuaucauuacgaagagugcagcuguuaccccgauuccucugagaucacaugcguuugcagagacaauuggcacgggagcaaccggccuuggguguccuucaaucagaaccuggaauaucagauuggauacaucuguagcggcauuuuuggggauaauccccgcccgaacgacaaaaccggaucuugcggcccuguguccagcaauggggccaacggagucaagggcuucucuuuuaaguauggcaacgggguguggaucggaagaacaaaauccauuagcucccggaagggcuucgagaugaucugggaucccaauggguggaccggaaccgacaacaauuuuucuaucaaacaagacauuguuggcaucaacgaauggagcggguacuccggcucuuucgugcagcauccugagcuuacaggacuggauuguauucgccccugcuucugggucgaacucaucagaggccggcccaaggagaauacgauuuggaccagcggguccagcaucucuuuuuguggagugaacuccgacacaguuggcuggagcuggccugauggggcugagcugccguucaccaucgacaaauga

SEQ ID NO: 217225 - RNA, 1410 nt, Artificial Sequence; identical to SEQ ID NO: 213029
  derived and/or modified CDS sequence (opt5) from neuraminidase__InfluenzaA__AHM98441

SEQ ID NO: 217226 - RNA, 1410 nt, Artificial Sequence
  derived and/or modified CDS sequence (opt5) from neuraminidase__InfluenzaA__AHM98452
augaaccccaaucagaagaucauuaccaucggcagcgugugcaugacaauugggauggccaaccugauccuccaaauuggaaauaucaucuccauuuggaucucucacagcauucagcugagaaaccagucccagaucgagacguguaaucaaucugucauuaccuacgaaaacaauacauggguuaaccagaccuaugugaauaucagcaacacaaauuucgcugccggccaguccguggucucugugaaacuugcggggaacagcucccugugcccuguuagcggaugggcuauuuacucuaaggacaauuccauccggaucggcagcaaaggggauguguuugucauucgcgagccguucaucucuuguucuccccucgaaugcagaaccuuuuuccugacacagggagcccuucugaacgacaagcauagcaauggcaccauuaaagaucggucuccuuaucgcacgcucauguccugucccaucggcgaggugccuagccccuacaacuccagauuugaaucuguugccuggagcgcuuccgccugccacgacgggauuaacuggcugaccaucggaaucagcggcccugauaauggggcuguggccguccugaaguauaacggaauuaucacagacaccauuaagucuuggcggaauaacauccuccgcacacaagaguccgagugugcgugcgugaauggcagcuguuucaccauuaugacggaugggccgucugacggacaggccagcuacaaaaucuuuagaaucgaaaagggcaaaauugugaaguccgucgagaugaacgcucccaauuaucauuacgaagagugcucuuguuacccugauagcuccgagaucacaugcguuugccgggacaacuggcacggcagcaaucgccccugggugucuuucaaccagaaucuggaauaucagauuggguacaucuguuccggaauuuuuggcgauaacccuagacccaaugacaaaaccgggagcugcggaccggugucuuccaacggcgccaauggggucaagggauucagcuuuaaguauggcaacggcguguggaucgggcggacaaaauccauuucuagccgcaagggauucgagaugaucugggauccuaacggcuggaccgggaccgacaauaacuuuuccaucaaacaagacauuguuggagugaaugaauggucuggcuacagcggguccuucguccagcaucccgagcuuacaggccuggauuguaucagaccuugcuucuggguggaacucauucggggacgccccaaggagaacacgaucuggaccagcggcuccuccauuagcuuuugugggguuaauucugacacagugggaugguccuggcccgauggcgcugagcugccuuucaccaucgacaaauga

SEQ ID NO: 217227 - RNA, 1410 nt, Artificial Sequence; identical to SEQ ID NO: 212781
  derived and/or modified CDS sequence (opt5) from neuraminidase__InfluenzaA__AHM98474

SEQ ID NO: 217228 - RNA, 1410 nt, Artificial Sequence
  derived and/or modified CDS sequence (opt5) from neuraminidase__InfluenzaA__AHM98485
augaaccccaaucagaagaucauuaccaucggcagcgugugcaugacaauugggauggccaaccugauccuccaaauuggaaauaucaucuccauuuggaucucucacagcauucagcugggcaaccagucccagaucgagacguguaaucaaucugucauuaccuacgaaaacaauacauggguuaaccagaccuaugugaauaucagcaacacaaauuucgcugccgggcaguccguggucucugugaaacuuguuggaaacagcucccugugcccugugagcggcugggcgauuuacucuaaggacaauuccaucagaaucgggagcaaaggagaugucuuugugauucgggagccguucaucucuuguagcccccucgaaugccgcaccuuuuuccugacacagggcgcccuucugaacgacaagcauuccaauggcaccauuaaagauagaucuccuuaucggacgcucauguccugucccaucggggagguuccuagccccuacaacucccgcuuugaaucuguggcuuggagcgccuccgcuugccacgacggaauuaacuggcugaccaucggcaucagcgggccugauaauggagccgucgcugugcugaaguauaacggcauuaucacagacaccauuaagucuuggagaaauaacauccuccggacacaagaguccgagugugccugcgugaaugggagcuguuucaccauuaugacggauggaccgucugacggccaggcgagcuacaaaaucuuucgcaucgaaaagggcaaaauugucaaguccguugagaugaacgcccccaauuaucauuacgaagagugcucuuguuacccugauagcuccgagaucacaugcgugugcagagacaacuggcacgggagcaaucggcccugggugucuuucaaccagaaucuggaauaucagauuggauacaucuguuccggcauuuuuggggauaacccucgccccaaugacaaaaccggaagcugcggcccggucucuuccaacggggcuaauggagugaagggcuucagcuuuaaguauggcaacgggguuuggaucggaagaacaaaauccauuucuagccggaagggcuucgagaugaucugggauccuaacggguggaccggaaccgacaauaacuuuuccaucaaacaagacauugugggcaucaaugaauggucuggguacagcggcuccuucguccagcaucccgagcuuacaggacuggauuguauucgcccuugcuucuggguggaacucaucagaggccggcccaaggagaacacgauuuggaccagcgggucuuccaucagcuuuuguggaguuaauucugacacagugggcugguccuggcccgauggggccgagcugccuuucaccaucgacaaauga

SEQ ID NO: 217229 - RNA, 1410 nt, Artificial Sequence
  derived and/or modified CDS sequence (opt5) from neuraminidase__InfluenzaA__AHM98496
augaaccccaaucagaagaucauuaccaucggcagcgugugcaugacaauugggauggccaaccugauccuccaaauuggaaauaucaucuccauuuggaucucucacagcauucagcugggcaaccagaaucagaucgagacguguaaccaauccgucauuaccuacgaaaauaacacauggguuaaucagaccuaugugaacaucucuaauacaaacuucgcugccgggcagagcguggucuccgugaaacuugcgggaaauucuagccugugcccuguuuccggcugggcuauuuacagcaaggacaacucuaucagaaucggguccaaaggagauguguuugucauucgggagccguucaucagcuguucuccccucgaaugccgcaccuuuuuccugacacagggcgcccuucugaaugacaagcauuccaacggcaccauuaaaaacagaagcccuuaucggacgcucaugucuugucccaucggggaggugccuucccccuacaauagccgcuuugaauccguugccuggucugcuagcgccugccacgauggaauuaacuggcugaccaucggcaucuccgggccugacaauggagcuguggccguccugaaguauaacggcauuaucacagauaccauuaagagcuggagaaauaacauccuccggacacaagagucugagugugcgugcgugaauggguccuguuucaccauuaugacggacggaccgagcgauggccaggccucuuacaaaaucuuucgcaucgaaaagggcaaaauugucaagagcguggagaugaacgcucccaauuaucauuacgaagagugcuccuguuacccugacucuagcgagaucaaaugcguuugcagagauaacuggcacggguccaaucggcccugggugagcuucaaccagaaucuggaauaucagauuggauacaucuguucuggcauuuuuggggacaacccucgccccaaugauaagacaggauccugcggcccggugagcucuaacggggccaacggagucaagggcuucuccuuuaaauauggcaaugggguguggaucggaagaaccaagagcauuuccucucggaaaggcuucgagaugaucugggacccuaacggguggacaggaaccgauaauaacuuuagcaucaagcaagacauuguuggcaucaaugaaugguccggguacucuggcagcuucgugcagcaucccgagcuuaccggacuggacuguauucgcccuugcuucugggucgaacucaucagaggccggcccaaagagaacacaauuuggacguccgggagcucuaucuccuuuuguggagugaauagcgauaccguuggcuggucuuggcccgacggggcugagcugccuuucacaaucgauaaguga

SEQ ID NO: 217230 - RNA, 1410 nt, Artificial Sequence; identical to SEQ ID NO: 212781
  derived and/or modified CDS sequence (opt5) from neuraminidase__InfluenzaA__AHM98507

SEQ ID NO: 217231 - RNA, 1410 nt, Artificial Sequence
  derived and/or modified CDS sequence (opt5) from neuraminidase__InfluenzaA__AHM98518
augaaccccaaucagaagaucauuaccaucggcagcgugugcaugacaauugggauggccaaccugauccuccaaauuggaaauaucaucuccauuuggaucucucacagcauucagcugggcaaccagucccagaucgagacguguaaucaaucugucauuaccuacgaaaacaauacauggaucaaccagaccuauguuaauauuagcaacacaaauuucgcugccgggcaguccguggugucugucaaacuugcgggaaacagcucccugugcccugugagcggcugggcuaucuacucuaaggacaauuccaucagaauugggagcaaaggagauguuuuugugauccgggagccguucauuucuuguagcccccucgaaugccgcaccuuuuuccugacacagggcgcccuucugaacgacaagcauuccaauggcaccaucaaagauagaucuccuuaucggacgcucauguccugucccauuggggaggucccuagccccuacaacucccgcuuugaaucuguggccuggagcgcuuccgccugccacgacggaaucaacuggcugaccaucggcauuagcgggccugauaauggagcuguugccgugcugaaguauaacggcaucauuacagacaccaucaagucuuggagaaauaacauucuccggacacaagaguccgagugugcgugcgucaaugggagcuguuucaccaucaugacggauggaccgucugacggccaggccagcuacaaaaucuuucgcauugaaaagggcaaaaucgugaaguccguggagaugaacgcucccaauuaucauuacgaagagugcucuuguuacccugauagcuccgagauuacaugcgucugcagagacaacuggcacgggagcaaucggcccuggguuucuuucaaccagaaucuggaauaucagaucggauacauuuguuccggcaucuuuggggauaacccucgccccaaugacaaaaccggaagcugcggcccggugucuuccaacggggccaauggagugaagggcuucagcuuuaaguauggcaacggggucuggauuggaagaacaaaauccaucucuagccggaagggcuucgagaugaucugggauccuaacggguggaccggaaccgacaauaacuuuuccauuaaacaagacaucgugggcauuaaugaauggucuggguacagcggcuccuucguucagcaucccgagcuuacaggacuggauuguauccgcccuugcuucuggguggaacucauuagaggccggcccaaggagaacacgaucuggaccagcgggucuuccaugagcuuuuguggagucaauucugacacagugggcugguccuggcccgauggggcugagcugccuuucaccaucgacaaauga

SEQ ID NO: 217232 - RNA, 1410 nt, Artificial Sequence; identical to SEQ ID NO: 212329
  derived and/or modified CDS sequence (opt5) from neuraminidase__InfluenzaA__AHM98529

SEQ ID NO: 217233 - RNA, 1410 nt, Artificial Sequence; identical to SEQ ID NO: 213073
  derived and/or modified CDS sequence (opt5) from neuraminidase__InfluenzaA__AHM98540

SEQ ID NO: 217234 - RNA, 1410 nt, Artificial Sequence
  derived and/or modified CDS sequence (opt5) from neuraminidase__InfluenzaA__AHM98562
augaaccccaaucagaagaucauuaccaucggcagcgugugcaugacaauugggauggccaaccugauccuccaaauuggaaauaucaucuccauuuggaucucucacagcauucagcugggcaaccagaaucagaucgagacguguaaccaauccgucauuaccuacgaaaauaacacauggguuaaucagaccuaugugaacaucucuaauacaaacuucgcugccgggcagagcguggucuccgugaaacuugcgggaaauucuagccugugcccuguuuccggcugggcuauuuacagcaaggacaacucuaucagaaucggguccaaaggagauguguuugucauucgggagccguucaucagcuguucuccccucgaaugccgcaccuuuuuccugacacagggcgcccuucugaaugacaagcauuccaacggcaccauuaaagauagaagcccuuaucggacgcucaugucuugucccaucggggaggugccuucccccuacaacagccgcuuugaauccguugccuggucugcuagcgccugccacgacggaauuaauuggcugaccaucggcaucuccgggccugauaacggagcuguggccguccugaaguauaauggcauuaucacagacaccauuaagagcuggagaaacaauauccuccggacacaagagucugagugugcgugcgugaacggguccuguuucaccauuaugacggauggaccgagcgacggccaggccucuuacaaaaucuuucgcaucgaaaagggcaaaauugucaagagcguggagaugaaugcucccaacuaucauuacgaagagugcuccuguuacccugauucuagcgagaucacaugcguuugcagagacaauuggcacggguccaaccggcccugggugagcuucaaucagaaccuggaauaucagauuggauacaucuguucuggcauuuuuggggauaauccucgccccaacgacaaagccggauccugcggcccggugagcucuaauggggcuaacggagucaagggcuucuccuuuaaguauggcaacgggguguggaucggaagaaccaaaagcauuuccucucggaagggcuucgagaugaucugggauccuaauggguggacaggaaccgacaacaauuuuagcaucaaacaagacauuguuggcaucaacgaaugguccggguacucuggcagcuucgugcagcaucccgagcuuaccggacuggauuguauucgcccuugcuucugggucgaacucaucagaggccggcccaaggagaauacaauuuggacguccgggagcucuaucuccuuuuguggagugaacagcuauaccguuggcuggucuuggcccgacggggccgagcugccuuucacaaucgauaaauga

SEQ ID NO: 217235 - RNA, 1410 nt, Artificial Sequence; identical to SEQ ID NO: 217224
  derived and/or modified CDS sequence (opt5) from neuraminidase__InfluenzaA__AHM98573

SEQ ID NO: 217236 - RNA, 1410 nt, Artificial Sequence
  derived and/or modified CDS sequence (opt5) from neuraminidase__InfluenzaA__AHM98584
augaaccccaaucagaagaucauuaccaucggcagcgugugcaugacaauugggauggccaaccugauccuccaaauuggaaauaucaucuccauuuggaucucucacagcauucagcugggcaaccagucccagaucgagacguguaaucaaucugucauuaccuacgaaaacaauacauggaucaaccagaccuauguuaauauuagcaacacaaauuucgcugccgggcaguccguggugucugucaaacuugcgggaaacagcucccugugcccugugagcggcugggcuaucuacucuaaggacaauuccaucagaauugggagcaaaggagauguuuuugugauccgggagccguucauuucuuguagcccccucgaaugccgcaccuuuuuccugacacagggcgcccuucugaacgacaagcauuccaauggcaccaucaaagauagaucuccuuaucggacgcucauguccugucccauuggggaggucccuagccccuacaacucccgcuuugaaucuguggccuggagcgcuuccgccugccacgacggaaucaacuggcugaccaucggcauuagcgggccugauaauggagcuguugccgugcugagauauaacggcaucauuacagacaccaucaagucuuggcggaauaacauucuccgcacacaagaguccgagugugcgugcgucaaugggagcuguuucaccaucaugacggauggaccgucugacggccaggccagcuacaagaucuuuagaauugaaaaaggcaagaucgugaaauccguggagaugaacgcucccaauuaucauuacgaagagugcucuuguuacccugauagcuccgagauuacaugcgucugccgggacaacuggcacgggagcaaucgccccuggguuucuuucaaccagaaucuggaauaucagaucggauacauuuguuccggcaucuuuggggauaacccuagacccaaugacaagaccggaagcugcggcccggugucuuccaacggggccaauggagugaaaggcuucagcuuuaaguauggcaacggggucuggauuggacggacaaaguccaucucuagccgcaaaggcuucgagaugaucugggauccuaacggguggaccggaaccgacaauuccuuuucuauuaagcaagacaucgugggcauuaacgaauggagcggguacuccggcagcuucguucagcaucccgagcuuacaggacuggauuguaucagaccuugcuucuggguggaacucauucggggccgccccaaagagaauacgaucuggaccucuggguccagcaucucuuuuuguggagucaacuccgacacagugggcuggagcuggcccgauggggcugagcugccuuucaccauugacaaguga

SEQ ID NO: 217237 - RNA, 1410 nt, Artificial Sequence; identical to SEQ ID NO: 217224
  derived and/or modified CDS sequence (opt5) from neuraminidase__InfluenzaA__AHM98595

SEQ ID NO: 217238 - RNA, 1410 nt, Artificial Sequence; identical to SEQ ID NO: 212781
  derived and/or modified CDS sequence (opt5) from neuraminidase__InfluenzaA__AHM98606

SEQ ID NO: 217239 - RNA, 1410 nt, Artificial Sequence
  derived and/or modified CDS sequence (opt5) from neuraminidase__InfluenzaA__AHM98617
augaaccccaaucagaagaucauuaccaucggcagcgugugcaugacaauugggauggccaaccugauccuccaaauuggaaauaucaucuccauuuggaucucucacagcauucagcugggcaaccagucccagaucgagacguguaaucaaucugucauuaccuacgaaaacaauacauggaucaaccagaccuauguuaauauuagcaacacaaauuucgcugccgggcaguccguggugucugucaaacuugcgggaaacagcucccugugcccugugagcggcugggcuaucuacucuaaggacaauuccaucagaauugggagcaaaggagauguuuuugugauccgggagccguucauuucuuguagcccccucggcugccgcaccuuuuuccugacacagggcgcccuucugaacgacaagcauagcaaugggaccaucaaagauagaucuccuuaucggacgcucauguccugucccauuggagaagucccuagccccuacaacucccgcuuugagucuguggccuggagcgcuuccgccugccacgacggcaucaacuggcugaccaucgggauuagcggaccugauaauggcgcuguugccgugcugaaguauaacgggaucauuacagacaccaucaagucuuggagaaauaacauucuccggacacaagaauccgagugugcgugcgucaauggaagcuguuucaccaucaugacggauggcccgucugacggccaggccagcuacaaaaucuuucgcauugagaaggggaaaaucgugaaguccguggaaaugaacgcucccaauuaucauuacgaggaaugcucuuguuacccugauagcuccgagauuacaugcgucugcagagacaacuggcacggaagcaaucggcccuggguuucuuucaaccagaaucuggaguaucagaucggcuacauuuguuccgggaucuuuggagauaacccucgccccaaugacaaaaccggcagcugcgggccggugucuuccaacggagccaauggcgugaagggcuucagcuuuaaguaugggaacggagucuggauuggcagaacaaaauccaucucuagccggaagggguucgaaaugaucugggauccuaacggauggaccggcaccgacaauuccuuuucuauuaaacaagacaucguggggauuaacgaguggagcggcuacuccggauccuucguucagcaucccgaacuuacaggccuggauuguauccgcccuugcuucuggguggagcucauuagagggcggcccaaggaaaauacgaucuggaccucuggauccagcaucucuuuuuguggcgucaacuccgacacagugggguggagcuggcccgauggagcugagcugccuuucaccauugacaaauga

SEQ ID NO: 217240 - RNA, 1410 nt, Artificial Sequence; identical to SEQ ID NO: 217222
  derived and/or modified CDS sequence (opt5) from neuraminidase__InfluenzaA__AHM98628

SEQ ID NO: 217241 - RNA, 1410 nt, Artificial Sequence
  derived and/or modified CDS sequence (opt5) from neuraminidase__InfluenzaA__AHM98639
augaaccccaaucagaagaucauuaccaucggcagcgugugcaugacaauugggauggccaaccugauccuccaaauuggaaauaucaucuccauuuggaucucucacagcauucagcugggcaaccagucccagaucgagacguguaaucaaucugucauuaucuacgaaaacaauaccuggauuaaccagacauauguuaauaucagcaacaccaauuucgcugccgagcaguccguggugucugucaaacuugcggggaacagcucccugugcccugugagcggaugggcuaucuacucuaaggacaauuccauuagaaucggcagcaaaggggauguuuuugugauucgggaaccguucaucucuuguagcccccucgagugccgcacauuuuuccugacccagggagcccuucugaacgacaagcauuccaauggcacaauuaaagauagaucuccuuaucggacccucauguccugucccaucggcgaagucccuagccccuacaacucccgcuuugagucuguggccuggagcgcuuccgccugccacgacgggaucaacuggcugacgauuggaaucagcggcccugauaauggggcuguugccgugcugaaguauaacggaauuaucaccgacacaauuaagucuuggagaaauaacauccuccggacccaagaguccgaaugugcgugcgucaauggcagcuguuucacaaucaugaccgaugggccgucugacggacaggccagcuacaaaauuuuucgcaucgagaagggcaaaauugugaaguccguggaaaugaacgcucccaauuaucauuacgaggagugcucuuguuacccugauagcuccgaaaucacgugcgucugcagagacaacuggcacggcagcaaucggcccuggguuucuuucaaccagaaucuggaguaucagauuggguacaucuguuccggaauuuuuggcgauaacccucgccccaaugacaaaacagggagcugcggaccggugucuuccaacggcgccaauggggugaagggauucagcuuuaaguauggcaacggcgucuggaucgggagaaccaaauccaucucuagccggaagggauucgaaaugauuugggauccuaacggcuggacagggaccgacaauuccuuuucuaucaaacaagacauugugggaaucaacgaguggagcggcuacuccgggagcuucguucagcaucccgaacuuaccggccuggauuguauucgcccuugcuucuggguggagcucaucagaggacggcccaaggagaauacaaucuggacgucuggcuccagcauuucuuuuuguggggucaacuccgacaccgugggauggagcuggcccgauggcgcugaacugccuuucacaaucgacaaauga

SEQ ID NO: 217242 - RNA, 1410 nt, Artificial Sequence; identical to SEQ ID NO: 212781
  derived and/or modified CDS sequence (opt5) from neuraminidase__InfluenzaA__AHM98650

SEQ ID NO: 217243 - RNA, 1410 nt, Artificial Sequence; identical to SEQ ID NO: 212781
  derived and/or modified CDS sequence (opt5) from neuraminidase__InfluenzaA__AHM98661

SEQ ID NO: 217244 - RNA, 1410 nt, Artificial Sequence
  derived and/or modified CDS sequence (opt5) from neuraminidase__InfluenzaA__AHM98672
augaaccccaaucagaagaucauuaccaucggcagcgugugcaugacaauugggauggccaaccugauccuccaaauuggaaauaucaucuccauuuggaucucucacagcauucagcugggcaaccagucccagaucgagacguguaaucaaaacgucauuaccuacgaaaauaacacauggguuaaucagaccuaugugaacaucucuaauacaaacuucgcugccgagcagagcguggucccugugaaacuugcgggaaauuccucucugugcccgguuagcgggugggcuauuuacuccaaggacaacagcaucagaaucggcucuaaaggggauguguuugucauucgggaacccuucaucuccuguagcccucucgagugccgcaccuuuuuccugacacagggagcccuucugaaugacaagcauucuaacggcaccauuaaagauagaucccccuaucggacgcucaugagcuguccuaucggcgaagugcccucuccuuacaacucccgcuuugagagcguugccugguccgcuucugccugccacgacgggauuaauuggcugaccaucggaaucagcggcccggauaacggggcuguggccguccugaaguauaauggaauuaucacagacaccauuaaguccuggagaaacaauauccuccggacacaagagagcgaaugugcgugcgugaacggcucuuguuucaccauuaugacggaugggcccuccgacggacaggccagcuacaaaaucuuucgcaucgagaagggcaaaauugugaagucugucgaaaugaaugcuccuaacuaucauuacgaggagugcagcuguuaccccgauuccucugaaaucacaugcguuugcagagacaauuggcacggcagcaaccggccuuggguguccuucaaucagaaccuggaguaucagauuggguacaucuguagcggaauuuuuggcgauaauccccgcccgaacgacaaaaccgggucuugcggaccuguguccagcaauggcgccaacggggucaagggauucucuuuuaaguauggcaacggcguguggaucgggagaacaaaauccauuagcucccggaagggauucgaaaugaucugggaucccaauggcuggaccgggaccgacaacaauuuuucuaucaaacaagacauuguuggaaucaacgaguggagcggcuacuccgggucuuucgugcagcauccugaacuuacaggccuggauuguauucgccccugcuucugggucgagcucaucagaggacggcccaaggagaauacgauuuggaccagcggcuccagcaucucuuuuuguggggugaacuccgacacaguuggauggagcuggccugauggcgcugaacugccguucaccaucgacaaauga

SEQ ID NO: 217245 - RNA, 1410 nt, Artificial Sequence
  derived and/or modified CDS sequence (opt5) from neuraminidase__InfluenzaA__AHM98683
augaaccccaaucagaagaucauuaccaucggcagcgugugcaugacaauugggauggccaaccugauccuccaaauuggaaauaucaucuccauuuggaucucucacagcauucagcugggcaaccagaaucagaucgagacguguaaccaauccgucauuaccuacgaaaauaacacauggguuaaucagaccuaugugaacaucucuaauacaaacuucgacgcugggcagagcguggucuccgugagacuugccggaaauucuagccugugcccuguuuccggcugggcgauuuacagcaaagauaacucuauccggaucggguccaagggagacguguuugucauucgcgagccguucaucagcuguucuccccucgaaugcagaaccuuuuuccugacacagggcgcccuucugaaugauaaacauuccaacggcaccauuaaggaccggagcccuuaucgcacgcucaugucuugucccaucggggaggugccuucccccuacaacagcagauuugaauccguugcuuggucugccagcgcuugccacgauggauucaauuggcugaccauuggcaucuccgggccugacaacggagccguggcuguccugaaauauaauggcaucauuacagauaccauccggagcuggcgcaacaauauucucagaacacaagagucugagugugccugcgugaacggguccuguuuuaccaucaugacggacggaccgagcgauggccaggcgucuuacaagauuuuccggaucgaaaagggcaaaaucgucaagagcguggagaugaaugcccccaacuaucauuacgaagagugcuccuguuacccugacucuagcgagauuacaugcguuugccgcgauaauuggcacggguccaacagacccugggugagcuuuaaucagaaccuggaauaucagaucggauacauuuguucuggcaucuucggggacaauccucggcccaacgauaaaaccggauccugcggcccggugagcucuaauggggcuaacggagucaagggcuuuuccuucaaauauggcaacgggguguggauuggacgcacaaagagcaucuccucuagaaagggcuuugagaugauuugggacccuaauggguggaccggaaccgacaacaauuucagcaucaaacaagauaucguuggcauuaacgaaugguccggguacucuggcagcuucgugcagcaucccgagcuuacaggacuggacuguauccggccuugcuuuugggucgaacucauucgcggcagacccaaggagaauacgaucuggaccuccgggagcucuauuuccuucuguggagugaacagcgauacaguuggcuggucuuggcccgacggggccgagcugccuuuuaccaucgauaaauga

SEQ ID NO: 217246 - RNA, 1410 nt, Artificial Sequence; identical to SEQ ID NO: 212781
  derived and/or modified CDS sequence (opt5) from neuraminidase__InfluenzaA__AHM98693

SEQ ID NO: 217247 - RNA, 1410 nt, Artificial Sequence; identical to SEQ ID NO: 215230
  derived and/or modified CDS sequence (opt5) from neuraminidase__InfluenzaA__AHM98704

SEQ ID NO: 217248 - RNA, 1410 nt, Artificial Sequence; identical to SEQ ID NO: 215230
  derived and/or modified CDS sequence (opt5) from neuraminidase__InfluenzaA__AHM98715

SEQ ID NO: 217249 - RNA, 1410 nt, Artificial Sequence; identical to SEQ ID NO: 212781
  derived and/or modified CDS sequence (opt5) from neuraminidase__InfluenzaA__AHM98726

SEQ ID NO: 217250 - RNA, 1410 nt, Artificial Sequence
  derived and/or modified CDS sequence (opt5) from neuraminidase__InfluenzaA__AHM98737
augaaccccaaucagaagaucauuaccaucggcagcgugugcaugacaauugggauggccaaccugauccuccaaauuggaaauaucaucuccauuuggaucucucacagcauucagcugagaaaccagucccagaucgagacguguaaucaaucugucauuaacuacgaaaauaacaccuggguuaaucagacauaugugaacaucagcaauaccaacuucgcugccggccaguccguggucucugugaaacuugcggggaauagcucccugugcccuguuagcggaugggcuauuuacucuaaggacaacuccauccggaucggcagcaaaggggauguguuugucauucgcgagccguucgugucuuguucuccccucgaaugcagaacauuuuuccugacccagggagcccuucugaaugacaagcauagcaacggcacaaucaaagaucggucuccuuaucgcacccucauguccugucccauuggcgagguuccuagccccuacaacuccagauuugaaucuguggccuggagcgcuuccgccugccacgacgggaucaauuggcugacgauuggaaucagcggcccugauaacggggcugucgccgugcugaaguauaauggaaucauuaccgacacaaucaagucuuggcggaacgauauucuccgcacccaagaguccgagugugcgugcgugaauggcagcuguuucacaaucaugaccgacgggccgucugauggacaggccagcuacaaaauuuuuagaaucgaaaagggcaaaaucgucaaguccguugagaugaacgcucccaauuaucauuacgaagagugcucuuguuacccugacagcuccgagauuacgugcgugugccgggauaacuggcacggcagcaaucgccccugggugucuuucaaccagaaucuggaauaucagaucggguacauuuguuccggaaucuuuggcgacaacccuagacccaaugauaaaacagggagcugcggaccggucucuuccaacggcgccaauggggugaagggauucagcuuuaaguauggcaacggcguuuggauugggcggaccaaauccaucucuagccgcaagggauucgagaugauuugggacccuaacggcuggacagggaccgacaauaacuuuuccaucaaacaagauaucgugggaauuaaugaauggucuggcuacagcggguccuucguccagcaucccgagcuuaccggccuggacuguaucagaccuugcuucuggguggaacucauucggggacgccccaaggagaacacaaucuggacgagcggcuccuccauuagcuuuugugggguuaauucugauaccgugggaugguccuggcccgacggcgcugagcugccuuucacaaucgauaaauga

SEQ ID NO: 217251 - RNA, 1410 nt, Artificial Sequence; identical to SEQ ID NO: 215230
  derived and/or modified CDS sequence (opt5) from neuraminidase__InfluenzaA__AHM98748

SEQ ID NO: 217252 - RNA, 1410 nt, Artificial Sequence; identical to SEQ ID NO: 215230
  derived and/or modified CDS sequence (opt5) from neuraminidase__InfluenzaA__AHM98759

SEQ ID NO: 217253 - RNA, 1410 nt, Artificial Sequence
  derived and/or modified CDS sequence (opt5) from neuraminidase__InfluenzaA__AHM98770
augaaccccaaucagaagaucauuaccaucggcagcgugugcaugacaauugggauggccaaccugauccuccaaauuggaaauaucaucuccauuuggaucucucacagcauucagcugagaaaccagucccagaucgagacguguaaucaaucugcuauuaccuacgaaaacaauacaugggucaaccagaccuauguuaauaucagcaacacaaauuucgccgcgggccaguccguggugucugucaaacuugcugggaacagcucccugugcccugugagcggaugggccauuuacucuaaggacaauuccauccggaucggcagcaaaggggauguuuuugugauucgcgagccguucaucucuuguucuccccucgaaugcagaaccuuuuuccugacacagggagcccuucugaacgacaagcauagcaauggcaccauuaaagaucggucuccuuaucgcacgcucauguccugucccaucggcgaggucccuagccccuacaacuccagauuugaaucuguggcuuggagcgccuccgcuugccacgacgggauuaacuggcugaccaucggaaucagcggcccugauaauggggccguugcggugcugaaguauaacggaauuaucacagacaccauuaagucuuggcggaauaacauccuccgcacacaagaguccgagugugccugcgucaauggcagcuguuucaccauuaugacggaugggccgucugacggacaggcuagcuacaaaaucuuuagaaucgaaaagggcaaaauugugaaguccguggagaugaacgcccccaauuaucauuacgaagagugcucuuguuacccugauagcuccgagaucacaugcgucugccgggacaacuggcacggcagcaaucgccccuggguuucuuucaaccagaaucuggaauaucagauuggguacaucuguuccggaauuuuuggcgauaacccuagacccaaugacaaaaccgggagcugcggaccggugucuuccaacggcgcuaauggggugaagggauucagcuuuaaguauggcaacggcgucuggaucgggcggacaaaauccauuucuagccgcaagggauucgagaugaucugggauccuaacggcuggaccgggaccgacaauaacuuuuccaucaaacaagacauugugggaaucaaugaauggucuggcuacagcggguccuucguucagcaucccgagcuuacaggccuggauuguauuagaccuugcuucuggguggaacucauccggggacgccccaaggagaacacgauuuggaccagcggcuccuccaucagcuuuuguggggucaauucugacacagugggaugguccuggcccgauggcgccgagcugccuuucaccaucgacaaauga

SEQ ID NO: 217254 - RNA, 1410 nt, Artificial Sequence
  derived and/or modified CDS sequence (opt5) from neuraminidase__InfluenzaA__AHM98781
augaaccccaaucagaagaucauuaccaucggcagcgugugcaugacaauugggauggccaaccugauccuccaaauuggaaauaucaucuccauuuggaucucucacagcauucagcugggcaaccagaaucagaucgagacguguaaccaauccgucauuaccuacgaaaauaacacauggguuaaucagaccuaugugaacaucucuaauacaaacuucgcugccgggcagagcguggucuccgugaaacuugcgggaaauucuagccugugcccuguuuccggcugggcuauuuacagcaaggacaacucuaucagaaucggguccaaaggagauguguuugucauucgggagccguucaucagcuguucuccccucgaaugccgcaccuuuuuccugacacagggcgcccuucugaaugacaagcauuccaacggcaccauuaaagauagaagcccuuaucggacgcucaugucuugucccaucggggaggugccuucccccuacaacagccgcuuugaauccguugccuggucugcuagcgccugccacgacggaauuaauuggcugaccaucggcaucuccgggccugauaacggagcuguggccguccugaaguauaauggcauuaucacagacaccauuaagagcuggagaaacaauauccuccggacacaagagucugagugugcgugcgugaacggguccuguuucaccauuaugacggauggaccgagcgacggccaggccucuuacaaaaucuuucgcaucgaaaagggcaaaauugucaagagcguggagaugaaugcucccaacuaucauuacgaagagugcuccuguuacccugauucuagcgagaucacaugcguuugcagagacaauuggcacggguccaaccggcccugggugagcuucaaucagaaccuggaauaucagauuggauacaucuguucuggcauuuuuggggauaauccucgccccuccgacaaaaccggaagcugcggcccggugucuuccaacggggccaauggagucaagggcuucagcuuuaaguauggcaacgggguguggaucggaagaacaaaauccauuucuagccggaagggcuucgagaugaucugggauccuaacggguggaccggaaccgacaauuccuuuucuaucaaacaagacauuguuggcaucaacgaauggagcggguacuccggcagcuucgugcagcaucccgagcuuacaggacuggauuguauucgcccuugcuucugggucgaacucaucagaggccggcccaaggagaauacgauuuggaccucuggguccagcaucucuuuuuguggagugaacuccggcacaguuggguggagcuggcccgacggagcugagcugccuuucaccaucgauaaauga

SEQ ID NO: 217255 - RNA, 1410 nt, Artificial Sequence; identical to SEQ ID NO: 212781
  derived and/or modified CDS sequence (opt5) from neuraminidase__InfluenzaA__AHM98801

SEQ ID NO: 217256 - RNA, 1410 nt, Artificial Sequence; identical to SEQ ID NO: 212329
  derived and/or modified CDS sequence (opt5) from neuraminidase__InfluenzaA__AHM98812

SEQ ID NO: 217257 - RNA, 1410 nt, Artificial Sequence
  derived and/or modified CDS sequence (opt5) from neuraminidase__InfluenzaA__AHM98823
augaaccccaaucagaagaucauuaccaucggcagcgugugcaugacaauugggauggccaaccugauccuccaaauuggaaauaucaucuccauuuggaucucucacagcauucagcugggcaaccagucccagaucgagacguguaaucaaucugucauuaccuacgaaaacaauacauggguuaaccagaccuauaucaauauuagcaacacaaauuucgcugccgggcaguccguggugucugucaaacuugcgggaaacagcucccugugcccugugagcggcugggcuaucuacucuaaggacaauuccaucagaauugggagcaaaggagauguuuuugugauccgggagccguucauuucuuguucccccagcgaaugccgcaccuuuuuccucacacagggcgcccugcuuaacgacaagcauucuaauggcaccaucaaagauagauccccuuaucggacgcugaugagcugucccauuggggaggucccuucccccuacaacucucgcuuugaaagcguggccugguccgcuagcgccugccacgacggaaucaacuggcucaccaucggcauuucugggccugauaauggagcuguugccgugcugaaguauaacggcaucauuacagacaccaucaaguccuggagaaauaacauucugcggacacaagagagcgagugugcgugcgucaaugggucuuguuucaccaucaugacggauggaccgagcgacggccaggccuccuacaaaaucuuucgcauugaaaagggcaaaaucgugaagucuguggagaugaacgcucccaauuaucauuacgaagagugcagcuguuacccugauuccagcgagauuacaugcgucugcagagacaacuggcacgggucuaaucggcccuggguuuccuucaaccagaaucucgaauaucagaucggauacauuuguagcggcaucuuuggggauaacccucgccccaaugacaaaaccggaucuugcggcccgguguccagcaacggggccaauggagugaagggcuucuccuuuaaguauggcaacggggucuggauuggaagaacaaaaucuaucagcucccggaagggcuucgagaugaucugggauccuaacggguggaccggaaccgacaauaacuuuucuauuaaacaagacaucgugggcauuaaugaauggagcggguacuccggcagcuucguucagcaucccgagcugacaggacuugauuguauccgcccuugcuucuggguggaacugauuagaggccggcccaaggagaacacgaucuggaccucuggguccagcaucucuuuuuguggagucaauuccgacacagugggcuggagcuggcccgauggggcugagcucccuuucaccauugacaaauga

SEQ ID NO: 217258 - RNA, 1410 nt, Artificial Sequence
  derived and/or modified CDS sequence (opt5) from neuraminidase__InfluenzaA__AHM98839
augaaccccaaucagaagaucauuaccaucggcagcgugugcaugacagucgggauggccaaccugauucuccaaaucggaaauauuaucuccaucuggauuucucacagcauccagcugggcaaccagucccagauugagacguguaaucaaucuguuaucaccuacgaaaacaauacaugggugaaccagaccuaugugaauauuagcaacacaaauuucgcugccgggcaguccgucgugucuguuaaacuugcgggaaacagcucccugugcccugugagcggcugggcuaucuacucuaaggacaauuccauuagaaucgggagcaaaggagaugucuuugugauccgggagccguucauuucuuguagcccccucgaaugccgcaccuuuuuccugacacagggcgcccuucugaacgacaagcauuccaauggcaccaucaaagauagaucuccuuaucggacgcucauguccugucccauuggggagguuccuagccccuacaacucccgcuuugaaucuguggccuggagcgcuuccgccugccacgacggaaucaacuggcugaccauuggcaucagcgggccugauaauggagcugucgccgugcugaaguauaacggcaucauuacagacaccaucaagucuuggagaaauaacauucuccggacacaagaguccgagugugcgugcgugaaugggagcuguuucaccaucaugacggauggaccgucugacggccaggccagcuacaaaauuuuucgcaucgaaaagggcaaaaucgucaaguccguugagaugaacgcucccaauuaucauuacgaagagugcucuuguuacccugauagcuccgagauuacaugcgugugcagagacaacuggcacgggagcaaucggcccugggugucuuucaaccagaaucuggaauaucagaucggauacauuuguuccggcaucuuuggggauaacccucgccccaaugacaaaaccggaagcugcggcccggucucuuccaacggggccaauggagugaagggcuucagcuuuaaguauggcaacgggguuuggauuggaagaacaaaauccaucucuagccggaagggcuucgagaugauuugggauccuaacggguggaccggaaccgacaauaacuuuuccaucaaacaagacaucgugggcauuaaugaauggucuggguacagcggcuccuucguccagcaucccgagcuuacaggacuggauuguauccgcccuugcuucuggguggaacucauuagaggccggcccaaggagaacacgaucuggaccagcgggucuuccauuagcuuuuguggaguuaauucugacacagugggcugguccuggcccgauggggcugagcugccuuucaccaucgacaaauga

SEQ ID NO: 217259 - RNA, 1410 nt, Artificial Sequence; identical to SEQ ID NO: 212329
  derived and/or modified CDS sequence (opt5) from neuraminidase__InfluenzaA__AHM98850

SEQ ID NO: 217260 - RNA, 1410 nt, Artificial Sequence; identical to SEQ ID NO: 212329
  derived and/or modified CDS sequence (opt5) from neuraminidase__InfluenzaA__AHM98861

SEQ ID NO: 217261 - RNA, 1410 nt, Artificial Sequence
  derived and/or modified CDS sequence (opt5) from neuraminidase__InfluenzaA__AHM98901
augaaccccaaucagaagaucauuaccaucggcagcgugugcaugacaauugggauggccaaccugauccuccaaauuggaaauaucaucuccauuuggaucucucacagcauucagcugggcaaccagaaucagaucgagacguguaaccaauccgucauuaccuacgaaaauaacacauggguuaaucagaccuaugugaacaucucuaauacaaacuucgcugccgggcagagcguggucuccgugaaacuugcgggaaauucuagccugugcccuguuuccggcugggcuauuuacagcaaggacaacucuaucagaaucggguccaaaggagauguguuugucauucgggagccguucaucagcuguucuccccucgaaugccgcaccuuuuuccugacacagggcgcccuucugaaugacaagcauuccaacggcaccauuaaagauagaagcccucaccggacgcucaugucuugucccaucggggaggugccuucccccuauaacagccgcuuugaauccguugccuggucugcuagcgccugccaugacggaauuaauuggcugaccaucggcaucuccgggccugauaacggagcuguggccguccugaaguacaauggcauuaucacagacaccauuaagagcuggagaaacaauauccuccggacacaagagucugagugugcgugcgugaacggguccuguuucaccauuaugacggauggaccgagcgacggccaggccucuuauaaaaucuuucgcaucgaaaagggcaaaauugucaagagcguggagaugaaugcucccaacuaccacuaugaagagugcuccuguuacccugauucuagcgagaucacaugcguuugcagagacaauuggcauggguccaaccggcccugggugagcuucaaucagaaccuggaauaccagauuggauauaucuguucuggcauuuuuggggauaauccucgccccaacgacaaaaccggauccugcggcccggugagcucuaauggggccaacggagucaagggcuucuccuuuaaguacggcaacgggguguggaucggaagaacaaaaagcauuuccucucggaagggcuucgagaugaucugggauccuaauggguggaccggaaccgacaacaauuuuagcaucaaacaagacauuguuggcaucaacgaaugguccggguauucuggcagcuucgugcagcaccccgagcuuacaggacuggauuguauucgcccuugcuucugggucgaacucaucagaggccggcccaaggagaauacgauuuggaccuccgggagcucuaucuccuuuuguggagugaacagcgacacaguuggcuggucuuggcccgauggggcugagcugccuuucaccaucgacaaauga

SEQ ID NO: 217262 - RNA, 1410 nt, Artificial Sequence; identical to SEQ ID NO: 215918
  derived and/or modified CDS sequence (opt5) from neuraminidase__InfluenzaA__AHM98912

SEQ ID NO: 217263 - RNA, 1410 nt, Artificial Sequence; identical to SEQ ID NO: 215918
  derived and/or modified CDS sequence (opt5) from neuraminidase__InfluenzaA__AHM98923

SEQ ID NO: 217264 - RNA, 1410 nt, Artificial Sequence; identical to SEQ ID NO: 215918
  derived and/or modified CDS sequence (opt5) from neuraminidase__InfluenzaA__AHM98935

SEQ ID NO: 217265 - RNA, 1410 nt, Artificial Sequence; identical to SEQ ID NO: 215918
  derived and/or modified CDS sequence (opt5) from neuraminidase__InfluenzaA__AHM98943

SEQ ID NO: 217266 - RNA, 1410 nt, Artificial Sequence; identical to SEQ ID NO: 215918
  derived and/or modified CDS sequence (opt5) from neuraminidase__InfluenzaA__AHM98954

SEQ ID NO: 217267 - RNA, 1410 nt, Artificial Sequence; identical to SEQ ID NO: 215918
  derived and/or modified CDS sequence (opt5) from neuraminidase__InfluenzaA__AHM98972

SEQ ID NO: 217268 - RNA, 1410 nt, Artificial Sequence; identical to SEQ ID NO: 215918
  derived and/or modified CDS sequence (opt5) from neuraminidase__InfluenzaA__AHM98978

SEQ ID NO: 217269 - RNA, 1410 nt, Artificial Sequence; identical to SEQ ID NO: 215918
  derived and/or modified CDS sequence (opt5) from neuraminidase__InfluenzaA__AHM98990

SEQ ID NO: 217270 - RNA, 1410 nt, Artificial Sequence; identical to SEQ ID NO: 215918
  derived and/or modified CDS sequence (opt5) from neuraminidase__InfluenzaA__AHM99000

SEQ ID NO: 217271 - RNA, 1410 nt, Artificial Sequence; identical to SEQ ID NO: 215918
  derived and/or modified CDS sequence (opt5) from neuraminidase__InfluenzaA__AHM99011

SEQ ID NO: 217272 - RNA, 1410 nt, Artificial Sequence; identical to SEQ ID NO: 215894
  derived and/or modified CDS sequence (opt5) from neuraminidase__InfluenzaA__AHM99022

SEQ ID NO: 217273 - RNA, 1410 nt, Artificial Sequence; identical to SEQ ID NO: 215894
  derived and/or modified CDS sequence (opt5) from neuraminidase__InfluenzaA__AHM99034

SEQ ID NO: 217274 - RNA, 1410 nt, Artificial Sequence; identical to SEQ ID NO: 215894
  derived and/or modified CDS sequence (opt5) from neuraminidase__InfluenzaA__AHM99046

SEQ ID NO: 217275 - RNA, 1410 nt, Artificial Sequence; identical to SEQ ID NO: 215894
  derived and/or modified CDS sequence (opt5) from neuraminidase__InfluenzaA__AHM99057

SEQ ID NO: 217276 - RNA, 1410 nt, Artificial Sequence; identical to SEQ ID NO: 215894
  derived and/or modified CDS sequence (opt5) from neuraminidase__InfluenzaA__AHM99068

SEQ ID NO: 217277 - RNA, 1410 nt, Artificial Sequence; identical to SEQ ID NO: 215918
  derived and/or modified CDS sequence (opt5) from neuraminidase__InfluenzaA__AHM99078

SEQ ID NO: 217278 - RNA, 1410 nt, Artificial Sequence
  derived and/or modified CDS sequence (opt5) from neuraminidase__InfluenzaA__AHN00720
augaacaccaaucagagaaucauuacaaucggcacgauuugccugaucguggggauuaucagccuccugcuucaaaucggaaacauugucucccuguggaucucucacagcauucagaccgaggaaaagucccaucccgagguuuguaaucagucugugaucacauacgaaaacaauaccugggugaaccagacauauauuaauaucagcaacaccaauauugccgcuggccaaggggucacaccuaucauccucgccggaaacuccucucugugcccgauuagcggcugggcgaucuacuccaaagacaauagcauucggaucgggucuaagggagauauuuucgugaugcgcgagcccuuuaucuccuguagccaccuugaaugcagaaccuucuuucugacgcagggcgcucuccugaacgaccggcauucuaauggcaccguuaaagaucgcuccccuuauagaacacugaugagcugucccaucggggaggccccuucucccuacaacucccgguucgagagcguggccugguccgcuucugccugccacgacggaaugggcuggcucaccauugggaucagcggaccugauaauggcgcugucgccgugcugaaguauaacgggauuaucacagacaccaugaaauccuggcgcaacaagauucuuagaacgcaggaaagcgaguguguuugcaucaauggaucuuguuuuacaaucaugaccgauggcccguccaacggccaggcgagcuacaagauuuucaaaauggaaaaggggaaaaucauuaagucuaucgagcuggacgcccccaauuaucauuacgaggaaugcagcuguuacccugauacaggaaaaguggucugcgugugccgggacaacuggcacgcuuccaaucgccccugggugucuuuugaucaaaaccucgacuaucagauuggcuacaucuguagcggggucuucggagauaauccuagauccaacgacggcaaggggaauugcggacccguucugagcaacggcgccaauggcgugaagggguuuucuuuccgguauggaaacggcguguggauugggcgcaccaaauccaucagcucuagauccggauuugagaugaucugggacccgaauggcuggaccgaaacagauagcuccuucucuaugaagcaggacauuaucgcucuuacggauuggagcggguacuccggcucuuuuguccagcacccugagcugaccggaaugaacuguauucggcccugcuucuggguggaacucauccgcggccaaccuaaagagagcacaauuuggaccuccgggagcucuaucuccuucuguggaguuaauagcgagacagccucuugguccuggcccgacggcgcggaucugcccuuuaccaucgacaaguga

SEQ ID NO: 217279 - RNA, 1410 nt, Artificial Sequence
  derived and/or modified CDS sequence (opt5) from neuraminidase__InfluenzaA__AHN00767
augaacaccaaucagagaaucauuacaaucggcacgauuugccugaucguggggauuaucagccuccugcuucaaaucggaaacauugucucccuguggaucucucacagcauucagaccggcgagaagucccaucccgaaguuuguaaucagucugugaucacauacgagaacaauaccugggugaaccagacauaugucaauauuagcaacaccaauaucgccgcugggcaaggagugacaccuauuauccucgccggcaacuccucucugugcccgaucagcgggugggcgauuuacuccaaagacaauagcauccggauuggaucuaagggcgauaucuucguuaugcgcgaacccuuuauuuccuguagccaccuugagugcagaaccuucuuucugacgcagggcgcucuccugaacgaccggcauucuaaugggaccgugaaagaucgcuccccuuauagaacacugaugagcugucccaucggagaagccccuucucccuacaacucccgguucgagagcgucgccugguccgcuucugccugccacgacggcaugggguggcucaccaucggaauuagcggcccugauaauggggcuguggccguucugaaguauaacggaaucauuacagacaccaucaaauccuggcgcaacaagauucuuagaacgcaggagagcgaaugugugugcaucaauggcucuuguuuuacaaucaugaccgauggcccguccaacgggcaggcgagcuacaagauuuucaaaauggagaagggaaaaaucauuaagucuaucgaacuggacgcccccaauuaucauuacgaggagugcagcuguuacccugauacaggcaaagucgugugcgugugccgggacaacuggcacgcuuccaaucgccccugggucucuuuugaucaaaaccucgacuaucagauuggguacaucuguagcggaguuuucggcgauaauccuagauccaacgacgggaagggaaauugcggccccgugcugagcaacggcgccaauggggugaagggauuuucuuuccgguauggcaacggggucuggauuggacgcaccaaauccaucagcucuagauccggcuuugaaaugaucugggacccgaauggguggaccgagacagauagcuccuucucuaugaagcaggacauuaucgcucuuacggauuggagcggcuacuccggaucuuuugugcagcacccugaacugaccggcaugaacuguauucggcccugcuucuggguugagcucauccgcgggcaaccuaaagaaagcacaauuuggaccuccggaagcucuaucuccuucuguggcgugaauagcgagacagccucuugguccuggcccgacggggcggaucugcccuuuaccaucgacaaguga

SEQ ID NO: 217280 - RNA, 1398 nt, Artificial Sequence
  derived and/or modified CDS sequence (opt5) from neuraminidase__InfluenzaA__AHN96324
augaaccccaaucagaagauccugugcaccagcgccacagcuauuaucauuggcgccaucgcggugcucauugggaucgcuaaccugggacuuaauaucggccugcaccucaaaccuuccuguaacugcucucauagccaaccggagacgaccaauacaucccagaccauuaucaacaauuacuauaacgaaacaaauauuaccaacauccagauggaggaaagaacaucucggaauuucaacaaucugaccaaggggcuuuguacgauuaacagcuggcacaucuacggaaaagacaaugccguccgcauuggcgaguccucugauguucuggugaccagagaacccuaugugagcugcgacccugaugagugucgguuuuacgcccucucccaggggacaaccauccgcggaaagcauagcaacggcacaauccacgacagaucucaauaucgggcucugauuuccuggccccugagcucuccucccaccgucuacaacucccgcguggagugcaucggcuggagcucuacguccugucaugaugggaaaagcagaauguccauuugcaucucuggaccuaauaacaaugccagcgcuguugugugguauaaccggcgcccggucgccgaaauuaauacaugggcgagaaacauccuccggacccaggaguccgaaugugugugccacaauggcguuugucccguggucuucacagacgggagcgccaccggaccugcugauacccgcaucuacuacuuuaaggagggcaagauucugaaaugggagucucuuacagggacggccaagcacaucgaagagugcuccugcuauggagaaagaaccggcauuacauguaccugccgggacaacuggcagggcagcaaucgccccguggugcagaucgauccugucgcuaugacacauaccucucaauacauuuguagccccguucugacggacaacccgagaccuaaugaucccaacaucgggaaaugcaaugacccuuaucccggaaacaauaacaacggcgugaagggguucuccuaccucgauggagccaauacauggcugggccggaccaucucuaccgcgagcagauccggguaugagaugcuuaaagugcccaacgcccugacagacgaccgcagcaagccuauucagggacagaccaucguccucaaugcugauuggucuggcuacuccggcagcuuuauggacuauugggccgaaggggauuguuaccgggcuugcuucuacguggagcugauuagaggacgcccgaaggaggacaaaguuugguggacaucuaacuccaucgugagcauguguuccucuacggaauuucugggccaguggaauuggcccgauggggccaagauugaguauuuccucuga

SEQ ID NO: 217281 - RNA, 1410 nt, Artificial Sequence; identical to SEQ ID NO: 213215
  derived and/or modified CDS sequence (opt5) from neuraminidase__InfluenzaA__AHN96448

SEQ ID NO: 217282 - RNA, 1410 nt, Artificial Sequence; identical to SEQ ID NO: 214218
  derived and/or modified CDS sequence (opt5) from neuraminidase__InfluenzaA__AHN96450

SEQ ID NO: 217283 - RNA, 1410 nt, Artificial Sequence
  derived and/or modified CDS sequence (opt5) from neuraminidase__InfluenzaA__AHN96451
augaaccccaaucagaagaucauuaccaucggcagcgugucccugacaauuucuacgaucugcuucuuuaugcaaauugccauccucaucaccacagucacccugcacuucaaacaguacgaguuuaacagcccuccgaauaaccagguuaugcuuugugaacccacaauuaucgagagaaauauuaccgaaaucauguaucugacaaacaccacgauugagaaggaaaucugcccuaaacccgcugaguaccggaauugguccaagccucagugugggauuaccggauucgcccccuuuucuaaagacaacagcauccgccucuccgcgggcggggauaucugggugacaagagagccuuaugugucuugcgacccggauaaguguuaccaauucgcucugggacagggcaccacacuuaauaacguccauagcaauaacaccgugcgggaccgcacgcccuauagaacacugcucaugaaugaacuggggguuccuuuucaccugggaaccaaacaggugugcauugccugguccucuagcuccugucaugauggcaaggccuggcuccacgucugcaucacaggcgacgauaagaacgcuaccgccagcuucauuuacaaugggcggcugguggacucuguuguguccuggagcaaagagauccuucgcacccaggaaucugagugugucugcauuaacggaacauguacgguggugaugaccgauggcuccgcuagcgggaaggccgacacaaaaauccuguuuaucgaggaaggaaagauuguccauaccuccacacucucuggcagcgcgcaacacguugaggaaugcuccugcuaucccagauacccuggggugcggugugugugccgcgauaacuggaagggaagcaauagacccaucgucgacauuaacaucaaagaucacucuauuguguccagcuacguuuguucuggccuggugggcgacaccccgcggaagaaugacagcuccucuagcucccauugccuugauccuaacaaugaggaagggggacacggcgucaaagggugggccuucgacgauggaaacgacguguggaugggccgcacgaucaaugagacaagcagacugggguaugagaccuuuaagguuaucgaaggauggucuaaccccaaauccaagcuccagauuaaucgccaggugaucgucgaucggggcgacagaagcggcuacucugggauuuucuccguggagggaaaaagcuguaucaaccggugcuuuuaugucgaacugauuagaggccgcaaggaggaaaccgaggugcuguggacauccaauucuaucguuguguucugugggaccagcggaacauacggcacgggguccuggccugauggcgcugaccucaaccugaugcccauuuga

SEQ ID NO: 217284 - RNA, 1410 nt, Artificial Sequence
  derived and/or modified CDS sequence (opt5) from neuraminidase__InfluenzaA__AHN96453
augaaccccaaucagaagaucauuaccaucggcagcgugucccugacaauuucuacgaucugcuucuuuaugcaaauugccauccucaucaccacagucacccugcacuucaaacaguacgaguuuaacagcccuccgaauaaccagguuaugcuuugugaacccacaauuaucgagagaaauauuaccgaaaucguguaucugacaaacaccacgauugagaaggaaaucugcccuaaacccgcugaguaccggaauugguccaagccucagugugggauuaccggauucgcccccuuuucuaaagacaacagcauccgccucuccgcgggcggggauaucugggugacaagagagccuuaugucucuugcgacccggauaaguguuaccaauucgcucugggacagggcaccacacuugacaaugugcauagcaacaauaccguucggaaccgcacgcccuauagaacacugcucaugaaugaacugggggugccuuuucaccugggaaccaagcaggucugcauugccugguccucuagcuccugucaugauggcaaagccuggcuccacgugugcaucacaggcgacgauaagaacgcuaccgccagcuucauuuacaaugggcggcugguugacucuguggucuccuggagcaaagauauccuucgcacccaggagucugaaugugugugcauuaacggaacauguacgguggucaugaccgacggcuccgcuagcgggaaggccgauacaaaaauccuguuuaucgaggagggaaagauuguucauaccuccacacucucuggcagcgcgcaacacguggaagagugcuccugcuaucccagauacccuggggugcggugugucugccgcgacaacuggaagggaagcaauagacccaucguggauauuaacaucaaagaccacucuauuguuuccagcuacguguguucuggccuggucggcgacaccccgcggaagaaugauagcuccucuagcucccauugccuugacccuaacaaugaagaagggggacacggcgugaaagggugggccuucgaugacggaaacgauguuuggaugggccgcacgaucaaugagacaagcagacugggguaugagaccuuuaaggugaucgagggauggucuaaccccaaauccaagcuccagauuaaucggcaggucaucguggaccgcggcgauagaagcggcuacucugggauuuucuccaucgaaggaaaaagcuguauuaaccggugcuuuuaugucgagcugaucagaggccgcaaggaagagaccgaagugcuguggacauccaauucuauuguuguguucugugggaccagcggaacauacggcacgggguccuggccugacggcgcugaucucaaccugaugcccaucuga

SEQ ID NO: 217285 - RNA, 1410 nt, Artificial Sequence
  derived and/or modified CDS sequence (opt5) from neuraminidase__InfluenzaA__AHZ13526
augaaccccaaucagaagaucauuaccaucggcagcgugucccugacaauugccacgaucugcuuccucaugcaaauugcuauccuggucaccacaguuacccuucacuuuaaacaguacgaguguucuagcccuccgaacaaucaggugaugcccugcgaaccuaucauuaucgagagaaacaugacagaaauuguguaucugaccaauacaaccaucgagaaggaaauuugucccaaacucgucgaguaccggaacugguccaagccucagugcaaaaucacgggguucgcccccuuuucuaaggacaauagcauucgccuguccgcgggaggcgauaucugggugaccagagagccuuauguuucuugugacccggggaagugcuaccaauucgcucuuggacagggcacaacccugaacaauaaacauagcaacgauacaauccacgaccggacccccuaucgcacgcuccugaugaaugaacugggggugccuuuucaucucggaacaaagcaggucuguauugccugguccuccucuuccugccacgauggcaaagccuggcugcauguguguguuaccggccacgacaagaacgcuacagccagcuucaucuacgaugggagacuuguggacucuauuggauccuggagcaaaaauauccugcggacccaggagucugaaugcgucuguauuaacgggaccugcacaguggugaugacggauggcuccgcuagcgaccgcgccgauaccaagauccucuuuaucgaggagggaaagauuguccacaucagcccccugucuggcagcgcgcaacauguugaagagugcuccuguuauccuagauaccccggggugcggugcgugugucgcgacaauuggaaaggaagcaacagaccgauugucgauaucaacgugaaggacuacucuauuguuuccagcuaugugugcucuggccuugucggcgacacaccucggaaaaaugaugggagcuccucuagcuacugucgcaaccccaauaacgaaaagggaaaucacggcgugaaagggugggccuucgacgauggaaacgacguuuggaugggcagaaccaucggggaggaacugcgguccggauaugagacauuuaaggugaucggcggcuggagcaccccuaauucuaaacuccagauuaaccgccaggucaucguggauuccaauaacagaagcggguacucuggaauuuucuccgucgagggcaagagcugcaucaaucgguguuuuuauguggaacugauuagagggcgcgagcaggaaacgcggguuugguggacauccaacucuaucguggucuucugcggaaccagcggcaccuacgggacaggcuccuggcccgacggagcugauauuaaucugaugcccaucuga

SEQ ID NO: 217286 - RNA, 1413 nt, Artificial Sequence; identical to SEQ ID NO: 212277
  derived and/or modified CDS sequence (opt5) from neuraminidase__InfluenzaA__AHZ13584

SEQ ID NO: 217287 - RNA, 1410 nt, Artificial Sequence; identical to SEQ ID NO: 214994
  derived and/or modified CDS sequence (opt5) from neuraminidase__InfluenzaA__AHZ35575

SEQ ID NO: 217288 - RNA, 1410 nt, Artificial Sequence; identical to SEQ ID NO: 214994
  derived and/or modified CDS sequence (opt5) from neuraminidase__InfluenzaA__AHZ35587

SEQ ID NO: 217289 - RNA, 1410 nt, Artificial Sequence
  derived and/or modified CDS sequence (opt5) from neuraminidase__InfluenzaA__AHZ35611
augaaccccaaucagaagaucauuaccaucggcagcgugucccugacaauuucuacgaucugcuucuuuaugcaaauugccauccucaucaccacagucacccugcacuucaaacaguacgaguuuaacagcccuccgaauaaccagguuaugcuuugugaacccacaauuaucgagagaaauauuaccgaaaucguguaucugacaaacaccacgauugagaaggaaaucugcccuaaacccgcugaguaccggaauugguccaagccucagugugacauuaccggguucgcccccuuuucuaaagauaacagcauccgccucuccgcgggaggcgacaucugggugacaagagagccuuaugucucuugcgauccggacaaguguuaccaauucgcucuggggcagggaaccacacuuaauaacgugcauagcaauaacaccguucgggaucgcacgcccuauagaacacugcucaugaaugaacugggcgugccuuuucaccuggggaccaagcaggucugcauugccugguccucuagcuccugucaugacggaaaagccuggcuccacgugugcaucacaggcgaugacaagaacgcuaccgccagcuucauuuacaauggccggcugguugauucuguggucuccuggagcaaagagauccuucgcacccaggaaucugagugugugugcauuaacgggacauguacgguggucaugaccgacggauccgcuagcggcaaggccgauacaaaaauccuguuuaucgaggaagggaagauuguucauaccuccacacucucuggaagcgcgcaacacguggaggaaugcuccugcuaucccagauacccuggcgugcggugugucugccgcgacaacuggaaggggagcaauagacccaucguggauauuaacaucaaagaccacucuauuguuuccagcuacguguguucuggacuggucggcgacaccccgcggaagaaugauagcuccucuagcucccauugccuugacccuaacaaugaggaaggcgggcacggagugaaaggcugggccuucgaugacgggaacgauguuuggaugggacgcacgaucaaugagacaagcagacugggcuaugagaccuuuaaggugaucgaaggguggucuaaccccaaauccaagcuccagauuaaucggcaggucaucguggaccgcggagauagaagcggcuacucuggcauuuucuccgucgaggggcggagcuguaucaacagaugcuuuuauguggaacugauucgcggacggaaagaggaaaccgagguucuguggacauccaauucuaucguggucuucuguggcaccagcgggacauacggaacgggcuccuggccugacggggcugaucucaaccugaugcccauuuga

SEQ ID NO: 217290 - RNA, 1410 nt, Artificial Sequence; identical to SEQ ID NO: 214994
  derived and/or modified CDS sequence (opt5) from neuraminidase__InfluenzaA__AHZ35623

SEQ ID NO: 217291 - RNA, 1410 nt, Artificial Sequence; identical to SEQ ID NO: 214994
  derived and/or modified CDS sequence (opt5) from neuraminidase__InfluenzaA__AHZ35635

SEQ ID NO: 217292 - RNA, 1410 nt, Artificial Sequence
  derived and/or modified CDS sequence (opt5) from neuraminidase__InfluenzaA__AHZ35647
augaaccccaaucagaagaucauuaccaucggcagcgugucccugacaauuucuacgaucugcuucuuuaugcaaauugccauccucaucaccacagucacccugcacuucaaacaguacgaguuuaacagcccuccgaauaaccagguuaugcuuugugaacccacaauuaucgagagaaauauuaccgaaaucguguaucugacaaacaccacgauugagaaggaaaucugcccuaaacccgcugaguaccggaauugguccaagccucagugugacauuaccggguucgcccccuuuucuaaagauaacagcauccgccucuccgcgggaggcgacaucugggugacaagagagccuuaugucucuugcgauccggacaaguguuaccaauucgcucuggggcagggaaccacacuuaauaacgugcauagcaauaacaccguucgggaucgcacgcccuauagaacacugcucaugaaugaacugggcgugccuuuucaccuggggaccaagcaggucugcauugccugguccucuagcuccugucaugacggaaaagccuggcuccacgugugcaucacaggcgaugacaagaacgcuaccgccagcuucauuuacaauggccggcugguugauucuguggucuccuggagcaaagagauccuucgcacccaggaaucugagugugugugcauuaacgggacauguacgguggucaugaccgacggauccgcuagcggcaaggccgauacaaaaauccuguuuaucgaggaagggaagauuguucauaccuccacacucucuggaagcgcgcaacacguggaggaaugcuccugcuaucccagauacccugacgugcggugugucugccgcgauaacuggaagggcagcaauagacccaucguggacauuaacaucaaagaccacucuauuguuuccagcuacguguguucugggcuggucggagauaccccgcggaagaaugacagcuccucuagcucccauugccuugauccuaacaaugaggaaggcggccacggggugaaaggaugggccuucgacgauggcaacgacguuuggauggggcgcacgaucaaugagacaagcagacugggauaugagaccuuuaaggugaucgaaggcuggucuaaccccaaauccaagcuccagauuaaucggcaggucaucguggaucgcggggacagaagcggauacucuggcauuuucuccgucgagggcaaaagcuguaucaaccggugcuuuuauguggaacugauuagagggcgcaaggaggaaaccgagguucuguggacauccaauucuaucguggucuucuguggaaccagcggcacauacgggacgggauccuggccugauggcgcugaccucaaccugaugcccauuuga

SEQ ID NO: 217293 - RNA, 1410 nt, Artificial Sequence; identical to SEQ ID NO: 214994
  derived and/or modified CDS sequence (opt5) from neuraminidase__InfluenzaA__AHZ35659

SEQ ID NO: 217294 - RNA, 1410 nt, Artificial Sequence; identical to SEQ ID NO: 214994
  derived and/or modified CDS sequence (opt5) from neuraminidase__InfluenzaA__AHZ35671

SEQ ID NO: 217295 - RNA, 1410 nt, Artificial Sequence; identical to SEQ ID NO: 214994
  derived and/or modified CDS sequence (opt5) from neuraminidase__InfluenzaA__AHZ35683

SEQ ID NO: 217296 - RNA, 1410 nt, Artificial Sequence
  derived and/or modified CDS sequence (opt5) from neuraminidase__InfluenzaA__AHZ35695
augaaccccaaucagaagaucauuaccaucggcagcgugucccugacaauuucuacgaucugcuucuuuaugcaaauugccauccucaucaccacagucacccugcacuucaaacaguacgaguuuaacccuccgcccaauaaccagguuaugcuuugugaaccuacaauuaucgagagaaauauuaccgaaaucguguaucugacaaacaccacgauugagaaggaaaucugccccaaaccugcugaguaccggaauuggagcaagccccagugugacauuaccggguucgccccuuuuuccaaagauaacucuauccgccucagcgcgggaggcgacaucugggugacaagagagccguaugucuccugcgaucccgacaaguguuaccaauucgcucuggggcagggaaccacacuuaauaacgugcauucuaauaacaccguucgggaucgcacgccuuauagaacacugcucaugaaugaacugggcgugcccuuucaccuggggaccaagcaggucugcauugccuggagcuccagcucuugucaugacggaaaagccuggcuccacgugugcaucacaggcgaugacaagaacgcuaccgccuccuucauuuacaaugagcggcugguugauagcguggucucuugguccaaagaaauccuucgcacccaggagagcgagugugugugcauuaacggcacauguacgguggucaugaccgacgggucugcuuccggaaaggccgauacaaaaauccuguuuaucgaagagggcaagauuguucauaccagcacacucuccgggucugcgcaacacguggaagagugcagcugcuauccuagauaccccggagugcggugugucugccgcgacaacuggaagggcuccaauagaccgaucguggauauuaacaucaaagaccacagcauuguuucuuccuacguguguagcgggcuggucggagacaccccucggaagaaugauucuagcuccucuagccauugccuugaccccaacaaugaagagggcggccacggggugaaaggaugggccuucgaugacggcaacgauguuuggauggggcgcacgaucaaugagacauccagacugggauaugaaaccuuuaaggugaucgagggcuggagcaacccuaaaucuaagcuccagauuaaucggcaggucaucguggaccgcggggauagauccggauacagcggcauuuucucugucgaaggcaacuccuguaucaaucggugcuuuuauguggagcugauuagagggcgcaaagaagagaccgagguucuguggacaagcaacuccaucguggucuucuguggaaccucuggcacauacgggacgggaagcuggcccgacggcgcugaucucaaucugaugcccauuuga

SEQ ID NO: 217297 - RNA, 1410 nt, Artificial Sequence
  derived and/or modified CDS sequence (opt5) from neuraminidase__InfluenzaA__AHZ35719
augaaccccaaucagaagaucauuaccaucggcagcgugucccugacaauuucuacgaucugcuucuuuaugcaaauugccauccucaucaccacagucacccugcacuucaaacaguacgaguuuaacagcccuccgaauaaccagguuaugcuuugugaacccacaauuaucgagagaaauauuaccgaaaucguguaucugacaaacaccacgauugagaaggaaaucugcccuaaacccgcugaguaccggaauugguccaagccucagugugacauuaccggguucgcccccuuuucuaaagauaacagcauccgccucuccgcgggaggcgacaucugggugacaagagagccuuaugucucuugcgauccggacaaguguuaccaauucgcucuggggcagggaaccacacuuaauaacgugcauagcaauaacaccguucgggaucgcacgcccuauagaacacugcucaugaaugaacugggcgugccuuuucaccuggggaccaagcaggucugcauugccugguccucuagcuccugucaugacggaaaagccuggcuccacgugugcaucacaggcgaugacaagaacgcuaccgccagcuucauuuacaauggccggcugguugauucuguggucuccuggagcaaagagauccuucgcacccaggaaucugagugugugugcauuaacgggacauguacgguggucaugaccgacggauccgcuagcggcaaggccgauacaaaaauccuguuuaucgaggaagggaagauuguucauaccuccacacucucuggaagcgcgcaacacguggaggaaugcuccugcuaucccagauacccuggcgugcggugugucugccgcgacaacuggaaggggagcaauagacccaucguggauauuaacaucaaagaccacucuauuguuuccagcuacguguguucuggacuggucggcgacaccccgcggaagaaugauagcuccucuagcucccauugccuugacccuaacaaugaggaaggcgggcacggagugaaaggcugggccuucgaugacgggaacgauguuuggaugggacgcacgaucaaugagacaagcagacugggcuaugagaccuuuaaggugaucgaaggguggucuaaccccaaauccaagcuccagauuaaucggcaggucaucguggaccgcggagauagaagcggcuacucuggcauuuucuccgucgaggggaaaagcuguaucaaccggugcuuuuauguggaacugauuagaggacgcaaggaggaaaccgagguucuguggacauccaauucuaucguggucuucuguggcaccagcgggacauacggaacgggcuccuggccugacggggcugaucucaaccugacccccauuuga

SEQ ID NO: 217298 - RNA, 1410 nt, Artificial Sequence; identical to SEQ ID NO: 214994
  derived and/or modified CDS sequence (opt5) from neuraminidase__InfluenzaA__AHZ35731

SEQ ID NO: 217299 - RNA, 1410 nt, Artificial Sequence; identical to SEQ ID NO: 214994
  derived and/or modified CDS sequence (opt5) from neuraminidase__InfluenzaA__AHZ35743

SEQ ID NO: 217300 - RNA, 1410 nt, Artificial Sequence; identical to SEQ ID NO: 214994
  derived and/or modified CDS sequence (opt5) from neuraminidase__InfluenzaA__AHZ35755

SEQ ID NO: 217301 - RNA, 1410 nt, Artificial Sequence; identical to SEQ ID NO: 214994
  derived and/or modified CDS sequence (opt5) from neuraminidase__InfluenzaA__AHZ35767

SEQ ID NO: 217302 - RNA, 1410 nt, Artificial Sequence; identical to SEQ ID NO: 214994
  derived and/or modified CDS sequence (opt5) from neuraminidase__InfluenzaA__AHZ35779

SEQ ID NO: 217303 - RNA, 1410 nt, Artificial Sequence
  derived and/or modified CDS sequence (opt5) from neuraminidase__InfluenzaA__AHZ35803
augaaccccaaucagaagaucauuaccaucggcagcgugugcaugacaauugggauggccaaccugaugcuccaaaucggaaauauuaucuccaucuggauuucucacagcauccagcugggcaacaaaaaucagauugagacguguaaccaguccgucaucaccuacgaaaauaacacauggguuaaucaaaccuaugugaacauuucuaauacaaacuucgcugccgggcagagcguggucuccgugaagaucgcgggaaauucuagccuuugcccuguuuccggcugggcuauuuacagcaaagacaacucuaucagaaucggguccaagggagauguguuugucauucgggagccguucaucagcuguucuccccuggaaugccgcaccuuuuuccucacacagggcgcccugcuuaaugacaaacauuccaacggcaccauuaaggauagaagcccuuaucggacgcugaugucuugucccaucggggaggugccuucccccuacaacagccgcuuugaauccguugccuggucugcuagcgccugccacgacggaauuaauuggcucaccaucggcaucuccgggccugauaacggagcuguggccguccugaaguauaauggcauuaucacagacaccauuaaaagcuggagaaacaauauccugcggacacaggagucugagugugcgugcgugaacggguccuguuucaccauuaugacggauggaccgagcgacggccaagccucuuacaagaucuuucgcaucgaaaaaggcaagauugugaaaagcgucgagaugaaugcucccaacuaucauuacgaagagugcuccuguuacccugauucuagcgagaucacaugcguuugcagagacaauuggcacggguccaaccggcccugggugagcuucaaucagaaccucgaauaucagauuggauacaucuguucuggcauuuuuggggauaauccucgcccccaugacaagaccggauccugcggcccggugagcucuaacggggccaauggagucaagggcuucuccuuuaaauauggcaacgggguguggaucggaagaacaaagagcauuuccucucggaaaggcuucgagaugaucugggauccuaacggguggaccggaaccgacaauaacuuuagcaucaagcaggacauuguuggcaugaaugaaugguccggguacucuggcagcuucgugcaacaccccgagcugacaggacuugauuguauccgcccuugcuucugggucgaacugauuagaggccggcccaaagagaacacgaucuggaccuccgggagcucuauuuccuuuuguggagugaauagcgacacaguuggcuggucuuggcccgauggggcugagcucccuuucaccaucgacaaguga

SEQ ID NO: 217304 - RNA, 1410 nt, Artificial Sequence
  derived and/or modified CDS sequence (opt5) from neuraminidase__InfluenzaA__AHZ35814
augaaccccaaucagaagaucauuaccaucggcagcgugucccugacaauuucuacgaucugcuucuuuaugcaaauugccauccucaucaccacagucacccugcacuucaaacaguacgaguuuaacagcccuccgaauaaccagguuaugcuuugugaacccacaauuaucgagagaaauauuaccgaaaucguguaucugacaaacaccacgauugagaaggaaaucugcccuaaacucgcugaguaccggaauugguccaagccccagugugacauuaccggguucgccccuuuuucuaaagauaacagcauccgccuguccgcgggaggcgaccuuugggugacaagagagcccuaugucucuugcgauccugacaaguguuaccaauucgcucuggggcagggaaccacacucaauaacgugcauagcaauaacaccguucgggaucgcacgccguauagaacacugcugaugaaugaacucggcgugcccuuucaccuggggaccaagcaggucugcaucgccugguccucuagcuccugucaugacggaaaagccuggcuucacgugugcauuacaggcgaugacaagaacgcuaccgccagcuucaucuacaauggccggcugguugauucuguggucuccuggagcaaagagauucuccgcacccaggaaucugagugugugugcaucaacgggacauguacgguggucaugaccgacggauccgcuagcggcaaggccgauacaaaaauucuguuuaucgaggaagggaagaucguucauaccuccacacuuucuggaagcgcgcaacacguggaggaaugcuccugcuauccuagauaccccggcgugcggugugucugccgcgacaacuggaaggggagcaauagaccuauuguggauaucaacauuaaagaccacucuaucguuuccagcuacguguguucuggacuggucggcgacacgccccggaagaaugauagcuccucuagcucccauugccucgacccgaacaaugaggaaggcgggcacggagugaaaggcugggccuucgaugacgggaacgauguuuggaugggacgcaccauuaaugagacaagcagacugggcuaugagaccuuuaaggugaucgaaggguggucuaacccuaaauccaagcugcagaucaaucggcaggucauuguggaccgcggaaacagaagcggcuacucuggcaucuucuccgucgaggggaaaagcuguauuaaucggugcuuuuauguggaacucaucagaggacgcaaggaggaaaccgagguucuguggacauccaacucuauuguggucuucuguggcaccagcgggacauacggaacgggcuccuggcccgauggggcugaccuuaaucugaugccuaucuga

SEQ ID NO: 217305 - RNA, 1410 nt, Artificial Sequence
  derived and/or modified CDS sequence (opt5) from neuraminidase__InfluenzaA__AHZ35837
augaaccccaaucagaagaucauuaccaucggcagcgugugcaugacaauugggauggccaaccugaugcuccaaaucggaaauauuaucuccaucuggauuucucacagcauccagcugggcaacaaaaaucagauugagacguguaaccaguccgucaucaccuacgaaaauaacacauggguuaaucaaaccuaugugaacauuucuaauacaaacuucgcugccgggcagagcguggucuccgugaagaucgcgggaaauucuagccuuugcccuguuuccggcugggcuauuuacagcaaagacaacucuaucagaaucggguccaagggagauguguuugucauucgggagccguucaucagcuguucuccccuggaaugccgcaccuuuuuccucacacagggcgcccugcuuaaugacaaacauuccaacggcaccauuaaggauagaagcccuuaucggacgcugaugucuugucccaucggggaggugccuucccccuacaacagccgcuuugaauccguugccuggucugcuagcgccugccacgacggaauuaauuggcucaccaucggcaucuccgggccugauaacggagcuguggccguccugaaguauaauggcauuaucacagacaccauuaaaagcuggagaaacaauauccugcggacacaggagucugagugugcgugcgugaacggguccuguuucaccauuaugacggauggaccgagcgacggccaagccucuuacaagaucuuucgcaucgaaaaaggcaagauugugaaaagcgucgagaugaaugcucccaacuaucauuacgaagagugcuccuguuacccugauucuagcgagaucacaugcguuugcagagacaauuggcacggguccaaccggcccugggugagcuucaaucagaaccucgaauaucagauuggauacaucuguucuggcauuuuuggggauaauccucgcccccaugacaagaccggauccugcggcccggugagcucuaacggggccaauggagucaagggcuucuccuuuaaauauggcaacgggguguggaucggaagaacaaagagcauuuccucucggaaaggcuucgagaugaucugggauccuaacggguggaccggaaccgacaauaacuuuagcaucaagcaggacauuguuggcaucaaugaaugguccggguacucuggcagcuucgugcaacaccccgagcugacaggacuugauuguauucgcccuugcuucugggucgaacugaucagaggccggcccaaagagaacacgauuuggaccuccgggagcucuaucuccuuuuguggagugaauagcgacacaguuggcuggucuuggcccgauggggcugagcucccuuucaccaucgacaaguga

SEQ ID NO: 217306 - RNA, 1410 nt, Artificial Sequence; identical to SEQ ID NO: 217305
  derived and/or modified CDS sequence (opt5) from neuraminidase__InfluenzaA__AHZ35848

SEQ ID NO: 217307 - RNA, 1410 nt, Artificial Sequence; identical to SEQ ID NO: 217305
  derived and/or modified CDS sequence (opt5) from neuraminidase__InfluenzaA__AHZ35859

SEQ ID NO: 217308 - RNA, 1410 nt, Artificial Sequence; identical to SEQ ID NO: 217304
  derived and/or modified CDS sequence (opt5) from neuraminidase__InfluenzaA__AHZ35870

SEQ ID NO: 217309 - RNA, 1410 nt, Artificial Sequence; identical to SEQ ID NO: 217304
  derived and/or modified CDS sequence (opt5) from neuraminidase__InfluenzaA__AHZ35882

SEQ ID NO: 217310 - RNA, 1410 nt, Artificial Sequence
  derived and/or modified CDS sequence (opt5) from neuraminidase__InfluenzaA__AHZ35894
augaaccccaaucagaagaucauuaccaucggcagcgugugcaugacaauugggauggccaaccugaugcuccaaaucggaaauauuaucuccaucuggauuucucacagcauccagcugggcaacaaaaaucagauugagacguguaaccaguccgucaucaccuacgaaaauaacacauggguuaaucaaaccuaugugaacauuucuaauacaaacuucgcugccgggcagagcguggucuccgugaagaucgcgggaaauucuagccuuugcccuguuuccggcugggcuauuuacagcaaagacaacucuaucagaaucggguccaagggagauguguuugucauucgggagccguucaucagcuguucuccccuggaaugccgcaccuuuuuccucacacagggcgcccugcuuaaugacaaacauuccaacggcaccauuaaggauagaagcccuuaucggacgcugaugucuugucccaucggggaggugccuucccccuacaacagccgcuuugaauccguugccuggucugcuagcgccugccacgacggaauuaauuggcucaccaucggcaucuccgggccugauaacggagcuguggccguccugaaguauaauggcauuaucacagacaccauuaaaagcuggagaaacaauauccugcggacacaggagucugagugugcgugcgugaacggguccuguuucaccauuaugacggauggaccgagcgacggccaagccucuuacaagaucuuucgcaucgaaaaaggcaagauugugaaaagcgucgagaugaaugcucccaacuaucauuacgaagagugcuccuguuacccugauucuagcgagaucacaugcguuugcagagacaauuggcacggguccaaccggcccugggugagcuucaaucagaaccucgaauaucagauuggauacaucuguucuggcauuuuuggggauaauccucgcccccaugacaagaccggauccugcggcccggugagcucuaacggggccaauggagucaagggcuucuccuuuaaauauggcagcgggguguggaucggaagaacaaaguccauuucuagccggaaaggcuucgagaugaucugggauccuaacggguggaccggaaccgacaacaauuuuuccaucaagcaggacauuguuggcaucaacgaauggucuggguacagcggcuccuucgugcaacaccccgagcugacaggacuugauuguauucgcccuugcuucugggucgaacugaucagaggccggcccaaagagaauacgauuuggaccagcgggucuuccaucagcuuuuguggagugaacucugacacaguuggcugguccuggcccgauggggcugagcucccuuucaccaucgacaaguga

SEQ ID NO: 217311 - RNA, 1410 nt, Artificial Sequence; identical to SEQ ID NO: 217305
  derived and/or modified CDS sequence (opt5) from neuraminidase__InfluenzaA__AHZ35905

SEQ ID NO: 217312 - RNA, 1410 nt, Artificial Sequence; identical to SEQ ID NO: 217305
  derived and/or modified CDS sequence (opt5) from neuraminidase__InfluenzaA__AHZ35916

SEQ ID NO: 217313 - RNA, 1410 nt, Artificial Sequence; identical to SEQ ID NO: 213030
  derived and/or modified CDS sequence (opt5) from neuraminidase__InfluenzaA__AHZ35927

SEQ ID NO: 217314 - RNA, 1410 nt, Artificial Sequence
  derived and/or modified CDS sequence (opt5) from neuraminidase__InfluenzaA__AHZ35938
augaaccccaaucagaagaucauuaccaucggcagcgugugcaugauuaucgggauggccaaccugauucuccaaaucggaaauaucauuuccaucuggauuucucacagcauccagcugggcaaccagaaucagauugagacauguaaccaauccgucaucacguacgaaaauaacaccuggguuaaucagacauaugugaacauuucuaauaccaacuucgcugccgggcagagcguggucuccgugaaacuugcgggaaauucuagccugugcccuguuuccggcugggcuaucuacagcaaggacaacucuaucagaauuggguccaaaggagauguguuugucauccgggagccguucauuagcuguucuccccucgaaugccgcacauuuuuccugacccagggcgcccuucugaaugacaagcauuccaacggcacaaucaaagauagaagcccuuaucggacccucaugucuugucccauuggggaggugccuucccccuacaacagccgcuuugaauccguugccuggucugcuagcgccugccacgacggaaucaauuggcugacgaucggcauuuccgggccugauaacggagcuguggccguccugaaguauaauggcaucauuaccgacacaaucaagagcuggagaaacaauauucuccggacccaagagucugagugugcgugcgugaacggguccuguuucacaaucaugaccgauggaccgagcgacggccaggccucuuacaaaaucuuucgcauugaaaagggcaaaaucgucaagagcguggagaugaaugcucccaacuaucauuacgaagagugcuccuguuacccugauucuagcgagauuacgugcguuugcagagacaauuggcacggguccaaccggcccugggugagcuucaaucagaaccuggaauaucagaucggauacauuuguucuggcaucuuuggggauaauccucgcccccaugacaaaacaggauccugcggcccggugagcucuaacggggccaauggagucaagggcuucuccuuuaaguauggcaacgggguguggauuggaagaaccaaaagcaucuccucucggaagggcuucgagaugaucugggauccuaacggguggacaggaaccgacaauaacuuuagcauuaaacaagacaucguuggcauuaaugaaugguccggguacucuggcagcuucgugcagcaccccgagcuuaccggacuggauuguauccgcccuugcuucugggucgaacucauuagaggccggcccaaggagaacacaaucuggacguccgggagcucuaucuccuuuuguggagugaauagcgacaccguuggcuggucuuggcccgauggggcugagcugccuuucacaauugacaaauga

SEQ ID NO: 217315 - RNA, 1410 nt, Artificial Sequence; identical to SEQ ID NO: 217304
  derived and/or modified CDS sequence (opt5) from neuraminidase__InfluenzaA__AHZ35949

SEQ ID NO: 217316 - RNA, 1410 nt, Artificial Sequence
  derived and/or modified CDS sequence (opt5) from neuraminidase__InfluenzaA__AHZ35961
augaaccccaaucagaagaucauuaccaucggcagcgugugcaugacaauugggauggccaaccugaugcuccaaaucggaaauauuaucuccaucuggauuucucacagcauccagcugggcaacaaaaaucagauugagacguguaaccaguccgucaucaccuacgaaaauaacacauggguuaaucaaaccuaugugaacauuucuaauacaaacuucgcugccgggcagagcguggucuccgugaagaucgcgggaaauucuagccuuugcccuguuuccggcugggcuauuuacagcaaagacaacucuaucagaaucggguccaagggagauguguuugucauucgggagccguucaucagcuguucuccccuggaaugccgcaccuuuuuccucacacagggcgcccugcuuaaugacaaacauuccaacggcaccauuaaggauagaagcccuuaucggacgcugaugucuugucccaucggggaggugccuucccccuacaacagccgcuuugaauccguugccuggucugcuagcgccugccacgacggaauuaauuggcucaccaucggcaucuccgggccugauaacggagcuguggccguccugaaguauaauggcauuaucacagacaccauuaaaagcuggagaaacaauauccugcggacacaggagucugagugugcgugcgugaacggguccuguuucaccauuaugacggauggaccgagcgacggccaagccucuuacaagaucuuucgcaucgaaaaaggcaagauugugaaaagcgucgagaugaaugcucccaacuaucauuacgaagagugcuccuguuacccugauucuagcgagaucacaugcguuugcagagacaauuggcacggguccaaccggcccugggugagcuucaaucagaaccucgaauaucagauuggauacaucuguucuggcauuuuuggggauaauccucgcccccaugacaagaccggauccugcggcccggugagcucuaacggggccaauggagucaagggcuucuccuuuaaauauggcaacgggguguggaucggaagaacaaagagcauuuccucucggaaaggcuucgagaugaucugggauccuaacggguggaccggaaccgacaauaacuuuagcaucaagcaggacauuguuggcaucaaugaaugguccggguacucuggcagcuucgugcaacaccccgagcugacaggacuugauuguauucgcccuugcuucugggucgaacugaucagaggccggcccaaagaguccacgauuuggaccagcgggucuuccaucagcuuuuguggagugaacucugacacaguuggcugguccuggcccgauggggcugagcucccuuucaccaucgacaaguga

SEQ ID NO: 217317 - RNA, 1410 nt, Artificial Sequence; identical to SEQ ID NO: 217305
  derived and/or modified CDS sequence (opt5) from neuraminidase__InfluenzaA__AHZ35972

SEQ ID NO: 217318 - RNA, 1410 nt, Artificial Sequence
  derived and/or modified CDS sequence (opt5) from neuraminidase__InfluenzaA__AHZ35983
augaaccccaaucagaagaucaccacaauuggcagcgugugcaugacgaucgggauggccaaccugaugcuccaaauuggaaauaucauuuccaucuggaucucucacagcauucagcugggcaacaaaaaucagaucgagaccuguaaccaguccgucauuacauacgaaaauaacaccuggguuaaucaaacauaugugaacaucucuaauaccaacuucgcugccgggcagagcguggucuccgugaagauugcgggaaauucuagccuuugcccuguuuccggcugggcuaucuacagcaaagacaacucuauuagaaucggguccaagggagauguguuugucauccgggagccguucauuagcuguucuccccuggaaugccgcacauuuuuccucacccagggcgcccugcuuaaugacaaacauuccaacggcacgaucaaggauagaagcccuuaucggacccugaugucuugucccauuggggaggugccuucccccuacaacagccgcuuugaauccguugccuggucugcuagcgccugccacgacggaaucaauuggcucacaauuggcaucuccgggccugauaacggagcuguggccguccugaaguauaauggcaucauuaccgacacaaucaaaagcuggagaaacaauauucugcggacccaggagucugagugugcgugcgugaacggguccuguuucacgaucaugacagauggaccgagcgacggccaagccucuuacaagauuuuucgcaucgaaaaaggcaagaucgugaaaagcgucgagaugaaugcucccaacuaucauuacgaagagugcuccuguuacccugauucuagcgagauuaccugcguuugcagagacaauuggcacggguccaaccggcccugggugagcuucaaucagaaccucgaauaucagaucggauacauuuguucuggcaucuuuggggauaauccucgcccccaugacaagacaggauccugcggcccggugagcucuaacggggccaauggagucaagggcuucuccuuuaaauauggcaacgggguguggauuggaagaaccaagagcaucuccucucggaaaggcuucgagaugauuugggauccuaacggguggaccggaacagacaauaacuuuagcaucaagcaggacaucguuggcauuaaugaaugguccggguacucuggcagcuucgugcaacaccccgagcugacgggacuugauuguauccgcccuugcuucugggucgaacugauuagaggccggcccaaagagaacaccaucuggacauccgggagcucuauuuccuuuuguggagugaauagcgacaccguuggcuggucuuggcccgauggggcugagcucccuuucacaaucgacaaguga

SEQ ID NO: 217319 - RNA, 1410 nt, Artificial Sequence; identical to SEQ ID NO: 217305
  derived and/or modified CDS sequence (opt5) from neuraminidase__InfluenzaA__AHZ35994

SEQ ID NO: 217320 - RNA, 1410 nt, Artificial Sequence; identical to SEQ ID NO: 217305
  derived and/or modified CDS sequence (opt5) from neuraminidase__InfluenzaA__AHZ36005

SEQ ID NO: 217321 - RNA, 1410 nt, Artificial Sequence; identical to SEQ ID NO: 217305
  derived and/or modified CDS sequence (opt5) from neuraminidase__InfluenzaA__AHZ36016

SEQ ID NO: 217322 - RNA, 1410 nt, Artificial Sequence
  derived and/or modified CDS sequence (opt5) from neuraminidase__InfluenzaA__AHZ36027
augaaccccaaucagaagaucauuaccaucggcagcgugugcaugacaauugggauggccaaccugauccuccaaauuggaaauaucaucuccauuuggaucucucacagcauucagcugggcaaccagaaucagaucgagacguguaaccaauccgucauuaucuacgaaaauaacaccuggguuaaucagacauaugugaacauuucuaauaccaacuucgcugccgggcagagcguggucuccgugaaacuugcgggaaauucuagccugugcccuguuuccggcugggcuaucuacagcaaggacaacucuaucagaauuggguccaaaggagauguguuugucauccgggagccguucauuagcuguucuccccucgaaugccgcacauuuuuccugacccagggcgcccuucugaaugacaagcauuccaacggcacaaucaaagauagaagcccuuaucggacccucaugucuugucccauuggggaggugccuucccccuacaacagccgcuuugaauccguugccuggucugcuagcgccugccacgacggauucaauuggcugacgaucggcaucuccgggccugauaacggagcuguggccguccugaaguauaauggcauuaucaccgacacaauuaagagcuggagaaacaauauccuccggacccaagagucugagugugcgugcgugaacggguccuguuuuacaauuaugaccgauggaccgagcgacggccaggccucuuacaaaaucuuccgcaucgaaaagggcaaaauugucaagagcguggagaugaaugcucccaacuaucauuacgaagagugcuccuguuacccugauucuagcgagaucacgugcguuugcagagacaauuggcacggguccaaccggcccugggugagcuuuaaucagaaccuggaauaucagauuggauacaucuguucuggcauuuucggggauaauccucgccccaacgacaaaacaggauccugcggcccggugagcucuaauggggccaacggagucaagggcuuuuccuucaaguauggcaacgggguguggaucggaagaaccaaaagcauuuccucucggaagggcuuugagaugaucugggauccuaauggguggacaggaaccgacaacaauuucagcaucaaacaagacauuaucggcauuaacgaaugguccggguacucuggcagcuucguucagcaucccgagcuuaccggacuggauuguauccgcccuugcuuuuggguggaacucauuagaggccggcccaaggagaauacaaucuggacguccgggagcucuaucuccuucuguggagucaacagcgacaccgugggcuggucuuggcccgauggggcugagcugccuuuuacaauugacaaauga

SEQ ID NO: 217323 - RNA, 1410 nt, Artificial Sequence
  derived and/or modified CDS sequence (opt5) from neuraminidase__InfluenzaA__AHZ36050
augaaccccaaucagaagaucauuaccaucggcagcgugucccugacaauuucuacgaucugcuucuuuaugcaaauugccauccucaucaccacagucacccugcacuucaaacaguacgaguuuaacagcccuccgaauaaccagguuaugcuuugugaacccacaauuaucgagagaaauauuaccgaaaucguguaucugacaaacaccacgauugagaaggaaaucugcccuaaacucgcugaguaccggaauugguccaagccccagugugacauuaccggguucgccccuuuuucuaaagauaacagcauccgccuguccgcgggaggcgacaucugggugacaagagagcccuaugucucuugcgauccugacaaguguuaccaauucgcucuugggcagggaaccacacugaauaacgugcauagcaauaacaccguucgggaucgcacgccguauagaacacuccugaugaaugaacugggcgugcccuuucaccucgggaccaagcaggucugcauugccugguccagcagcuccugucaugacggaaaagccuggcugcacgugugcaucacaggcgaugacaagaacgcuaccgccagcuucauuuacaauggccggcuuguugauucuguggucuccuggagcaaagagauccugcgcacccaggaaucugagugugugugcauuaacgggacauguacgguggucaugaccgacggauccgcuagcggcaaggccgauacaaaaauccucuuuaucgaggaagggaagauuguucauaccuccacacugucuggaagcgcgcaacacguggaggaaugcuccugcuauccuagauaccccggcgugcggugugucugccgcgacaacuggaaggggagcaauagaccuaucguggauauuaacaucaaagaccacucuauuguuuccagcuacguguguucuggacuugucggcgacacgccccggcgcaaugauagcuccucuagcucccauugccuggacccgaacaaugaggaaggcgggcacggagugaagggcugggccuucgaugacgggaacgauguuuggaugggaagaaccaucaaugagacaagccggcucggcuaugagaccuuuaaagugaucgaaggguggucuaacccuaaguccaaacugcagauuaaucgccaggucaucguggacagaggaaaccggagcggcuacucuggcauuuucuccgucgaggggaagucuuguaucaauagaugcuuuuauguggaacugauucgcggacggaaagaggaaaccgagguucucuggacauccaacucuaucguggucuucuguggcaccagcgggacauacggaacgggcuccuggcccgauggggcugaccugaaucuuaugccuauuuga

SEQ ID NO: 217324 - RNA, 1410 nt, Artificial Sequence
  derived and/or modified CDS sequence (opt5) from neuraminidase__InfluenzaA__AHZ36062
augaaccccaaucagaagaucauuaccaucggcagcgugugcaugacaauugggauggccaaccugaugcuccaaaucggaaauauuaucuccaucuggauuucucacagcauccagcugggcaacaaaaaucagauugagacguguaaccaguccgucaucaccuacgaaaauaacacauggguuaaucaaaccuaugugaacauuucuaauacaaacuucgcugccgggcagagcguggucuccgugaagaucgcgggaaauucuagccuuugcccuguuuccggcugggcuauuuacagcaaagacaacucuaucagaaucggguccaagggagauguguuugucauucgggagccguucaucagcuguucuccccugggcugccgcaccuuuuuccucacacagggcgcccugcuuaaugacaaacauuccaacgggaccauuaaggauagaagcccuuaucggacgcugaugucuugucccaucggagaagugccuucccccuacaacagccgcuuugaguccguugccuggucugcuagcgccugccacgacggcauuaauuggcucaccaucgggaucuccggaccugauaacggcgcuguggccguccugaaguauaaugggauuaucacagacaccauuaaaagcuggagaaacaauauccugcggacacaggaaucugagugugcgugcgugaacggauccuguuucaccauuaugacggauggcccgagcgacggccaagccucuuacaagaucuuucgcaucgagaaagggaagauugugaaaagcgucgaaaugaaugcucccaacuaucauuacgaggaaugcuccuguuacccugauucuagcgagaucacaugcguuugcagagacaauuggcacggauccaaccggcccugggugagcuucaaucagaaccucgaguaucagauuggcuacaucuguucugggauuuuuggagauaauccucgcccccaugacaagaccggcuccugcgggccggugagcucuaacggagccaauggcgucaagggcuucuccuuuaaauaugggaacggaguguggaucggcagaacaaagagcauuuccucucggaaaggguucgaaaugaucugggauccuaacggauggaccggcaccgacaauaacuuuagcaucaagcaggacauuguugggaucaaugagugguccggcuacucuggcagcuucgugcaacaccccgaacugacaggacuugauuguauucgcccuugcuucugggucgagcugaucagagggcggcccaaagaaaacacgauuuggaccuccggaagcucuaucuccuuuuguggcgugaauagcgacacaguuggguggucuuggcccgauggagcugagcucccuuucaccaucgacaaguga

SEQ ID NO: 217325 - RNA, 1410 nt, Artificial Sequence; identical to SEQ ID NO: 217305
  derived and/or modified CDS sequence (opt5) from neuraminidase__InfluenzaA__AHZ36084

SEQ ID NO: 217326 - RNA, 1410 nt, Artificial Sequence
  derived and/or modified CDS sequence (opt5) from neuraminidase__InfluenzaA__AHZ36095
augaaccccaaucagaagaucauuaccaucggcagcgugugcaugacaauugggauggccaaccugauccuccaaauuggaaauaucaucuccauuuggaucucucacagcauucagcugggcaaccagaaucagaucgagacguguaaccaauccgucauuaucuacgaaaauaacaccuggguuaaucagacauaugugaacauuucuaauaccaacuucgcugccgggcagagcguggucuccgugaaacuugcgggaaauucuagccugugcccuguuuccggcugggcuaucuacagcaaggacaacucuaucagaauuggguccaaaggagauguguuugucauccgggagccguucauuagcuguucuccccucgaaugccgcacauuuuuccugacccagggcgcccuucugaaugacaagcauuccaacggcacaaucaaagauagaagcccuuaucggacccucaugucuugucccauuggggaggugccuucccccuacaacagccgcuuugaauccguugccuggucugcuagcgccugccacgacggauucaauuggcugacgaucggcaucuccgggccugauaacggagcuguggccguccugaaguauaauggcauuaucaccgacacaauuaagagcuggagaaacaauauccuccggacccaagagucugagugugcgugcgugaacggguccuguuuuacaauuaugaccgauggaccgagcgacggccaggccucuuacaaaaucuuccgcaucgaaaagggcaaaauugucaagagcguggagaugaaugcucccaacuaucauuacgaagagugcuccuguuacccugauucuagcgagaucacgugcguuugcagagacaauuggcacggguccaaccggcccugggugagcuuuaaucagaaccuggaauaucagauuggauacaucuguucuggcauuuucggggauaauccucgccccaacgacaaaacaggaggcugcgggccgguguccagcaauggagccaacggcgucaagggcuuuucuuucaaguaugggaacggaguguggaucggcagaaccaaauccauuagcucccggaagggguuugagaugaucugggauccuaauggauggacaggcaccgacaacaauuucucuaucaaacaagacauuaucgggauuaacgaauggagcggcuacuccggaucuuucguucagcaucccgagcuuaccggccuggauuguauccgcccuugcuuuuggguggaacucauuagagggcggcccaaggagaauacaaucuggacgagcggauccagcaucucuuucuguggcgucaacuccgacaccgugggguggagcuggcccgauggagcugagcugccuuuuacaauugacaaauga

SEQ ID NO: 217327 - RNA, 1410 nt, Artificial Sequence; identical to SEQ ID NO: 217305
  derived and/or modified CDS sequence (opt5) from neuraminidase__InfluenzaA__AHZ36106

SEQ ID NO: 217328 - RNA, 1410 nt, Artificial Sequence
  derived and/or modified CDS sequence (opt5) from neuraminidase__InfluenzaA__AHZ36117
augaaccccaaucagaagaucauuaccaucggcagcgugugcaugacaauugggauggccaaccugauccuccaaauuggaaauaucaucuccauuuggaucucucacagcauucagcugggcaaccagaaucagaucgagacguguaaccaauccgucauuaucuacgaaaauaacaccuggguuaaucagacauaugugaacauuucuaauaccaacuucgcugccgggcagagcguggucuccgugaaacuugcgggaaauucuagccugugcccuguuuccggcugggcuaucuacagcaaggacaacucuaucagaauuggguccaaaggagauguguuugucauccgggagccguucauuagcuguucuccccucgaaugccgcacauuuuuccugacccagggcgcccuucugaaugacaagcauuccaacggcacaaucaaagauagaagcccuuaucggacccucaugucuuguuccauuggggaggugcccagcccuuacaacucccgcuuugaaucuguugccuggagcgcuuccgccugccacgacggauucaauuggcugacgaucggcaucagcgggcccgauaacggagcuguggccguccugaaguauaauggcauuaucaccgacacaauuaagucuuggagaaacaauauccuccggacccaagaguccgagugugcgugcgugaacgggagcuguuuuacaauuaugaccgauggaccuucugacggccaggccagcuacaaaaucuuccgcaucgaaaagggcaaaauugugaaguccgucgagaugaaugcuccgaacuaucauuacgaagagugcucuuguuaccccgauagcuccgagaucacgugcguuugcagagacaauuggcacgggagcaaccggccuugggugucuuuuaaucagaaccuggaauaucagauuggauacaucuguuccggcauuuucggggauaauccccgcccuaacgacaaaacaggaagcugcggccccgugucuuccaauggggccaacggagucaagggcuuuagcuucaaguauggcaacgggguguggaucggaagaaccaaauccauuucuagccggaagggcuuugagaugaucugggauccgaauggguggacaggaaccgacaacaauuucuccaucaaacaagacauuaucggcauuaacgaauggucuggguacagcggcuccuucguucagcauccugagcuuaccggacuggauuguauccgccccugcuuuuggguggaacucauuagaggccggccuaaggagaauacaaucuggacgagcgggucuuccaucagcuucuguggagucaacucugacaccgugggcugguccuggcccgauggggcugagcugcccuuuacaauugacaaauga

SEQ ID NO: 217329 - RNA, 1410 nt, Artificial Sequence; identical to SEQ ID NO: 217305
  derived and/or modified CDS sequence (opt5) from neuraminidase__InfluenzaA__AHZ36128

SEQ ID NO: 217330 - RNA, 1410 nt, Artificial Sequence; identical to SEQ ID NO: 217305
  derived and/or modified CDS sequence (opt5) from neuraminidase__InfluenzaA__AHZ36139

SEQ ID NO: 217331 - RNA, 1410 nt, Artificial Sequence; identical to SEQ ID NO: 217323
  derived and/or modified CDS sequence (opt5) from neuraminidase__InfluenzaA__AHZ36150

SEQ ID NO: 217332 - RNA, 1410 nt, Artificial Sequence; identical to SEQ ID NO: 217305
  derived and/or modified CDS sequence (opt5) from neuraminidase__InfluenzaA__AHZ36161

SEQ ID NO: 217333 - RNA, 1410 nt, Artificial Sequence; identical to SEQ ID NO: 217305
  derived and/or modified CDS sequence (opt5) from neuraminidase__InfluenzaA__AHZ36172

SEQ ID NO: 217334 - RNA, 1410 nt, Artificial Sequence
  derived and/or modified CDS sequence (opt5) from neuraminidase__InfluenzaA__AHZ36183
augaaccccaaucagaagaucauuaccaucggcagcgugugcaugacaauugggauggccaaccugaugcuccaaaucggaaauauuaucuccaucuggauuucucacagcauccagcugggcaacaaaaaucagauugagacguguaaccaguccgucaucaccuacgaaaauaacacauggguuaaucaaaccuaugugaacauuucuaauacaaacuucgcugccgggcagagcguggucuccgugaagaucgcgggaaauucuagccuuugcccuguuuccggcugggcuauuuacagcaaagacaacucuaucagaaucggguccaagggagauguguuugucauucgggagccguucaucagcuguucuccccuggaaugccgcaccuuuuuccucacacagggcgcccugcuuaaugacaaacauuccaacggcaccauuaaggauagaagcccuuaucggacgcugaugucuugucccaucggggaggugccuucccccuacaacagccgcuuugaauccguugccuggucugcuagcgccugccacgacggaauuaauuggcucaccaucggcaucuccgggccugauaacggagcuguggccguccugaaguauaauggcauuaucacagacaccauuaaaagcuggagaaacaauauccugcggacacaggagucugagugugcgugcgugaacggguccuguuucaccauuaugacggauggaccgagcgacggccaagccucuuacaagaucuuucgcaucgaaaaaggcaagauugugaaaagcgucgagaugaaugcucccaacuaucauuacgaagagugcuccuguuacccugauucuagcgagaucacaugcguuugcagagacaauuggcacggguccaaccggcccugggugagcuucaaucagaaccucgaauaucagauuggauacaucuguucuggcauucugggggauaauccucgcccccaugacaagaccggauccugcggcccggugagcucuaacggggccaauggagucaagggcuuuuccuucaaauauggcaacgggguguggaucggaagaacaaagagcauuuccucucggaaaggcuuugagaugaucugggauccuaacggguggaccggaaccgacaauaacuucagcaucaagcaggacauuguuggcaucaaugaaugguccggguacucuggcagcuuugugcaacaccccgagcuuacaggacuggauuguauucgcccuugcuucugggucgaacucaucagaggccggcccaaagagaacacgauuuggaccuccgggagcucuaucuccuucuguggagugaauagcgacacaguuggcuggucuuggcccgauggggcugagcugccuuuuaccaucgacaaguga

SEQ ID NO: 217335 - RNA, 1410 nt, Artificial Sequence; identical to SEQ ID NO: 217304
  derived and/or modified CDS sequence (opt5) from neuraminidase__InfluenzaA__AHZ36194

SEQ ID NO: 217336 - RNA, 1410 nt, Artificial Sequence; identical to SEQ ID NO: 217323
  derived and/or modified CDS sequence (opt5) from neuraminidase__InfluenzaA__AHZ36206

SEQ ID NO: 217337 - RNA, 1410 nt, Artificial Sequence; identical to SEQ ID NO: 217305
  derived and/or modified CDS sequence (opt5) from neuraminidase__InfluenzaA__AHZ36218

SEQ ID NO: 217338 - RNA, 1410 nt, Artificial Sequence; identical to SEQ ID NO: 217323
  derived and/or modified CDS sequence (opt5) from neuraminidase__InfluenzaA__AHZ36229

SEQ ID NO: 217339 - RNA, 1410 nt, Artificial Sequence; identical to SEQ ID NO: 217305
  derived and/or modified CDS sequence (opt5) from neuraminidase__InfluenzaA__AHZ36241

SEQ ID NO: 217340 - RNA, 1410 nt, Artificial Sequence; identical to SEQ ID NO: 217305
  derived and/or modified CDS sequence (opt5) from neuraminidase__InfluenzaA__AHZ36252

SEQ ID NO: 217341 - RNA, 1410 nt, Artificial Sequence; identical to SEQ ID NO: 217305
  derived and/or modified CDS sequence (opt5) from neuraminidase__InfluenzaA__AHZ36263

SEQ ID NO: 217342 - RNA, 1410 nt, Artificial Sequence; identical to SEQ ID NO: 214994
  derived and/or modified CDS sequence (opt5) from neuraminidase__InfluenzaA__AHZ36274

SEQ ID NO: 217343 - RNA, 1410 nt, Artificial Sequence; identical to SEQ ID NO: 217305
  derived and/or modified CDS sequence (opt5) from neuraminidase__InfluenzaA__AHZ36286

SEQ ID NO: 217344 - RNA, 1410 nt, Artificial Sequence
  derived and/or modified CDS sequence (opt5) from neuraminidase__InfluenzaA__AHZ36297
augaaccccaaucagaagaucauuaccaucggcagcgugucccugacaauuucuacgaucugcuucuuuaugcaaauugccauccucaucaccacagucacccugcacuucaaacaguacgaguuuaacagcccuccgaauaaccagguuaugcuuugugaacccacaauuaucgagagaaauauuaccgaaaucguguaucugacaaacaccacgauugagaaggaaaucugcccucggcccgcugaguaccgcaauugguccaaaccucagugugacauuaccggguucgcccccuuuucuaaggauaacagcaucagacucuccgcgggaggcgacaucugggugacacgggagccuuaugucucuugcgauccggacaaauguuaccaauucgcucuggggcagggaaccacacuuaauaacgugcauagcaauaacaccguucgcgauagaacgcccuaucggacacugcucaugaaugaacugggcgugccuuuucaccuggggaccaagcaggucugcauugccugguccucuagcuccugucaugacggaaaggccuggcuccacgugugcaucacaggcgaugacaaaaacgcuaccgccagcuucauuuacaauggccgccugguugauucuguggucuccuggagcaaggagauccuuagaacccaggaaucugagugugugugcauuaacgggacauguacgguggucaugaccgacggauccgcuagcggcaaagccgauacaaagauccuguuuaucgaggaagggaaaauuguucauaccuccacacucucuggaggcgcgcaacacguggaggaaugcagcugcuauccccgguacccuggggugcgcugugucugcagagacaacuggaagggauccaaucggcccaucguggauauuaacaucaaggaccacagcauuguuucuuccuacguguguagcggccuggucggcgacaccccgcgcaaaaaugauucuagcuccucuagccauugccuugacccuaacaaugaggaagggggacacggcgugaaggggugggccuucgaugacggaaacgauguuuggaugggcagaacgaucaaugagacaucccggcugggguaugagaccuuuaaagugaucgaaggauggagcaaccccaagucuaaacuccagauuaaucgccaggucaucguggacagaggcgaucgguccggcuacagcgggauuuucucugucgagggaaaguccuguaucaacagaugcuuuuauguggaacugauucgcggccggaaagaggaaaccgagguucuguggacaagcaauuccaucguggucuucugugggaccucuggaacauacggcacggggagcuggccugacggcgcugaucucaaccugaugcccauuuga

SEQ ID NO: 217345 - RNA, 1410 nt, Artificial Sequence
  derived and/or modified CDS sequence (opt5) from neuraminidase__InfluenzaA__AHZ36309
augaaccccaaucagaagaucauuaccaucggcagcgugugcaugacaauugggauggccaaccugaugcuccaaaucggaaauauuaucuccaucuggauuucucacagcauccagcugggcgacaaaaaccagauugagacguguaaucaguccgucaucaccuacgaaaacaauacauggguuaaccaaaccuaugugaauauuucuaacacaaauuucgcugccgggcagagcguggucuccgugaagaucgcgggaaacucuagccuuugcccuguuuccggcugggcuauuuacagcaaagauaauucuaucagaaucggguccaagggagacguguuugucauucgggagccguucaucagcuguucuccccuggaaugccgcaccuuuuuccucacacagggcgcccugcuuaacgauaaacauuccaauggcaccauuaaggacagaagcccuuaucggacgcugaugucuugucccaucggggaggugccuucccccuacaacagccgcuuugaauccguugccuggucugcuagcgccugccacgauggaauuaacuggcucaccaucggcaucuccgggccugacaauggagcuguggccguccugaaguauaacggcauuaucacagauaccauuaaaagcuggagaaauaacauccugcggacacaggagucugagugugcgugcgugaauggguccuguuucaccauuaugacggacggaccgagcgauggccaagccucuuacaagaucuuucgcaucgaaaaaggcaagauugugaaaagcgucgagaugaacgcucccaauuaucauuacgaagagugcuccuguuacccugacucuagcgagaucacaugcguuugcagagauaacuggcacggguccaaucggcccugggugagcuucaaccagaaucucgaauaucagauuggauacaucuguucuggcauuuuuggggacaacccucgcccccaugauaagaccggauccugcggcccggugagcucuaauggggccaacggagucaagggcuucuccuuuaaauauggcaaugggguguggaucggaagaacaaagagcauuuccucucggaaaggcuucgagaugaucugggacccuaacggguggaccggaaccgacaacaauuuuagcaucaagcaggauauuguuggcaucaacgaaugguccggguacucuggcagcuucgugcaacaccccgagcugacaggacuugacuguauucgcccuugcuucugggucgaacugaucagaggccggcccaaagagaauacgauuuggaccuccgggagcucuaucuccuuuuguggagugaacagcgauacaguuggcuggucuuggcccgacggggcugagcucccuuucaccaucgauaaguga

SEQ ID NO: 217346 - RNA, 1410 nt, Artificial Sequence; identical to SEQ ID NO: 217305
  derived and/or modified CDS sequence (opt5) from neuraminidase__InfluenzaA__AHZ36320

SEQ ID NO: 217347 - RNA, 1410 nt, Artificial Sequence; identical to SEQ ID NO: 217305
  derived and/or modified CDS sequence (opt5) from neuraminidase__InfluenzaA__AHZ36331

SEQ ID NO: 217348 - RNA, 1410 nt, Artificial Sequence; identical to SEQ ID NO: 214994
  derived and/or modified CDS sequence (opt5) from neuraminidase__InfluenzaA__AHZ36353

SEQ ID NO: 217349 - RNA, 1410 nt, Artificial Sequence
  derived and/or modified CDS sequence (opt5) from neuraminidase__InfluenzaA__AHZ36365
augaaccccaaucagaagaucauuaccaucggcagcgugugcaugacaauugggauggccaaccugaugcuccaaaucggaaauauuaucuccaucuggauuucucacccuauccagcugggcaacaaaaaucagauugagacguguaaccagagcgucaucaccuacgaaaauaacacauggguuaaucaaaccuaugugaacauuuccaauacaaacuucgcugccgggcagucuguggucagcgugaagaucgcgggaaauuccucucuuugcccgguuagcggcugggcuauuuacuccaaagacaacagcaucagaaucgggucuaagggagauguguuugucauucgggagcccuucaucuccuguagcccucuggaaugccgcaccuuuuuccucacacagggcgcccugcuuaaugacaaacauucuaacggcaccauuaaggauagaucccccuaucggacgcugaugagcuguccuaucggggaggugcccucuccuuacaacucccgcuuugaaagcguugccugguccgcuucugccugccacgacggaauuaauuggcucaccaucggcaucagcgggccggauaacggagcuguggccguccugaaguauaauggcauuaucacagacaccauuaaauccuggagaaacaauauccugcggacacaggagagcgagugugcgugcgugaacgggucuuguuucaccauuaugacggauggacccuccgacggccaagccagcuacaagaucuuucgcaucgaaaaaggcaagauugugaaaucugucgagaugaaugcuccuaacuaucauuacgaagagugcagcuguuaccccgauuccucugagaucacaugcguuugcagagacaauuggcacgggagcaaccggccuuggguguccuucaaucagaaccucgaauaucagauuggauacaucuguagcggcauuuuuggggauaauccccgcccgcaugacaagaccggaucuugcggcccuguguccagcaacggggccaauggagucaagggcuucucuuuuaaauauggcaacgggguguggaucggaagaacaaaguccauuagcucccggaaaggcuucgagaugaucugggaucccaacggguggaccggaaccgacaauaacuuuucuaucaagcaggacauuguuggcaucaaugaauggagcggguacuccggcucuuucgugcaacacccugagcugacaggacuugauuguauucgccccugcuucugggucgaacugaucagaggccggcccaaagagaacacgauuuggaccagcggguccagcaucucuuuuuguggaguuaauuccgacacagugggcuggagcuggccugauggggcugagcucccguucaccaucgacaaguga

SEQ ID NO: 217350 - RNA, 1410 nt, Artificial Sequence; identical to SEQ ID NO: 214994
  derived and/or modified CDS sequence (opt5) from neuraminidase__InfluenzaA__AHZ36376

SEQ ID NO: 217351 - RNA, 1410 nt, Artificial Sequence; identical to SEQ ID NO: 214994
  derived and/or modified CDS sequence (opt5) from neuraminidase__InfluenzaA__AHZ36388

SEQ ID NO: 217352 - RNA, 1410 nt, Artificial Sequence; identical to SEQ ID NO: 214994
  derived and/or modified CDS sequence (opt5) from neuraminidase__InfluenzaA__AHZ36400

SEQ ID NO: 217353 - RNA, 1410 nt, Artificial Sequence; identical to SEQ ID NO: 214994
  derived and/or modified CDS sequence (opt5) from neuraminidase__InfluenzaA__AHZ36412

SEQ ID NO: 217354 - RNA, 1410 nt, Artificial Sequence; identical to SEQ ID NO: 214994
  derived and/or modified CDS sequence (opt5) from neuraminidase__InfluenzaA__AHZ36424

SEQ ID NO: 217355 - RNA, 1410 nt, Artificial Sequence; identical to SEQ ID NO: 214994
  derived and/or modified CDS sequence (opt5) from neuraminidase__InfluenzaA__AHZ36436

SEQ ID NO: 217356 - RNA, 1410 nt, Artificial Sequence
  derived and/or modified CDS sequence (opt5) from neuraminidase__InfluenzaA__AHZ36448
augaaccccaaucagaagaucauuaccaucggcagcgugucccugacaauuucuacgaucugcuucuuuaugcaaauugccauccucaucaccacagucacccugcacuucaaacaguacgaguuuaacagcccuccgaauaaccagguuaugcuuugugaacccacaauuaucgagaagaauauuaccgaaaucguguaucugacaaacaccacgauugagaaagaaaucugcccuaagcccgcugaguacagaaauugguccaaaccucagugugacauuaccggguucgcccccuuuucuaaggauaacagcauccggcucuccgcgggaggcgacaucugggugacacgcgagccuuaugucucuugcgauccggacaaguguuaccaauucgcucuggggcagggaaccacacuuaauaacgugcauagcaauaacaccguuagagaucggacgcccuaucgcacacugcucaugaaugaacugggcgugccuuuucaccuggggaccaaacaggucugcauugccugguccucuagcuccugucaugacggaaaggccuggcuccacgugugcaucacaggcgaugacaaaaacgcuaccgccagcuucauuuacaauggcagacugguugauucuguggucuccuggagcaaggagauccuucggacccaggaaucugagugugugugcauuaacgggacauguacgguggucaugaccgacggauccgcuagcggcaaagccgauacaaagauccuguuuaucgaggaagggaagauuguucauaccuccacacucucuggaagcgcgcaacacguggaggaaugcuccugcuauccccgcuacccuggcgugagaugugucugccgggacaacuggaaagggagcaaucgccccaucguggauauuaacaucaaggaccacucuauuguuuccagcuacguguguucuggacuggucggcgacaccccgagaaagaaugauagcuccucuagcucccauugccuugacccuaacaaugaggaaggcgggcacggagugaagggcugggccuucgaugacgggaacgauguuuggaugggacggacgaucaaugagacaagccgccugggcuaugagaccuuuaaagugaucgaaggguggucuaaccccaaguccaaacuccagauuaauagacaggucaucguggaccggggagaucgcagcggcuacucuggcauuuucuccgucgaggggaaaagcuguaucaacagaugcuuuuauguggaacugauucggggaagaaaggaggaaaccgagguucuguggacauccaauucuaucguggucuucuguggcaccagcgggacauacggaacgggcuccuggccugacggggcugaucucaaccugaugcccauuuga

SEQ ID NO: 217357 - RNA, 1410 nt, Artificial Sequence; identical to SEQ ID NO: 214994
  derived and/or modified CDS sequence (opt5) from neuraminidase__InfluenzaA__AHZ36460

SEQ ID NO: 217358 - RNA, 1410 nt, Artificial Sequence; identical to SEQ ID NO: 214994
  derived and/or modified CDS sequence (opt5) from neuraminidase__InfluenzaA__AHZ36472

SEQ ID NO: 217359 - RNA, 1410 nt, Artificial Sequence; identical to SEQ ID NO: 214994
  derived and/or modified CDS sequence (opt5) from neuraminidase__InfluenzaA__AHZ36484

SEQ ID NO: 217360 - RNA, 1410 nt, Artificial Sequence; identical to SEQ ID NO: 214994
  derived and/or modified CDS sequence (opt5) from neuraminidase__InfluenzaA__AHZ36496

SEQ ID NO: 217361 - RNA, 1410 nt, Artificial Sequence; identical to SEQ ID NO: 214994
  derived and/or modified CDS sequence (opt5) from neuraminidase__InfluenzaA__AHZ36508

SEQ ID NO: 217362 - RNA, 1410 nt, Artificial Sequence; identical to SEQ ID NO: 214994
  derived and/or modified CDS sequence (opt5) from neuraminidase__InfluenzaA__AHZ36520

SEQ ID NO: 217363 - RNA, 1410 nt, Artificial Sequence
  derived and/or modified CDS sequence (opt5) from neuraminidase__InfluenzaA__AHZ36532
augaaccccaaucagaagaucauuaccaucggcagcgugucccugacaauuucuacgaucugcuucuuuaugcaaauugccauccucaucaccacagucacccugcacuucaaacaguacgaguuuaacagcccuccgaauaaccagguuaugcuuugugaacccacaauuaucgagagaaauauuaccgaaaucguguaucugacaaacaccacgauugagaaggaaaucugcccuaaacccgcugaguaccggaccugguccaagccucagugugacauuacaggguucgcccccuuuucuaaagauaauagcauccgccucuccgcgggaggcgacaucugggugaccagagagccuuaugucucuugcgauccggacaaguguuaccaauucgcucuggggcagggaacaacccuuaacaaugugcauagcaacaauacgguucgggaucgcacacccuauagaacccugcucaugaacgaacugggcgugccuuuucaccuggggacaaagcaggucugcauugccugguccucuagcuccugucaugacggaaaagccuggcuccacgugugcaucaccggcgaugacaagaaugcuaccgccagcuucauuuacaacggccggcugguugauucuguggucuccuggagcaaagagauccuucgcacacaggaaucugagugugugugcauuaaugggacguguaccguggucaugacagacggauccgcuagcggcaaggccgauaccaaaauccuguuuaucgaggaagggaagauuguucauacauccacccucucuggaagcgcgcaacacguggaggaaugcuccugcuaucccagauacccuggcgugcggugugucugccgcgacaacuggaaggggagcaacagacccaucguggauauuaauaucaaagaccacucuauuguuuccagcuacguguguucuggacuggucggcgacacgccgcggaagaacgauagcuccucuagcucccauugccuugacccuaauaacgaggaaggcgggcacggagugaaaggcugggccuucgaugacgggaaugauguuuggaugggacgcacaaucaacgagaccagcagacugggcuaugagaccuuuaaggugaucgaaggguggucuaaucccaaauccaagcuccagauuaaccggcaggucaucguggaccgcggagauagaagcggcuacucuggcauuuucuccgucgaggggaaaagcuguaucaaucggugcuuuuauguggaacugauuagaggacgcaaggaggaaacagagguucuguggaccuccaacucuaucguggucuucuguggcacaagcgggacguacggaaccggcuccuggccugacggggcugaucucaaucugaugcccauuuga

SEQ ID NO: 217364 - RNA, 1410 nt, Artificial Sequence; identical to SEQ ID NO: 214994
  derived and/or modified CDS sequence (opt5) from neuraminidase__InfluenzaA__AHZ36544

SEQ ID NO: 217365 - RNA, 1410 nt, Artificial Sequence; identical to SEQ ID NO: 214994
  derived and/or modified CDS sequence (opt5) from neuraminidase__InfluenzaA__AHZ36556

SEQ ID NO: 217366 - RNA, 1410 nt, Artificial Sequence; identical to SEQ ID NO: 214994
  derived and/or modified CDS sequence (opt5) from neuraminidase__InfluenzaA__AHZ36568

SEQ ID NO: 217367 - RNA, 1410 nt, Artificial Sequence; identical to SEQ ID NO: 214994
  derived and/or modified CDS sequence (opt5) from neuraminidase__InfluenzaA__AHZ36580

SEQ ID NO: 217368 - RNA, 1410 nt, Artificial Sequence; identical to SEQ ID NO: 214994
  derived and/or modified CDS sequence (opt5) from neuraminidase__InfluenzaA__AHZ36592

SEQ ID NO: 217369 - RNA, 1410 nt, Artificial Sequence; identical to SEQ ID NO: 214994
  derived and/or modified CDS sequence (opt5) from neuraminidase__InfluenzaA__AHZ36604

SEQ ID NO: 217370 - RNA, 1410 nt, Artificial Sequence; identical to SEQ ID NO: 214994
  derived and/or modified CDS sequence (opt5) from neuraminidase__InfluenzaA__AHZ36616

SEQ ID NO: 217371 - RNA, 1410 nt, Artificial Sequence
  derived and/or modified CDS sequence (opt5) from neuraminidase__InfluenzaA__AHZ36628
augaaccccaaucagaagaucauuaccaucggcagcgugucccugacaauuucuacgaucugcuucuuuaugcaaauugccauccucaucaccacagucacccugcacuucaaacagugugaguuuaacagcccuccgaauaaccagguuaugcuuugcgaacccacaauuaucgagagaaauauuaccgaaaucguguaccugacaaacaccacgauugagaaggaaaucuguccuaaacccgcugaguaucggaauugguccaagccucagugcgacauuaccggguucgcccccuuuucuaaagauaacagcauccgccucuccgcgggaggcgacaucugggugacaagagagccuuacgucucuugugauccggacaagugcuaucaauucgcucuggggcagggaaccacacuuaauaacgugcauagcaauaacaccguucgggaucgcacgcccuacagaacacugcucaugaaugaacugggcgugccuuuucaccuggggaccaagcaggucuguauugccugguccucuagcuccugccaugacggaaaagccuggcuccacguguguaucacaggcgaugacaagaacgcuaccgccagcuucauuuauaauggccggcugguugauucuguggucuccuggagcaaagagauccuucgcacccaggaaucugagugcguguguauuaacgggacaugcacgguggucaugaccgacggauccgcuagcggcaaggccgauacaaaaauccuguuuaucgaggaagggaagauuguucauaccuccacacucucuggaagcgcgcaacacguggaggaaugcuccuguuaccccagauauccuggcgugcggugcgucugucgcgacaacuggaaggggagcaauagacccaucguggauauuaacaucaaagaccacucuauuguuuccagcuacgugugcucuggacuggucggcgacaccccgcggaagaaugauagcuccucuagcucccauugucuugacccuaacaaugaggaaggcgggcacggagugaaaggcugggccuucgaugacgggaacgauguuuggaugggacgcacgaucaaugagacaagcagacugggcuacgagaccuuuaaggugaucgaaggguggucuaaccccaaauccaagcuccagauuaaucggcaggucaucguggaccgcggagauagaagcggcuauucuggcauuuucuccgucgaggggaaaagcugcaucaaccgguguuuuuacguggaacugauuagaggacgcaaggaggaaaccgagguucuguggacauccaauucuaucguggucuucugcggcaccagcgggacauauggaacgggcuccuggccugacggggcugaucucaaccugaugcccauuuga

SEQ ID NO: 217372 - RNA, 1410 nt, Artificial Sequence
  derived and/or modified CDS sequence (opt5) from neuraminidase__InfluenzaA__AHZ36640
augaaccccaaucagaagaucauuaccaucggcagcgugucccugacaauuucuacgaucugcuucuuuaugcaaauugccauccucaucaccacagucacccugcacuucaaacaguacgaguuuaacagcccuccgaauaaccagguuaugcuuugugaacccacaauuaucgagagaaauauuaccgaaaucguguaucugacaaacaccacgauugagaaggaaaucugcccuaaacccgcugaguaccggaauugguccaagccucagugugacauuaccggguucgcccccuuuucuaaagauaacagcauccgccucuccgcgggaggcgacaucugggugacaagagagccuuaugucucuugcgauccggacaaguguuaccaauucgcucuggggcagggaaccacacuuaauaacgugcauagcaauaacaccguucacgaucggacgcccuaucgcacacugcucaugaaugaacugggcgugccuuuucaucuggggaccaagcaggucugcauugccugguccucuagcuccugucacgacggaaaagccuggcuccaugugugcaucacaggcgaugacaagaacgcuaccgccagcuucauuuacaauggcagacugguugauucuguggucuccuggagcaaagagauccuucggacccaggaaucugagugugugugcauuaacgggacauguacgguggucaugaccgacggauccgcuagcggcaaggccgauacaaaaauccuguuuaucgaggaagggaagauuguucacaccuccacacucucuggaagcgcgcaacacguggaggaaugcuccugcuauccccgcuacccuggcgugagaugugucugccgggacaacuggaaggggagcaaucgccccaucguggauauuaacaucaaagaccauucuauuguuuccagcuacguguguucuggacuggucggcgacaccccgagaaagaaugauagcuccucuagcucccacugccuugacccuaacaaugaggaaggcgggcauggagugaaaggcugggccuucgaugacgggaacgauguuuggaugggacggacgaucaaugagacaagccgccugggcuaugagaccuuuaaggugaucgaaggguggucuaaccccaaauccaagcuccagauuaauagacaggucaucguggaccggggagaucgcagcggcuacucuggcauuuucuccgucgaggggaaaagcuguaucaacagaugcuuuuauguggaacugauucggggaagaaaggaggaaaccgagguucuguggacauccaauucuaucguggucuucuguggcaccagcgggacauacggaacgggcuccuggccugacggggcugaucucaaccugaugcccauuuga

SEQ ID NO: 217373 - RNA, 1410 nt, Artificial Sequence; identical to SEQ ID NO: 214994
  derived and/or modified CDS sequence (opt5) from neuraminidase__InfluenzaA__AHZ36652

SEQ ID NO: 217374 - RNA, 1410 nt, Artificial Sequence; identical to SEQ ID NO: 214218
  derived and/or modified CDS sequence (opt5) from neuraminidase__InfluenzaA__AHZ36664

SEQ ID NO: 217375 - RNA, 1410 nt, Artificial Sequence; identical to SEQ ID NO: 214218
  derived and/or modified CDS sequence (opt5) from neuraminidase__InfluenzaA__AHZ36676

SEQ ID NO: 217376 - RNA, 1410 nt, Artificial Sequence; identical to SEQ ID NO: 214218
  derived and/or modified CDS sequence (opt5) from neuraminidase__InfluenzaA__AHZ36688

SEQ ID NO: 217377 - RNA, 1398 nt, Artificial Sequence; identical to SEQ ID NO: 215526
  derived and/or modified CDS sequence (opt5) from neuraminidase__InfluenzaA__AHZ39689

SEQ ID NO: 217378 - RNA, 1398 nt, Artificial Sequence; identical to SEQ ID NO: 215526
  derived and/or modified CDS sequence (opt5) from neuraminidase__InfluenzaA__AHZ39713

SEQ ID NO: 217379 - RNA, 1398 nt, Artificial Sequence; identical to SEQ ID NO: 215526
  derived and/or modified CDS sequence (opt5) from neuraminidase__InfluenzaA__AHZ39725

SEQ ID NO: 217380 - RNA, 1398 nt, Artificial Sequence; identical to SEQ ID NO: 215526
  derived and/or modified CDS sequence (opt5) from neuraminidase__InfluenzaA__AHZ39737

SEQ ID NO: 217381 - RNA, 1398 nt, Artificial Sequence
  derived and/or modified CDS sequence (opt5) from neuraminidase__InfluenzaA__AHZ39749
augaaccccaaucagaagauccugugcauuagcgccaccgcuaucauuaucggcgccauugcggugcucaucgggaucgcuaaccugggacuuaauauuggccugcaccucaaaccuggguguaacugcucccauucucaaccggagacaacgaauaccagccagacaaucauuaacaauuacuauaacgaaaccaauaucacaaacauucagauggaggaaagaaccucccggaauuucaacaaucugacaaagggacuuuguaccaucaacucuuggcacauuuacggcaaagacaaugccguccgcaucggggagagcuccgauguucuggugacgagagaacccuaugugucuugcgacccugaugagugucgguuuuacgcccucagccagggaaccacaauccgcggcaagcauuccaacggcaccauucacgacagaagccaauaucgggcucugaucucuuggccccuguccagcccucccacagucuacaacucucgcguggagugcauugggugguccagcaccucuugucaugauggaaaauccagaaugagcaucugcauuuccggcccuaauaacaaugccucugcuguugugugguauaaccggcgcccggucgccgaaaucaauacgugggcgagaaacauccuccggacacaggagagcgaaugugugugccacaaugggguuugucccguggucuucaccgacggauccgccacaggcccugcugauacccgcauuuacuacuuuaaggaggggaagauccugaaaugggagagccuuaccggaacagccaagcacauugaagagugcucuugcuauggcgaaagaacgggcaucaccuguacaugccgggacaacuggcagggguccaaucgccccgugauucagaucgauccuguggcuaugacccauacaagccaauacaucuguucucccguccugaccgacaacccgagaccuaaugaucccaacauuggaaaaugcaaugacccuuaucccggcaacaauaacaacgggguuaagggauucagcuaccucgauggcgccaauacguggcuggggcggacaaucuccaccgcgucuagaagcggauaugagaugcuuaaagugcccaacgcccugaccgacgaccgcuccaagccuauucagggccagacaaucgugcucaaugcugauuggagcggcuacucuggguccuuuauggacuauugggccgaaggagauuguuaccgggcuugcuucuacgucgagcugauuagaggccgcccgaaggaggacaaagugugguggaccagcaacucuaucguuuccauguguagcuccacagaauuucuggggcaguggaauuggcccgauggagccaagauugaguauuuccucuga

SEQ ID NO: 217382 - RNA, 1398 nt, Artificial Sequence; identical to SEQ ID NO: 217381
  derived and/or modified CDS sequence (opt5) from neuraminidase__InfluenzaA__AHZ39761

SEQ ID NO: 217383 - RNA, 1398 nt, Artificial Sequence; identical to SEQ ID NO: 215526
  derived and/or modified CDS sequence (opt5) from neuraminidase__InfluenzaA__AHZ39773

SEQ ID NO: 217384 - RNA, 1398 nt, Artificial Sequence; identical to SEQ ID NO: 215526
  derived and/or modified CDS sequence (opt5) from neuraminidase__InfluenzaA__AHZ39785

SEQ ID NO: 217385 - RNA, 1410 nt, Artificial Sequence
  derived and/or modified CDS sequence (opt5) from neuraminidase__InfluenzaA__AHZ39797
augaaccccaaucagaagaucauuaccaucggcagcgugucccugacaauuucuacggucugcuucuuuaugcaaaucgccauucucaucaccacaguuacccugcacuucaaacaguacgaguuuaacccuccgcccaauaaccaggugaugcuuugugaaccuacaaucauugagagaaauaucaccgaaauuguguaucugacaaacaccacgaucgagaaggaaauuugccccaaaccugcugaguaccggaauuggagcaagccccagugugggaucaccggauucgccccuuuuuccaaagacaacucuauucgccucagcgcgggcggggauaucugggucacaagagagccguauguguccugcgaccccgauaaguguuaccaauucgcucugggacagggcaccacacuuaauaacguucauucuaauaacaccgugcgggaccgcacgccuuauagaacacugcucaugaaugaacuggggguccccuuucaccugggaaccaaacaggugugcaucgccuggagcuccagcucuugucaugauggcaaggccuggcuccacguuugcauuacaggcgacgauaagaacgcuaccgccuccuucaucuacaaugggcggcugguggacagcgucgugucuugguccaaagagauucuucgcacccaggaaagcgagugugugugcaucaacggaacauguacggucguuaugaccgauggcucugcuuccggaaagagcgacacaaaaauucuguuuaucgaggaagggaagaucgugcauaccuccacacucucuggcagcgcccaacacguggaggaaugcuccugcuauccuagauaccccgggguccggugugugugccgcgauaacuggaagggaagcaauagaccgauuguugacaucaacauuaaagaucacucuaucguguccagcuacgucuguucuggccuggugggcgacaccccucggaagaaugacagcuccucuagcucccauugccuugaucccaacaaugaggaagggggacacggcguuaaagggugggcguucgacgauggaaacgacguguggaugggccgcacgauuaaugagacaagcagacugggguaugagaccuuuaaggucaucgaaggauggucuaacccuaaauccaagcuccagaucaaucgccaggugauugucgaucggggcgacagaagcggcuacucugggaucuucuccguggagggaaaaagcuguauuaaccggugcuuuuauguugaacugaucagaggccgcaaggaggaaaccgaggugcuguggacauccaauucuauugucguguucugugggaccagcggaacauacggcacgggguccuggcccgauggcgccgaccucaaccugaugcccaucuga

SEQ ID NO: 217386 - RNA, 1410 nt, Artificial Sequence
  derived and/or modified CDS sequence (opt5) from neuraminidase__InfluenzaA__AHZ39821
augaaccccaaucagaagaucauuaccaucggcagcgugucccugacaauuucuacgaucugcuucuuuaugcaaaccgccauucucaucacaaccgucacacugcacuucaaacaguacgaguuuaacagcccuccgaauaaccagguuaugcuuugugaacccaccaucauugagagaaauaucacagaaauuguguaucugaccaacacgaccaucgagaaggaaauuugcccuaaacucgcugaguaccggaauugguccaagccccagugugacaucacaggguucgccccuuuuucuaaagauaacagcauucgccuguccgcgggaggcgacaucugggugaccagagagcccuaugucucuugcgauccugacaaguguuaccaauucgcucuugggcagggaacaacccugaauaacgugcauagcaauaacacgguucgggaucgcacaccguauagaacccuccugaugaaugaacugggcgugcccuuucaccucgggacaaagcaggucugcaucgccugguccagcagcuccugucaugacggaaaagccuggcugcacgugugcauuaccggcgaugacaagaacgcuaccgccagcuucaucuacaauggccggcuuguugauucuguggucuccuggagcaaagagauucugcgcacacaggaaucugagugugugugcaucaacgggacguguaccguggucaugacagacggauccgcuagcggcaaggccgauaccaaaauucucuuuaucgaggaagggaagaucguucauacauccacccugucuggaagcgcgcaacacguggaggaaugcuccugcuauccuagauaccccggcgugcggugugucugccgcgacaacuggaaggggagcaauagaccuauuguggauaucaacauuaaagaccacucuaucguuuccagcuacguguguucuggacuugucggcgacacgccccggcgcaaugauagcuccucuagcucccauugccuggacccgaacaaugaggaaggcgggcacggagugaagggcugggccuucgaugacgggaacgauguuuggaugggaagaacaauuaaugagaccagccggcucggcuaugagaccuuuaaagugaucgaaggguggucuaacccuaaguccaaacugcagaucaaucgccaggucauuguggacagaggaaaccggagcggcuacucuggcaucuucuccgucgaggggaagucuuguauuaauagaugcuuuuauguggaacugauccgcggacggaaagaggaaacagagguucucuggaccuccaacucuauuguggucuucuguggcacaagcgggacguacggaaccggcuccuggcccgauggggcugaccugaaucuuaugccuacauga

SEQ ID NO: 217387 - RNA, 1410 nt, Artificial Sequence; identical to SEQ ID NO: 215461
  derived and/or modified CDS sequence (opt5) from neuraminidase__InfluenzaA__AHZ39833

SEQ ID NO: 217388 - RNA, 1410 nt, Artificial Sequence; identical to SEQ ID NO: 214218
  derived and/or modified CDS sequence (opt5) from neuraminidase__InfluenzaA__AHZ39844

SEQ ID NO: 217389 - RNA, 1410 nt, Artificial Sequence
  derived and/or modified CDS sequence (opt5) from neuraminidase__InfluenzaA__AHZ39856
augaaccccaaucagaagaucauuaccaucggcagcgugucccugacaauuucuacgaucugcuucuuuaugcaaauugccauccucaucaccacagucacccugcacuucaaacaguacgaguuuaacagcccuccgaauaaccagguuaugcuuugugaacccacaauuaucgagagaaauauuaccgaaaucguguaucugacaaacaccacgauugagaaggaaaucugcccuaaacccgcugaguaccggaauugguccaagccucagugugacauuaccggguucgcccccuuuucuaaagauaacagcauccgccucuccgcgggaggcgacaucugggugacaagagagccuuaugucucuugcgauccggacaaguguuaccaauucgcucuggggcagggaaccacacuuaauaacgugcauagcaauaacaccguucgggaucgcacgcccuauagaacacugcucaugaaugaacugggcgugccuuuucaccuggggaccaagcaggucugcauugccugguccucuagcuccugucaugacggaaaagccuggcuccacgugugcaucacaggcgaugacaagaacgcuaccgccagcuucauuuacaauggccggcugguugauucuguggucuccuggagcaaagagauccuucgcacccaggaaucugagugugugugcauuaacgggacauguacgguggucaugaccgacggauccgcuagcggcaaggccgauacaaaaauccuguuuaucgaggaagggaagauuguucauaccuccacacucucuggaagcgcgcaacacguggaggaaugcuccugcuaucccagauacccuggcgugcggugugucugccgcgacaacuggaaggggagcaauagacccaucguggauauuaacaucaaagaccacucuauuguuucccgguacguguguagcggacuggucggcgacaccccgcgcaagaaugauucuagcuccucuagccauugccuugacccuaacaaugaggaaggcgggcacggagugaaaggcugggccuucgaugacgggaacgauguuuggaugggaagaacgaucaaugagacaucccggcugggcuaugagaccuuuaaggugaucgaaggguggagcaaccccaaaucuaagcucccuauuaaucgccaggucaucguggacagaggagaucgguccggcuacagcggcauuuucucugucgaggggaaauccuguaucaacagaugcuuuuauguggaacugauucgcggacggaaggaggaaaccgagguucuguggacaagcaauuccaucguggucuucuguggcaccucugggacauacggaacgggcagcuggcccgacggggcugaucucaaccugaugcccauuuga

SEQ ID NO: 217390 - RNA, 1410 nt, Artificial Sequence; identical to SEQ ID NO: 214218
  derived and/or modified CDS sequence (opt5) from neuraminidase__InfluenzaA__AHZ39868

SEQ ID NO: 217391 - RNA, 1410 nt, Artificial Sequence
  derived and/or modified CDS sequence (opt5) from neuraminidase__InfluenzaA__AHZ39892
augaaccccaaucagaagaucauuaccaucggcagcgugucccugacaauuucuacgaucugcuucuuuaugcaaauugccauccucaucaccacagucacccugcacuucaaacaguacgaguuuaacagcccuccgaauaaccagguugugcuuugugaacccacaauuaucgagagaaauauuaccgaaaucguguaucugacaaacaccacgauugagaaggaaaucugcccuaaacccgcugaguaccggaauugguccaagccucagugugacauuaccggguucgcccccuuuucuaaagauaacagcauccgccucuccgcgggaggcgacaucugggucacaagagagccuuaugugucuugcgauccggacaaguguuaccaauucgcucuggggcagggaaccacacuuaauaacguucauagcaauaacaccgugcgggaucgcacgcccuauagaacacugcucaugaaugaacugggcgucccuuuucaccuggggaccaaacaggugugcauugccugguccucuagcuccugucaugacggaaaggccuggcuccacguuugcaucacaggcgaugacaagaacgcuaccgccagcuucauuuacaauggccggcugguggauucugucguguccuggagcaaagagauccuucgcacccaggaaucugagugugugugcauuaacgggacauguacggucguuaugaccgacggauccgcuagcggcaaggccgauacaaaaauccuguuuaucgaggaagggaagauugugcauaccuccacacucucuggaagcgcgcaacacguggaggaaugcuccugcuaucccagauacccuggcguccggugugugugccgcgacaacuggaaggggagcaauagacccaucguugauauuaacaucaaagaccacucuauugugucccgguacgucuguagcggacuggugggcgacaccccgcgcaagaaugauucuagcuccucuagccauugccuugacccuaacaaugaggaaggcgggcacggaguuaaaggcugggccuucgaugacgggaacgauguguggaugggaagaacgaucaaugagacaucccggcugggcuaugagaccuuuaaggucaucgaaggguggagcaaccccaaaucuaagcuccagauuaaucgccaggugaucgucgacagaggagaucgguccggcuacagcggcauuuucucuguggaggggaaauccuguaucaacagaugcuuuuauguugaacugauucgcggacggaaggaggaaaccgaggugcuguggacaagcaauuccaucgucguguucuguggcaccucugggacauacggaacgggcagcuggccugacggggcugaucucaaccugaugcccauuuga

SEQ ID NO: 217392 - RNA, 1410 nt, Artificial Sequence; identical to SEQ ID NO: 215426
  derived and/or modified CDS sequence (opt5) from neuraminidase__InfluenzaA__AHZ39904

SEQ ID NO: 217393 - RNA, 1410 nt, Artificial Sequence; identical to SEQ ID NO: 215426
  derived and/or modified CDS sequence (opt5) from neuraminidase__InfluenzaA__AHZ39916

SEQ ID NO: 217394 - RNA, 1410 nt, Artificial Sequence; identical to SEQ ID NO: 214218
  derived and/or modified CDS sequence (opt5) from neuraminidase__InfluenzaA__AHZ39928

SEQ ID NO: 217395 - RNA, 1410 nt, Artificial Sequence
  derived and/or modified CDS sequence (opt5) from neuraminidase__InfluenzaA__AHZ39940
augaaccccaaucagaagaucauuaccaucggcagcgugucccugacaauuucuacgaucugcuucuuuaugcaaauugccauccucaucaccacagucacccugcacuucaaacaguacgaguuuaacagcccuccgaauaaccagguuaugcuuugugaacccacaauuaucgagagaaauaugaccgaaauuguguaucugacaaacaccacgaucgagaaggaaauuugcccuaaacccgcugaguaccggaauugguccaagccucagugugggaucaccggauucgcccccuuuucuaaagacaacagcauucgccucuccgcgggcggggauaucugggugacaagagagccuuaugucucuugcgacccggauaaguguuaccaauucgcucugggacagggcaccacacuuaauaacgugcauagcaauaacaccguucgggaccgcacgcccuauagaacacugcucaugaaugaacugggggugccuuuucaccugggaaccaagcaggucugcaucgccugguccucuagcuccugucaugauggcaaagccuggcuccacgugugcauuacaggcgacgauaagaacgcuaccgccagcuucaucuacaaugggcggcugguugacucuguggucuccuggagcaaagagauucuucgcacccaggaaucugagugugugugcaucaacggaacauguacgguggucaugaccgauggcuccgcuagcgggaaggccgacacaaaaauucuguuuaucgaggaaggaaagaucguucauaccuccacacucucuggcagcgcgcaacacguggaggaaugcuccugcuaucccagauacccuggggugcggugugucugccgcgauaacuggaagggaagcaauagacccauuguggacaucaacauuaaagaucacucuaucguuuccagcuacguguguucuggccuggucggcgacaccccgcggaagacggacagcuccucuagcucccauugccuugauccuaauaacgaggaagggggacacggcgugaaagggugggccuucgacgauggaaaugacguuuggaugggccgcacaauuaacgagaccagcagacugggguaugagaccuuuaaggugaucgaaggauggucuaaucccaaauccaagcuccagaucaaccggcaggucauuguggaucgcggcgacagaagcggcuacucugggaucuucuccgucgagggaaaaagcuguauuaaucggugcuuuuauguggaacugaucagaggccgcaaggaggaaacagagguucuguggaccuccaacucuauuguggucuucugugggacaagcggaacguacggcaccggguccuggccugauggcgcugaccucaaucugaugcccaucuga

SEQ ID NO: 217396 - RNA, 1410 nt, Artificial Sequence; identical to SEQ ID NO: 214218
  derived and/or modified CDS sequence (opt5) from neuraminidase__InfluenzaA__AHZ39952

SEQ ID NO: 217397 - RNA, 1410 nt, Artificial Sequence; identical to SEQ ID NO: 214218
  derived and/or modified CDS sequence (opt5) from neuraminidase__InfluenzaA__AHZ39976

SEQ ID NO: 217398 - RNA, 1410 nt, Artificial Sequence
  derived and/or modified CDS sequence (opt5) from neuraminidase__InfluenzaA__AHZ39988
augaaccccaaucagaagaucauuaccaucggcagcgugucccugacaauuucuacgaucugcuucuuuaugcaaauugccauccucaucaccacagucacccugcacuucaaacaguacgaguuuaacagcccuccgaauaaccagguuaugcuuugugaacccacaauuaucgagagaaauauuaccgaaaucguguaucugacaaacaccacgauugagaaggaaaucugcccuaaacccgcugaguaccggaauugguccaagccucagugugggauuaccggauucgcccccuuuucuaaagacaacagcauccgccucuccgcgggcggggauaucugggugacaagagagccuuaugucucuugcgacccggauaaguguuaccaauucgcucugggacagggcaccacacuuaauaacaugcauagcaauaacaccgugcgggaccgcacgcccuauagaacacugcucaugaaugaacuggggguuccuuuucaccugggaaccaaacaggugugcauugccugguccucuagcuccugucaugauggcaaggccuggcuccacgucugcaucacaggcgacgauaagaacgcuaccgccagcuucauuuacaaugggcggcugguggacucuguuguguccuggagcaaagagauccuucgcacccaggaaucugagugugucugcauuaacggaacauguacgguggugaugaccgauggcuccgcuagcgggaaggccgacacaaaaauccuguuuaucgaggaaggaaagauuguccauaccuccacacucucuggcagcacccaacacguugaggaaugcuccugcuaucccagauacccuggggugcggugugugugccgcgauaacuggaagggaagcaauagacccaucgucgacauuaacaucaaagaucacucuauuguguccagcuacguuuguucuggccuggugggcgacacgccgcggaagaaugacagcuccucuagcucccauugccuugauccuaacaaugaggaagggggacacggcgucaaagggugggcguucgacgauggaaacgacguguggaugggccgcacaaucaaugagaccagcagacugggguaugagaccuuuaagguuaucgaaggauggucuaaccccaaauccaagcuccagauuaaucgccaggugaucgucgaucggggcgacagaagcggcuacucugggauuuucuccguggagggaaaaagcuguaucaaccggugcuuuuaugucgaacugauuagaggccgcaaggaggaaacagaggugcuguggaccuccaauucuaucguuguguucugugggacaagcggaacguacggcaccggguccuggccugauggcgccgaccucaaccugaugcccauuuga

SEQ ID NO: 217399 - RNA, 1410 nt, Artificial Sequence; identical to SEQ ID NO: 214218
  derived and/or modified CDS sequence (opt5) from neuraminidase__InfluenzaA__AHZ40000

SEQ ID NO: 217400 - RNA, 1410 nt, Artificial Sequence; identical to SEQ ID NO: 214218
  derived and/or modified CDS sequence (opt5) from neuraminidase__InfluenzaA__AHZ40012

SEQ ID NO: 217401 - RNA, 1410 nt, Artificial Sequence
  derived and/or modified CDS sequence (opt5) from neuraminidase__InfluenzaA__AHZ40024
augaaccccaaucagaagaucauuaccaucggcagcgugucccugacaauuucuacgaucugcuucuuuaugcaaauugccauccucaucaccacagucacccugcacuucaaacaguacgaguuuaacagcccuccgaauaaccagguuaugcuuugugaacccacaauuaucgagagaaauauuaccgaaaucguguaucugacaaacaccacgauugagaaggaaaucugcccuaaacccgcugaguaccggaauugguccaagccucagugugggauuaccggauucgcccccuuuucuaaagacaacagcauccgccucuccgcgggcggggauaucugggugacaagagagccuuaugucucuugcgacccggauaaguguuaccaauucgcucugggacagggcaccacacuuaauaacgugcauagcaauaacaccguucgggaccgcacgcccuauagaacacugcucaugaaugaacugggggugccuuuucaccugggaaccaagcaggucugcauugccugguccuccucuuccugucaugauggcaaagccuggcuccacgugugcaucacaggcgacgauaagaacgcuaccgccagcuucauuuacaaugggcggcugguugacucuguggucuccuggagcaaagagauccuucgcacccaggaaucugagugugugugcauuaacggaacauguacgguggucaugaccgauggcuccgcuagcgggaaggccgacacaaaaauccuguuuaucgaggaaggaaagauuguucauaccuccacacucucuggcagcgcgcaacacguggaggaaugcuccugcuaucccagauacccuggggugcggugugucugccgcgauaacuggaagggaagcaauagacccaucguggacauuaacaucaaagaucacucuauuguuuccagcuacguguguucuggccuggucggcgacaccccgcggaagaaugacagcuccucuagcucccauugccuugauccuaacaaugaggaagggggacacggcgugaaagggugggccuucgacgauggaaacgacguuuggaugggccgcacgaucaaugagacaagcagacugggguuugagaccuucaaggugaucgaaggauggucuaaccccaaauccaagcuccagauuaaucggcaggucaucguggaucgcggcgacagaagcggcuauucugggauuuuuagcgucgagggaaaaagcuguaucaaccggugcuucuacguggaacugauuagaggccgcaaggaggaaaccgagguucuguggacauccaauucuaucguggucuucugugggaccagcggaacauauggcacgggguccuggccugauggcgcugaccucaaccugaugcccauuuga

SEQ ID NO: 217402 - RNA, 1410 nt, Artificial Sequence; identical to SEQ ID NO: 214218
  derived and/or modified CDS sequence (opt5) from neuraminidase__InfluenzaA__AHZ40036

SEQ ID NO: 217403 - RNA, 1410 nt, Artificial Sequence; identical to SEQ ID NO: 215429
  derived and/or modified CDS sequence (opt5) from neuraminidase__InfluenzaA__AHZ40048

SEQ ID NO: 217404 - RNA, 1410 nt, Artificial Sequence; identical to SEQ ID NO: 214218
  derived and/or modified CDS sequence (opt5) from neuraminidase__InfluenzaA__AHZ40063

SEQ ID NO: 217405 - RNA, 1410 nt, Artificial Sequence
  derived and/or modified CDS sequence (opt5) from neuraminidase__InfluenzaA__AHZ40075
augaaccccaaucagaagaucauuaccaucggcagcgugucccugacaauuucuacggucugcuucuuuaugcaaaucgccauucucaucaccacaguuacccugcacuucaaacaguacgaguuuaacagcccuccgaauaaccaggugaugcuuugugaacccacaaucauugagagaaauaucaccgaaauuguguaucugacaaacaccacgaucgagaaggaaauuugcccuaaacccgcugaguaccggaauugguccaagccucagugugggaucaccggauucgcccccuuuucuaaagacaacagcauucgccucuccgcgggcggggauaucugggucacaagagagccuuaugugucuugcgacccggauaaguguuaccaauucgcucugggacagggcaccacacuuaauaacguucauagcaauaacaccgugcgggaccgcacgcccuauagaacacugcucaugaaugaacugggggucccuuuucaccugggaaccaaacaggugugcaucgccugguccucuagcuccugucaugauggcaaggccuggcuccacguuugcauuacaggcgacgauaagaacgcuaccgccagcuucaucuacaaugggcggcugguggacucugucguguccuggagcaaagagauucuucgcacccaggaaucugagugugugugcaucaacggaacauguacggucguuaugaccgauggcuccgcuagcgggaaggccgacacaaaaauucuguuuaucgaggaaggaaagaucgugcauaccuccacacucucuggcagcgcgcaacacguggaggaaugcuccugcuaucccagauacccugggguccggugugugugccgcgauaacuggaagggaagcaauagacccauuguugacaucaacauuaaagaucacucuaucguguccagcuacgucuguucuggccuggugggcgacaccccgcggaagaaugacagcuccucuagcucccauugccuugauccuaacaaugaggaagggggacacggcguuaaagggugggccuucgacgauggaaacgacguguggaugggccgcacgauuaaugagacaagcagacugggguaugagaccuuuaaggucaucgaaggauggucuaacuccaaaagcaagcuccagaucaaucgccaggugauugucgaucggggcgacagaucuggcuacuccgggaucuucagcguggagggaaaauccuguauuaaccggugcuuuuauguugaacugaucagaggccgcaaggaggaaaccgaggugcuguggacaucuaauagcauugucguguucugugggaccuccggaacauacggcacggggucuuggcccgauggcgcugaccucaaccugaugccuaucuga

SEQ ID NO: 217406 - RNA, 1410 nt, Artificial Sequence; identical to SEQ ID NO: 214218
  derived and/or modified CDS sequence (opt5) from neuraminidase__InfluenzaA__AHZ40087

SEQ ID NO: 217407 - RNA, 1410 nt, Artificial Sequence; identical to SEQ ID NO: 215429
  derived and/or modified CDS sequence (opt5) from neuraminidase__InfluenzaA__AHZ40099

SEQ ID NO: 217408 - RNA, 1410 nt, Artificial Sequence
  derived and/or modified CDS sequence (opt5) from neuraminidase__InfluenzaA__AHZ40111
augaaccccaaucagaagaucauuaccaucggcagcgugucccugacaauuucuacgaucugcuucuuuaugcaaauugccauccucaucaccacagucacccugcacuucaaacaguacgaguuuaacccuccgcccaauaaccagguuaugcuuugugaaccuacaauuaucgagagaaauauuaccgaaaucguguaucugacaaacaccacgauugagaaggaaaucugccccaaacucgcugaguaccggaauuggagcaagccucagugugacauuaccggguucgcccccuuuuccaaagauaacucuauccgccugagcgcgggaggcgacaucugggugacaagagagccuuaugucuccugcgauccggacaaguguuaccaauucgcucuugggcagggaaccacacugaauaacgugcauucuaauaacaccguucgggaucgcacgcccuauagaacacuccugaugaaugaacugggcgugccuuuucaccucgggaccaagcaggucugcauugccuggagcuccagcucuugucaugacggaaaagccuggcugcacgugugcaucacaggcgaugacaagaacgcuaccgccuccuucauuuacaauggccggcuuguugauagcguggucucuugguccaaagacauccugcgcacccaggagagcgaaugugugugcauuaacgggacaugugcuguggucaugacggauggaucugccuccggcaaggcggacaccaaaauccucuuuaucgaggaggggaagauuguucauacaagcacccuguccggaucugcccaacacguggaagagugcagcugcuaucccagauacccuggcgugcggugugucugccgcgauaacuggaagggguccaauagacccaucguggacauuaacaucaaagaccacagcauuguuucuuccuacguguguagcggacuugucggcgauacaccgcggaagaaugacucuagcuccucuggccauugccuggauccuaacaaugaagagggaggacacggcgugaaagggugggcuuucgacgauggaaacgacguuuggaugggccgcaccaucaaugaaacgagcagacucggguaugagacauuuaaggugaucgagggaugguccaaccccaaaagcaagcugcagauuaaucggcaggucaucguggaucgcggcaacagaucuggcuacuccgggauuuucagcgucgaagggaaaaauuguaucaaccggugcuuuuauguggagcugauuagaggccgcaaggaagagaccgaaguucucuggaccucuaauuccaucguggucuucugugggacaagcggaaccuacggcacaggguccuggccugacggcgccgaucugaaccuuaugcccauuuga

SEQ ID NO: 217409 - RNA, 1410 nt, Artificial Sequence
  derived and/or modified CDS sequence (opt5) from neuraminidase__InfluenzaA__AHZ40123
augaaccccaaucagaagaucauuaccaucggcagcgugucccugacaauuucuacgaucugcuucuuuaugcaaauugccauccucaucaccacagucacccugcacuucaaacaguacgaguuuaacagcccuccgaauaaccagguuaugcuuugugaacccacaauuaccgagagaaauaucacagaaauuguguaucugaccaacacgaccaucgagaaggaaauuugcccuaaacccgcugaguaccggaauugguccaagccucagugugggaucacaggauucgcccccuuuucuaaagacaacagcauucgccucuccgcgggcggggauaucugggugaccagagagccuuaugucucuugcgacccggauaaguguuaccaauucgcucugggacagggcacaacccuuaauaacgugcauagcaauaacacgguucgggaccgcacacccuauagaacccugcucaugaaugaacugggggugccuuuucaccugggaacaaagcaggucugcaucgccugguccucuagcuccugucaugauggcaaagccuggcuccacgugugcauuaccggcgacgauaagaacgcuaccgccagcuucaucuacaaugggcggcugguugacucuguggucuccuggagcaaagagauucuucgcacacaggaaucugagugugugugcaucaacggaacguguaccguggucaugacagauggcuccgcuagcgggaaggccgacaccaaaauucuguuuaucgaggaaggaaagaucguucauacaagaacccucuccggcucugcgcaacacguggaggaaugcagcugcuauccccgguacccuggggugcgcugugucugcagagauaacuggaagggauccaaucggcccauuguggacaucaacauuaaagaucacagcaucguuucuuccuacguguguagcggccuggucggcgacacgccgcgcaagaaugacucuagcuccucuagccauugccuugauccuaacaaugaggaagggggacacggcgugaaagggugggccuucgacgauggaaacgacguuuggaugggcagaacaauuaaugagaccucccggcugggguaugagaccuuuaaggugaucgaaggauggagcaaccccaaaucuaagcuccagaucaaucgccaggucauuguggauagaggcgaccgguccggcuacagcgggaucuucucugucgagggaaaauccuguauuaacagaugcuuuuauguggaacugauccgcggccggaaggaggaaacagagguucuguggaccagcaauuccauuguggucuucugugggacaucuggaacguacggcaccgggagcuggccugauggcgcugaccucaaccugaugcccaucuga

SEQ ID NO: 217410 - RNA, 1410 nt, Artificial Sequence; identical to SEQ ID NO: 214218
  derived and/or modified CDS sequence (opt5) from neuraminidase__InfluenzaA__AHZ40133

SEQ ID NO: 217411 - RNA, 1410 nt, Artificial Sequence; identical to SEQ ID NO: 215436
  derived and/or modified CDS sequence (opt5) from neuraminidase__InfluenzaA__AHZ40145

SEQ ID NO: 217412 - RNA, 1410 nt, Artificial Sequence
  derived and/or modified CDS sequence (opt5) from neuraminidase__InfluenzaA__AHZ40157
augaaccccaaucagaagaucauuaccaucggcagcgugucccugacaauuucuacgaucugcuucuuuaugcaaauugccauccucaucaccacagucacccugcacuucaaacaguacgaguuuaacagcccuccgaauaaccagguuaugcuuugugaacccacaauuaucgagagaaauauuaccgaaaucguguaucugacaaacaccacgauugagaaggaacucugcccuaaacuggcugaguaccggaauugguccaagccccagugugacaucaccggguucgccccuuuuucuaaagauaacagcauucgccuuuccgcgggaggcgacaucugggugacaagagagcccuaugucucuugcgauccugacaaguguuaccaauucgcucuggggcagggaaccacacucaauaacgugcauagcaauaacaccguucgggaucgcacgccguauagaacacugcugaugaaugaacucggcgugcccuuucaccuggggaccaagcaggucugcauggccugguccagcagcuccugucaugacggaaaagccuggcuucacgugugcaucacaggcgaugacaagaacgcuaccgccagcuucauuuacaauggcaaacugguugauucuguggucuccuggagcaaggagauccuccggacccaggaaucugagugugugugcauuaacgggacauguacgguggucaugaccgacggauccgcuagcggcaaagccgauacaaagauccuguuuauugaggaagggaagaucguucauaccuccacacuuucuggaagcgcgcaacacguggaggaaugcuccugcuauccucgcuaccccggcgugagaugugucugccgggacaacuggaaagggagcaaucgcccuaucguggauauuaacaucaaggaccacucuauuguuuccagcuacguguguucuggacuggucggcgacacccccagaaaaacggauagcuccucuagcucccauugccucgacccgaauaacgaggaaggcgggcacggagugaagggcugggccuucgaugacgggaaugauguuuggaugggacggacaaucaacgagaccagccgccugggcuaugagaccuuuaaagugauugaaggguggucuaauccuaaguccaaacugcagaucaacagacaggucaucguggaccggggagaucgcagcggcuacucuggcauuuucuccgucgaggggaagucuuguaucaauagaugcuuuuauguggaacucauucggggaagaaaggaggaaacagcuguucuguggaccuccaacucuaucguggucuucuguggcacaagcgggacguacggaaccggcuccuggcccgacggggccgaucuuaaucugaugccuauuuga

SEQ ID NO: 217413 - RNA, 1410 nt, Artificial Sequence
  derived and/or modified CDS sequence (opt5) from neuraminidase__InfluenzaA__AHZ40169
augaaccccaaucagaagaucauuaccaucggcagcgugugcaugacaauugggauggccaaccugauccuccaaauuggaaauaucaucuccauuuggaucucucacagcauucagcuggagaaccagucccagaucgaaacguguaaucaaucugucauuaccuacgagaacaauacauggguuaaccagaccuaugugaauaucagcaacacaaauuucgcugccggccaguccguggucucugugaaacuugcggggaacagcucccugugcccuguuagcggaugggcuauuuacucuaaggacaauuccgugagaaucggcagcaaaggggaugucuuugugauccgggaaccguucauuucuuguagcccccucgagugccgcaccuuuuuccugacacagggagcccuucugaacgacaagcauuccaauggcaccaucaaagauagaucuccuuaucggacgcucauguccugucccauuggcgaaguuccuagccccuacaacucccgcuuugagucuguggccuggagcgcuuccgccugccacgacgggaucaacuggcugaccauuggaaucagcggcccugauucuggggcugucgccgugcugaaguauaauggaaucauuacagacaccaucaaguccuggagaaacaauauucuccggacacaagagagcgaaugugcgugcgugaacggcucuuguuucaccaucaugacggaugggccgagcgacggacaggccuccuacaaaauuuuucgcaucgagaagggcaaaaucgucaagucuguugaaaugaaugcucccaacuaucauuacgaggagugcagcuguuacccugauuccagcgaaauuacaugcgugugcagagacaauuggcacggcucuaaccggcccuggguguccuucaaucagaaccuggaguaucagaucggguacauuuguagcggaaucuuuggcgauaauccucgccccaacgacaaaaccgggucuugcggaccggucuccagcaauggcgccaacggggugaagggauucuccuuuaaguauggcaauggcguuuggauugggagaacaaaaucuaucagcucccggaagggauucgaaaugauuugggauccuaacggcuggaccgggaccgacaacaauuuuucuaucaaacaagacaucgugggaauuaacgaguggagcggcuacuccgggagcuucguccagcaucccgaacuuacaggccuggauuguauccgcccuugcuucuggguggagcucauuagaggacggcccaaggagaauacgaucuggaccucuggcuccagcauuucuuuuugugggguuaacuccgacacagugggauggagcuggcccgauggcgcugaacugccuuucaccaucgacaaauga

SEQ ID NO: 217414 - RNA, 1410 nt, Artificial Sequence
  derived and/or modified CDS sequence (opt5) from neuraminidase__InfluenzaA__AHZ40180
augaaccccaaucagaagaucauuaccaucggcagcgugucccugacaauuucuacgaucugcuucuuuaugcaaauuaccauccucaucacaaccgucacacugcacuucaaacaguacgaguuuaacagcccuccgaauaaccagguuaugcuuugugaacccaccauuaucgagagaaauauuacagaaaucguguaucugaccaacacgaccauugagaaggaaaucugcccuaaacccgccgaguaccggaauugguccaagccucagugugggauuacaggauucgcucccuuuucuaaagacaacagcauccgccucuccgccggcggggauaucugggugaccagagagccuuaugucucuugcgacccggauaaguguuaccaauucgcgcugggacagggcacaacccuuaauaacgugcauagcaauaacacgguucgggaccgcacacccuauagaacccugcucaugaaugaacugggggugccuuuucaccugggaacaaagcaggucugcauugcuugguccucuagcuccugucaugauggcaaagccuggcuccacgugugcaucaccggcgacgauaagaacgccaccgcuagcuucauuuacaaugggcggcugguugacucuguggucuccuggagcaaagagauccuucgcacacaggaaucugagugugugugcauuaacggaacguguaccguggucaugacagauggcuccgccagcgggaaggcugacaccaaaauccuguuuaucgaggaaggaaagauuguucauacauccacccucucuggcagcgcccaacacguggaggaaugcuccugcuaucccagauacccuggggugcggugugucugccgcgauaacuggaagggaagcaauagacccaucguggacauuaacaucaaagaucacucuauuguuuccagcuacguguguucuggccuggucggcgacacgccgcggaagaaugacagcuccucuagcucccauugccuugauccuaacaaugaggaagggggacacggcgugaaagggugggcguucgacgauggaaacgacguuuggaugggccgcacaaucaaugagaccagcagacugggguaugagaccuuuaaggugaucgaaggauggucuaaccccaaauccaagcuccagauuaaucggcaggucaucguggaucgcggcgacagaagcggcuacucugggauuuucuccgucgagggaaaaagcuguaucaaccggugcuuuuauguggaacugauuagaggccgcaaggaggaaacagagguucuguggaccuccaauucuaucguggucuucugugggacaagcggaacguacggcaccggguccuggccugauggcgccgaccucaaccugaugcccauuuga

SEQ ID NO: 217415 - RNA, 1410 nt, Artificial Sequence; identical to SEQ ID NO: 215082
  derived and/or modified CDS sequence (opt5) from neuraminidase__InfluenzaA__AHZ40192

SEQ ID NO: 217416 - RNA, 1410 nt, Artificial Sequence; identical to SEQ ID NO: 214218
  derived and/or modified CDS sequence (opt5) from neuraminidase__InfluenzaA__AHZ40204

SEQ ID NO: 217417 - RNA, 1410 nt, Artificial Sequence; identical to SEQ ID NO: 214218
  derived and/or modified CDS sequence (opt5) from neuraminidase__InfluenzaA__AHZ40216

SEQ ID NO: 217418 - RNA, 1410 nt, Artificial Sequence; identical to SEQ ID NO: 215447
  derived and/or modified CDS sequence (opt5) from neuraminidase__InfluenzaA__AHZ40228

SEQ ID NO: 217419 - RNA, 1410 nt, Artificial Sequence
  derived and/or modified CDS sequence (opt5) from neuraminidase__InfluenzaA__AHZ40240
augaaccccaaucagaagaucauuaccaucggcagcgugucccugacaauuucuacgaucugcuuccucaugcaaauugccauccugaucaccacagcuacccuucacuuuaaacaguacgaguucaacagcccuccgaauaaccaggucaugcugugugaacccacaauuaucgagagaaauauuaccgaaaucguuuaucucacaaacaccacgauugagaaggaaaucugcccuaaacccgccgaguaccggaauugguccaagccucagugugggauuaccggauuugcgcccuucucuaaagacaacagcauccgccuguccgcuggcggggauaucugggugacaagagagccuuaugugucuugcgacccggauaaguguuaccaauuugcccuuggacagggcaccacacugaauaacguccauagcaauaacaccgugcgggaccgcacgcccuauagaacacuccugaugaaugaacuggggguuccuuuccaccucggaaccaaacaggugugcauugccugguccuccucuuccugucaugauggcaaggcuuggcugcacgucugcaucacaggcgacgauaagaacgccaccgcuagcuuuauuuacaaugggcggcuuguggacucuguuguguccuggagcaaagagauccugcgcacccaggaaucugagugugucugcauuaacggaacauguacgguggugaugaccgauggcuccgccagcgggaaggcggacacaaaaauccucuucaucgaggaaggaaagauuguccauaccuccacacugucuggcagcgcccaacacguugaggaaugcuccugcuaucccagauacccuggggugcggugugugugccgcgauaacuggaagggaagcaauagacccaucgucgacauuaacaucaaagaucggucuauuguguccagcuacguuuguucuggccuugugggcgacaccccgcgcaagaaugacagcuccucuagcucccacugccuggauccuaacaaugaggaagggggacauggcgucaaagggugggcuuuugacgauggaaacgacguguggaugggcagaacgaucaaugagacaagccggcucggguaugagaccuucaagguuaucgaaggauggucuaaccccaaauccaagcugcagauuaaucgccaggugaucgucgauagaggcgaccggagcggcuacucugggauuuuuagcguggagggaaaaagcuguaucaacagaugcuucuaugucgaacugauucgcggccggaaggaggaaaccgaggugcucuggacauccaauucuaucguuguguuuugugggaccagcggaacauacggcacgggguccuggccugauggcgccgaccugaaccuuaugcccauuuga

SEQ ID NO: 217420 - RNA, 1410 nt, Artificial Sequence
  derived and/or modified CDS sequence (opt5) from neuraminidase__InfluenzaA__AHZ40252
augaaccccaaucagaagaucauuaccaucggcagcgugucccugacaauuucuacgaucugcuucuuuaugcaaauugccauccucaucaccacagucacccugcacuucaaacaguacgaguuuaacagcccuccgaauaaccagguuaugcuuugugaacccacaauuaucgagagaaauauuaccgaaaucguguaucugacaaacaccacgauugagaaggaaaucugcccuaaacccgcugaguaccggaauugguccaagccucagugugggauuaccggauucgcccccuuuucuaaagacaacagcauccgccucuccgcgggcggggauaucugggugacaagagagccuuaugucucuugcgacccggauaaguguuaccaauucgcucugggacagggcaccacacuuaauaacgugcauagcaauaacaccguucgggaccgcacgcccuauagaacacugcucaugaaugaacugggggugccuuuucaccugggaaccaagcaggucugcauugccugguccucuagcuccugucaugauggcaaagccuggcuccacgugugcaucacaggcgaggacaagaacgcuaccgccagcuucauuuacaaugggcggcugguugauucuaucguguccuggagcaaagaaauucuucgcacccaggagucugagugugucugcaucaacggaacauguacgguggugaugaccgacggcuccgcuagcgggaaggccgauacaaaaauccuguuuauugaagagggaaagaucguccauaccuccacacucucuggcagcgcgcaacacguugaagagugcuccugcuaucccagauacccuggggugcggugugugugccgcgacaacuggaagggaagcaauagacccauugucgauaucaacauuaaagaccacucuaucguguccagcuacguuuguucuggccuggugggcgauaccccgcggaagaaugacagcuccucuagcucccauugccuugacccuaacaaugaagaagggggacacggcgucaaagggugggccuucgaugacggaaacgauguguggaugggccgcacgaucaaugagacaagcagacugggguaugagaccuuuaagguuauugagggauggucuaaccccaaauccaagcuccagaucaaucgccaggugauugucgaccggggcgauagaagcggcuacucugggaucuucuccguggaaggaaaaagcuguauuaaccggugcuuuuaugucgagcugaucagaggccgcaaggaagagaccgaggugcuguggacauccaauucuauuguuguguucugugggaccagcggaacauacggcacgggguccuggccugacggcgcugaucucaaccugaugcccaucuga

SEQ ID NO: 217421 - RNA, 1410 nt, Artificial Sequence; identical to SEQ ID NO: 217166
  derived and/or modified CDS sequence (opt5) from neuraminidase__InfluenzaA__AHZ40264

SEQ ID NO: 217422 - RNA, 1410 nt, Artificial Sequence; identical to SEQ ID NO: 214218
  derived and/or modified CDS sequence (opt5) from neuraminidase__InfluenzaA__AHZ40276

SEQ ID NO: 217423 - RNA, 1410 nt, Artificial Sequence
  derived and/or modified CDS sequence (opt5) from neuraminidase__InfluenzaA__AHZ40288
augaaccccaaucagaagaucauuaccaucggcagcgugucccugacaauuucuacgaucugcuucuuuaugcaaauugccauccucaucaccacagucacccugcacuucaaacaguacgaguuuaacagcccuccgaauaaccagguuaugcuuugugaacccacaauuaucgagagaaauauuaccgaaaucguguaucugacaaacaccacgauugagaaggaaaucugcccuaaacucgcugaguaccggaauugguccaagccccagugugacauuaccggguucgccccuuuuucuaaagauaacagcauccgccuguccgcgggaggcgacaucugggugacaagagagcccuaugucucuugcgauccugacaaguguuaccaauucgcucuugggcagggaaccacacugaauaacgugcauagcaauaacaccguucgggaucgcacgccguauagaacacuccugaugaaugaacugggcgugcccuuucaccucgggaccaagcaggucugcauugccugguccucuagcuccugucaugacggaaaagccuggcugcacgugugcaucacaggcgaugacaagaacgcuaccgccagcuucauuuacaauggccggcuuguugauucugugaucuccuggagcaaagacauucugcgcacccaggagucugaaugugucugcaucaacgggacaugugcuguggugaugacggauggauccgccagcggcaaggcggacaccaaaauccucuuuauugaggaggggaagaucguccauacauccacccugucuggaagcgcccaacacguugaagagugcuccugcuauccuagauaccccggcgugcggugugugugccgcgauaacuggaaggggagcaauagaccuauugucgacaucaacauuaaagaccacucuaucguguccagcuacguuuguucuggacuugugggcgauacaccccggaagaaugacagcuccucuagcggccauugccuggauccgaacaaugaagagggaggacacggcgucaaagggugggcuuucgacgauggaaacgacguguggaugggccgcaccaucaaugaaacguccagacucggguaugagacauuuaagguuauugagggauggagcaacccuaaaucuaagcugcagaucaaucgccaggugauugucgaucggggcaacagauccggcuacagcgggaucuucucuguggaagggaaaaauuguauuaaccggugcuuuuaugucgagcugaucagaggccgcaaggaagagaccgaagugcucuggaccuccaauagcauuguuguguucugugggacauccggaaccuacggcacagggucuuggcccgacggcgccgaucugaaccuuaugccuaucuga

SEQ ID NO: 217424 - RNA, 1410 nt, Artificial Sequence
  derived and/or modified CDS sequence (opt5) from neuraminidase__InfluenzaA__AHZ40312
augaaccccaaucagaagaucauuaccaucggcagcgugucccugacaauuucuacgaucugcuucuuuaugcaaauugccauccucaucaccacagucacccugcacuucaaacaguacgaguuuaacuauccuccgaauaaccagguuaugcuuugugaacccacaauuaucgagagaaauauuaccgaaaucguguaccugacaaacaccacgauugagaaggaaaucugcccuaaacccgcugaguaucggaauuggagcaagccucagugugggauuaccggauucgcccccuuuuccaaagacaacucuauccgccucagcgcgggcggggauaucugggugacaagagagccuuacgucuccugcgacccggauaaguguuaucaauucgcucugggacagggcaccacacuuaauaacgugcauucuaauaacaccguucgggaccgcacgcccuacagaacacugcucaugaaugaacugggggugccuuuucaccugggaaccaagcaggucugcauugccuggagcuccagcucuugucaugauggcaaagccuggcuccacgugugcaucacaggcgacgauaagaacgcuaccgccuccuucauuuauaaugggcggcugguugacagcguggucucuugguccaaagagauccuucgcacccaggaaagcgagugugugugcauuaacggaacauguacgguggucaugaccgauggcucugcuuccgggaaggccgacacaaaaauccuguuuaucgaggaaggaaagauuguucauaccagcacacucuccggcucugcgcaacacguggaggaaugcagcugcuaccccagauacccuggggugcggugugucugccgcgauaacuggaagggauccaauagacccaucguggacauuaacaucaaagaucacagcguugugucuuccuaugucuguagcggccuggugggcgacaccccgcggaagaaugacucuagcuccucuagccauugccuugauccuaacaaugaggaagggggacacggcguuaaagggugggccuucgacgauggaaacgacguguggaugggccgcacgauuaaugagacauccagacugggguacgagaccuuuaaggucaucgaaggauggagcaaccccaaaucuaagcuccagaucaaucgccaggugauugucgaucggggcgacagauccggcuauagcgggaucuucucuguggagggaaaauccuguauuaaccggugcuuuuacguugaacugaucagaggccgcaaggaggaaaccgaggugcuguggacaagcaauuccauugucguguucugugggaccucuggaacauauggcacggggagcuggccugauggcgcugaccucaaccugaugcccaucuga

SEQ ID NO: 217425 - RNA, 1410 nt, Artificial Sequence; identical to SEQ ID NO: 214218
  derived and/or modified CDS sequence (opt5) from neuraminidase__InfluenzaA__AHZ40324

SEQ ID NO: 217426 - RNA, 1410 nt, Artificial Sequence; identical to SEQ ID NO: 214218
  derived and/or modified CDS sequence (opt5) from neuraminidase__InfluenzaA__AHZ40336

SEQ ID NO: 217427 - RNA, 1410 nt, Artificial Sequence; identical to SEQ ID NO: 217401
  derived and/or modified CDS sequence (opt5) from neuraminidase__InfluenzaA__AHZ40348

SEQ ID NO: 217428 - RNA, 1410 nt, Artificial Sequence; identical to SEQ ID NO: 215426
  derived and/or modified CDS sequence (opt5) from neuraminidase__InfluenzaA__AHZ40360

SEQ ID NO: 217429 - RNA, 1410 nt, Artificial Sequence
  derived and/or modified CDS sequence (opt5) from neuraminidase__InfluenzaA__AHZ40372
augaaccccaaucagaagaucauuaccaucggcagcgugucccugacaauuucuacgaucugcuucuuuaugcaaauugccauccucaucaccacagucacccugcacuucaaacaguacgaguuuaacagcccuccgaauaaccagguuaugcuuugugaacccacaauuaucgagagaaauauuaccgaaaucguguaucugacaaacaccacgauugagaaggaaaucugcccuaaacccgcugaguaccggaauugguccaagccucagugugggauuaccggauucgcccccuuuucuaaagacaacagcauccgccucuccgcgggcggggauaucugggugacaagagagccuuaugucucuugcgacccggauaaguguuaccaauucgcucugggacagggcaccacacuuaauaacgugcauagcaauaacaccguucgggaccgcacgcccuauagaacacugcucaugaaugaacugggggugccuuuucaccugggaaccaagcaggucugcauugccugguccucuagcuccugucaugauggcaaagccuggcuccacgugugcaucacaggcgacgauaagaacgcuaccgccagcuucauuuacaaugggcggcugguugacucuguggucuccuggagcaaagagauccuucgcacccaggaaucugagugugugugcauuaacggaacauguacgguggucaugaccgauggcuccgcuagcgggaaggccgacacaaaaauccuguuuaucgaggaaggaaagauuguucauaccuccacacucucuggcagcgcgcaacacguggaggaaugcuccugcuaucccagauacccuggggugcggugugucugccgcgauaacuggaagggaagcaauagacccaucguggacauuaacaucaaagaucacucuauuguuuccagcuacguguguucuggccuggucggcgacaccccgcggaagaaugacagcuccucuagcucccauugccuugauccuaacaaugaggaaggggaccacggagugaaaggcugggccuucgaugacgggaacgauguuuggaugggacgcacgaucaaugagacaagcagacugggcuaugagaccuuuaaggugaucgaaggguggucuaaccccaaauccaagcuccagauuaaucggcaggucaucguggaccgcggagauagaagcggcuacucuggcauuuucuccgucgaggggaaaagcuguaucaaccggugcuuuuauguggaacugauuagaggacgcaaggaggaaaccgagguucuguggacauccaauucuaucguggucuucuguggcaccagcgggacauacggaacgggcuccuggccugacggggcugaucucaaccugaugcccauuuga

SEQ ID NO: 217430 - RNA, 1410 nt, Artificial Sequence; identical to SEQ ID NO: 215082
  derived and/or modified CDS sequence (opt5) from neuraminidase__InfluenzaA__AHZ40384

SEQ ID NO: 217431 - RNA, 1410 nt, Artificial Sequence; identical to SEQ ID NO: 214218
  derived and/or modified CDS sequence (opt5) from neuraminidase__InfluenzaA__AHZ40396

SEQ ID NO: 217432 - RNA, 1410 nt, Artificial Sequence; identical to SEQ ID NO: 214218
  derived and/or modified CDS sequence (opt5) from neuraminidase__InfluenzaA__AHZ40408

SEQ ID NO: 217433 - RNA, 1410 nt, Artificial Sequence; identical to SEQ ID NO: 214218
  derived and/or modified CDS sequence (opt5) from neuraminidase__InfluenzaA__AHZ40420
